United States Patent Application Publication US 2024/0093182 A1 - sequence listing, part 6

SEQ ID NO: 11451 - DNA, 1194 bp, Artificial sequence
  DNA replication origin
caccgcacgtacgatctgggccgaccagccgagggcgggagccggaggaggaggccgagggggctgggcttgcgttgccgctgccggctgaagtttgctcccggccgctggtcccggacgaactggaagtctgagcagcgggggcgggagccagagaccagtgggcagggggtgctcggaccttggaccgcgggagggcagagagcgtggagggggcagggcgcaggagggagagggggcttgctgtcactgccactcggtctcttcagccctcgccgcgagtttgggaaaagttttggggtggattgctgcggggaccccccctccctgctgggccacctgcgccgcgccaaccccgcccgtccccgctcgcgtcccgctcggtgcccgccctcccccgcccggccgggtgcgcgcggcgcggagccgattacatcagcccgggcctggccggccgcgtgttcccggagcctcggctgcccgaatggggagcccagagtggcgagcggcacccctccccccgccagccctccgcgggaaggtgacctctcgaggtagccccagcccggggatccagagaaccatccctaccccttcctactgtctccagaccctacctctgcccagtgctaggaggaatttcctgacgccccttctcttcacccatttcctttttagcctggagagaagcccctgtcaccccgcttattttcatttctctctgcggagaagatccatctaacccctttctggccccagagtccagggaaaggatgatcactgtcagaagtcgtggcgcgggagcccactgggcgctttgtcacattccaccgaaagtcccgacttggtgacagtgtgcttcccttccctcgccaacagttccgagtgagctgtgctttagctctcgtgggggtgggtcaagggaggatttgaagagtcattgccccactttacccttttggagaaatggcttgaaatttgctgtgacacgggcagcatgggaatagtccttcctgaaccctggaaaggagctcctgccagccttgcacacactttgtcctggtgaaaggcagccctggagcaggtgtttttttggaactccaaacctgcccacccaacttgcttctgaaagggactctaaagggtccctttccgctcctctctgacgccttccctcagccagaattcccttgg

SEQ ID NO: 11452 - DNA, 1262 bp, Artificial sequence
  DNA replication origin
ccttcctgaaccctggaaaggagctcctgccagccttgcacacactttgtcctggtgaaaggcagccctggagcaggtgtttttttggaactccaaacctgcccacccaacttgcttctgaaagggactctaaagggtccctttccgctcctctctgacgccttccctcagccagaattcccttggagaggaggcaagaggaaagccatggacaggggtcgctgctaacaccgcaagttcctcagaccctggcacaaaggccttggctacaggcctccaagtagggaggagggggaggagtggctgcctggccacagtgtgaccttcagaggcccccagagaaggacacctggcccctgcctgcctagaaccgcccctcctgtgctccctggccttggaaggggtatgaaatttccgtcccctttcctccttggggcccaggaggagtggagggtcccgggagaatattgtcagggggaaggcagggggtgtcatgggaatgggtgagggggctgaggtgcagaatccagggggtccctgcaggagccgcagtggtaagctgtccagctggaagcctggtaactgttgttttctcttgagaggggcttcctgtgaccttggctgtctctgggagcagggctggggtacctgagtggggtgcatttggggtgtgtgggaaggagagggaaagaaagatggacagtgggactctcccctagcagggtctggtgttccgtaggctagagtgcccctctgctctgcgagtgctgggcgggaggggagttggtgagagctggagacccccaggaagggctggcagaagcctttccttttgggtgctgtcaggtccgcatgtcttggcgtgttgaccttcacagcttctggcgaggggaggaatgatctgatgcgggtggggagggttagaggaggcctcaggcctaaggtggtgcagggggccccctaggggctgggcagtgccaaggcataaaagccttccctggtccctggtggcatttgaaggtgcccaggtgagaggggcttggcacctcctcaccctgggagggagaagaaaccagggaacaggtaggagtgggagacaggtgaggctttggaaatctattgaggctctggagagatttgtgtagagaggaaaatgtggttctcccccagggtctcctcctgggtttttaccctctaagcaacctgtgggcatgctgggttattcctaaggactagaagagcttggatgggggagggtggtt

SEQ ID NO: 11453 - DNA, 825 bp, Artificial sequence
  DNA replication origin
tccaagcttgctgcccaggagacaggagagagctgtttttgtctgtgggggtcttgttggctgcaacaggctgggagtgggagggggatgctgctggagggctgtgactccagggtgtaacttaattttacatagttttacaccctggagttccttgagcctctggaagatggacccataggtttggtcaccactgatgggacactccctgccccagcttgccataagctcttctctcacgtcctgctcctgggtaaggtggcacctatccaggtctttgacactgaagggcagtgcttccaaattcacttcctctagcctctcatttattcttgcaaaccatagatatggcttgaataaatattgagccagtcattgtgctgctatgaataagacacaattccacccctcaaggatctggtgaggatgggtgggtggggagacccaaaactataaatccatgagcagaaaaatacataaaatgtgctgggggcatctgatctagcttgggagtgggagttgtattgggggtggtggctggggggtggtgtcttatgacattatctctaggctgccacttaaagtatggtttgaagacagggagaacggggcggcggagtgaaagggttgaggacatcccaggcagaagggatagtgtgagcaaggcatgaaggtggcacttgggcaggggcagggagtgggtgggcagggtggaggctggagacacgggcaagggttagctccaagggagcctgcagcaccatgccaagagcctagggcctgtcagggatgagcagcagccgaggggttttaaacactgagcgg

SEQ ID NO: 11454 - DNA, 1694 bp, Artificial sequence
  DNA replication origin
ggagacatccctgatccttcgctgcgtccagtggcaatgggcagactcctgcggaggccccactgtcctccattccctggtcagttactatgaatttgactatcccatgtatctcaaataagtggaatcatacagtatttgtctttatgtgactggctcagttcacttagcatgatgtccttgaggttcatttatgttgtagcctgtgtcagaattccttcattttttgcctgggcgacatagtgagaaccccctatctgaaaaaaaaaaaaaaaaaagaaaaaaaaagaaaaaaaaagaaaaagaagaaagaaagaaaaagaaaagaaaaaaattgccgagtgtggtggcacacatgatgctgcgcatgtggctccttcatctggggctctgaagtgactcatgcctacactgcctctacatctgtctccctgtgtttggtgaatgggcaaatttgacttacgtgtgatgacagatgatttaagctgggggtgggtgggtgggagagataaggaggccccagccccatgcagagaatggcacatgatgaccttggtttatttaaagtggagtgctgccatggccagctgtgccccaggggtgccaggcctacacaggcctaggcggtcagctgtgccctctgcccagggctcagcctttactaggtttctgatgtccttatgctctgacatcacctcaggtcctgtgacttacccccctcccactcagcagggaccttgttctgaagactttggccttttcttggatgctctcgggcagtgtggcaggtggtgtcaggtggcagtgggtgatggggaggcttggaggctggctgggggctgggggtggagaggtaccactttgtcctgcatggctggctctgggtgtaagtgcagtgagtcacacctttcaggtagtggtgaggagagagggcagtgcatggaccttgggtatgtgtgggtgtggggttcacaccccatatgttcccatcttctgagaagtctaatggctgatctgcatctgcatgtactgtgggacaggcttgcataggactgtgtgacttgtgggtgtgagtgtggggatgtgaggatgggggttacatgtgcctgtggatttccagtgagtacacctgtcttagacctgagggatctgggtctgtgggcagaggtagtgacatgccatacagggccagtgggagtgtgtgcactcggtgagtgtggggtgcgtggggttggtctatggtggtgatgggataggtattgagtgtgatactgggcttgggggttgggggtgagtagaggtcacagtagagaatgaccacaaaatttcaatgtaccttgatctgtctttattttaatttaagctcggcctctgccagggctcaggttgctgggtaattgttggtagtaggggcagaatttagggcctgaagatgtccttggaggagggagacatgccaccttcagcaatggtgcctcaagcagtcagggtcaagcttggcaggtggggatgtaggaggtgccagggaggtcaggggtagtggtgctaacatcctggcctcttgtctctgtgtgtttccaaatgactgtgtgtgtgtgtgtgtgtgtgggacatgttttgtgtctggtgtgtttttatgtatacccatgagagcctgtgatgtctctacatgtcacttttgacctcaaatgtgt

SEQ ID NO: 11455 - DNA, 934 bp, Artificial sequence
  DNA replication origin
cagtggagcatacattgcctagattgtaaccgtgtgtgtgcctagacacaggcaaatgagcccatgtgggtgttcatgaagggcctgccccctgcatgtttgggggtctgtagaatgagtccccatttctctccccttcccaaataactgccaccatcttcagttcagactcctgggccccaggtaaggggctggtgaaaaccgcctgtgactggggacagagacacctgagtcttaagccccacccaggctgctagtgcccttgagcaggcatcaccccacccaggcagcgggagtgtcctcacccaatgggatagggtgacatgggggaggaggtttgaagcggggagaaggcagcgaggctttcagctccctagatgggaggctcattaccctagcactcagtaggttgtagggaagggggactgagccaggacttggcactgactacaaagggtaggggcagcccccagcactcccgccgcggcaggccaggggaggggctgtgacgtttggtggcctcatgcagctgagaggaagtagctaattgccaacctgatgactggcggctgaggagtggggtgatgatgccactggcagaagcaggcgccctggcccaaggaggaggcccttcagcaacggagtgggcctgcattctgcggagggtgagactgaggtggctgcagtcaaaggagaagggggcaggggtttgttgaggctgtgaccgtgggaaagcgcttctccagggcttccctcagcttcaaggagaaagagttcagaggccctgaggggatgaagggacttgtgaaggggcttcagggggatgggttggggggaaggaggttcctattcttactccccttctgcctatgctcccccaatgttcctgtctctcccctcccccaccttggccccctctttggcccctgtggcc

SEQ ID NO: 11456 - DNA, 905 bp, Artificial sequence
  DNA replication origin
gggctgtgacgtttggtggcctcatgcagctgagaggaagtagctaattgccaacctgatgactggcggctgaggagtggggtgatgatgccactggcagaagcaggcgccctggcccaaggaggaggcccttcagcaacggagtgggcctgcattctgcggagggtgagactgaggtggctgcagtcaaaggagaagggggcaggggtttgttgaggctgtgaccgtgggaaagcgcttctccagggcttccctcagcttcaaggagaaagagttcagaggccctgaggggatgaagggacttgtgaaggggcttcagggggatgggttggggggaaggaggttcctattcttactccccttctgcctatgctcccccaatgttcctgtctctcccctcccccaccttggccccctctttggcccctgtggccaaagttgttgaggaaggagggagtagatggagggctcttttcaccagaagacccccaggcacaagcagcccaccttactgatggtcagagcatccagaagaagtggcaagacttcagctgtcctcaaagcaggaagacagagtgtttctggcagaaagaacagcacaagcaaaggttaggcagtggggtctggagaggctggtggaggactggggcttggcttcaatggttatgagaggaggtgggcaggatgttctgtaccaagggccacactgtcccttcctggaagaaacagtgggtacccagcacccagagcttctcccacatgctggccaccgcctctggccccagtagacctggccctcaactgcctcagcaagcctcacaggttggggaccccaccctcattattctcaagtgcatcaaccccgaaggactgaagccccgagtcccaataaacaggtcccatcc

SEQ ID NO: 11457 - DNA, 1263 bp, Artificial sequence
  DNA replication origin
gccgccgccgccgccgcgcgctctaccggcccgcgagtcctccgcgacatccgggccagcgtctgcacccagccacgtgtcctgcccctggtgcgcaggtggactggaaaagaggaaggcaaacgcagtggctaggcggagacctcccaaatcccacgtctccccgagaatccccgacgggctacagacctagggcagccataagaaaaaacgtcagctacatctcgagggagtggggtggagtgcgggcgcttgctctagtcgagccctgacatcgattctgcgggggcggggaggagtcggcgcggggctggggctgggaggggagtttatttattagccagattagccagcattaatgggggagcggtggcggccggcggcagcagggacatagctggcatagctggcatagcggcggggcctcctgcggcgcggggctccgcggcttcaaaggggcttaaagaggcccttggtggcactgccacggccccgcgggggagggcgtgggcgcgggcggcgggggagaaggcggccattgtgcaccgagggattagggctctggcctggaaggaattttaaactgccgcgagccggagccccaggactctcctcctgccccacccctgccctccggagcacgctgaggtgtttacctgctttcctatgtctggggtggagggggtgtcctctctcctccctcaaactggaggcacctagggttaccagatctggcaaataaaaacacaagacttccagttaaactggatactttaaatagtgtaagtctgtcccaaatattgtatgggacagacttatgctaaaatattattcgttgtttatctgatattcaatttaattggacgtcttgtattttttttcctggcagcccttgaggcattgaaatctctaatccatgtctggaaacagattgatggttcccgaaagtccagtgggtatgcctcatttgagagatccctaagggcagggtcgtgtctctccccttacactgggagtttcctgaagcccagatactgagtttcaccctaaagaaggcagctctgagagcactatatgtgtcccccgtcagactgggagcttcctgaggacaggggctaaatttcacccatgagagtaacgcttcaaggtcagtgtctgtgacctgtgacactggggtttcctgaggcatggtctgtccgcttcctagagggcaagtctctctcctccctcacgtctcactctcccacccccaccccaccccag

SEQ ID NO: 11458 - DNA, 874 bp, Artificial sequence
  DNA replication origin
ggcagtcccagagggcggcaggagttggcagccagtggtcctggggaccgcgaggtgggtgggtggagggtggcgaagggagggttccgggaccggggagcggcgtcttaattacggcgcgttggcccagcgccgcggagcgccgcggatgacagcggcggtgggtaattagagcgcattagccgtgcccctgcaatcctgtaatttcttctcgcgctcggggtgtgttgtaggaggcgaagcgatgccggcttggctgagtcagactctcggaagcccaggaggggacgcagggggcggcagaggccgcgaagaagggactcccgccgggggaggcgcagacgcagtcctctaggagtcacctgtcccgggctcctcggcgcgcgcgccccgtcggcggcgggaggtggtgggaagggggcgtgacctgcgtctcctcccgccgccgccgccgccgccgccgccgcgcgctctaccggcccgcgagtcctccgcgacatccgggccagcgtctgcacccagccacgtgtcctgcccctggtgcgcaggtggactggaaaagaggaaggcaaacgcagtggctaggcggagacctcccaaatcccacgtctccccgagaatccccgacgggctacagacctagggcagccataagaaaaaacgtcagctacatctcgagggagtggggtggagtgcgggcgcttgctctagtcgagccctgacatcgattctgcgggggcggggaggagtcggcgcggggctggggctgggaggggagtttatttattagccagattagccagcattaatgggggagcggtggcggccggcggcagcagggacatagctggcatagctggcatagcggcggggc

SEQ ID NO: 11459 - DNA, 1825 bp, Artificial sequence
  DNA replication origin
tgtccctgctgccgccggccgccaccgctcccccattaatgctggctaatctggctaataaataaactcccctcccagccccagccccgcgccgactcctccccgcccccgcagaatcgatgtcagggctcgactagagcaagcgcccgcactccaccccactccctcgagatgtagctgacgttttttcttatggctgccctaggtctgtagcccgtcggggattctcggggagacgtgggatttgggaggtctccgcctagccactgcgtttgccttcctcttttccagtccacctgcgcaccaggggcaggacacgtggctgggtgcagacgctggcccggatgtcgcggaggactcgcgggccggtagagcgcgcggcggcggcggcggcggcggcggcgggaggagacgcaggtcacgcccccttcccaccacctcccgccgccgacggggcgcgcgcgccgaggagcccgggacaggtgactcctagaggactgcgtctgcgcctcccccggcgggagtcccttcttcgcggcctctgccgccccctgcgtcccctcctgggcttccgagagtctgactcagccaagccggcatcgcttcgcctcctacaacacaccccgagcgcgagaagaaattacaggattgcaggggcacggctaatgcgctctaattacccaccgccgctgtcatccgcggcgctccgcggcgctgggccaacgcgccgtaattaagacgccgctccccggtcccggaaccctcccttcgccaccctccacccacccacctcgcggtccccaggaccactggctgccaactcctgccgccctctgggactgcccctcagtcccaggagagctatgaggcctcactgggggcagaacttggggagaccgaagccggcccttccactcccctaaacctacagtcctggaaggtctctgctggaagagactgggagagtggggaggggccagggacctatttcgttgacagaaacagtgaggtctattggaaagttagccttcagtgggaggagtggcaaaggcacgcagggcagcagtacccccgtttggcacttgaggcacggagaagggaagggaagtccgcccagccagaactcccagacccgctcgtttaacagtggctttatgagcagcacgacggactccctcccctggcggggaaattaccttcctgcgaagaaaggtgacatccccgccacagacacggaggccccgcctgctggccagctgtggccgccataggggagctggtgaggagtgaggtggctctggcctcccatgtcaggtagggtgagagaggccctgaagatagaagccaggcccgaaggccagaattaaaggggtagcttggccatcagctccttcccccaaaaccaggctcagagctctcctctatcagcaattctttcctgaggtccagggtgttgcaaactcatggccttgggccacgttttaccttcagtgaggttttgtttggcttgcaatgagtacatgggttttaggttgaatgtgagagtctgcagacaatgtgggttctccgactgccctcccagtgaaggtggacctctgatttagaccggcccgctgggcccgtgcctacatccttttcctcagcgtcaggatcttagtccccatgattgctgcccctttgtggtctgcatgtttcttggtaagggtgcccagtcaagtgtctctgggagccccctcttctctgtcatcgtcaggctccccacttgcagtggccgtggtggctgcacatgctcccggatacccctccagcactcccttttgtcatc

SEQ ID NO: 11460 - DNA, 1816 bp, Artificial sequence
  DNA replication origin
cctggctttgcacgtgttgttctgtctgcctggaacactcttcccagaactagcttcttctcatccaccagaaaccagtttagatggcacctgctgaaacagatcagctcacaaaggcccggcacaacctggcccacagaagcattcctgagtgctgtaaatgaatgaactgtgaatcaatgaatgcagaagattctgaggggcagaaaccacatgccctaccctcagggagcccacgatctgatggtggagactcagcctctgccttggaacccctcagtgagcagagctgtggaactcaaagaaaggaaagccttgcctggggcctgcaaccaggttccctctgaacttcaaggcaaggaagtcttcttctatggtcagggcccagcccacacctgctacaaaggcagggcccaatgaacatttctgggagggagcagaggggaggggaggggaggggaggggaggggaggggagggaaggaagacatctcatggacctttggcttttctttgagggctgcactctggtcaagaggctccctggtgaccagggccaactggccctttccatcagagccaggcactggagagcacagtgtgggtgcttgctccatatttgagagcagaatagagctggaggactctgggcatcgagaagccaggccccagcgacaaggctacctcagtttccagacccacaatgagagcaaccagaggagggaggggagaggaggcaggctgccacagggccaggaagaggcagctaaggcagtgtgggacccacctggggtgaatggatggctgagcctccagggtggcctcaagggttgcaggggagaccagacagggctaagggttgcagtcctggtgggatctgagcctggggaaaagggagaagctggggaggaatccttccaccagcccttcaaggcgagcaaagccccctgcactcccccagccccagcgagagcagctggttagtggatcaggatcattgcctcaggaaggcaggggagtttctgtgaatgagtcttttccatgctcaaaccaaaacctaagtccctagcccagcaggcaaagctgccacttcctctccagaacagcaaagacctaaggcactgggaagagacctgccacttggggcacctcccttcaggcctccctgggggtggctgctgtggcacaagtggaggagagacaagtcaggatgggagactttctcctgagctggcctctgtgttctgctgtgatatccctgccccaggagacaaagtgccacagagggtaaatagtaggggtggaatttaaaccctgagaaagagagcaaaaagtcacagacttcctgggtctatgcagggataagagctaagtgccagggaatgagtaagtgctgaagcatgaagccaggggttagtgggtcagtgacccaccccatccacctattccttagctggccatcattagggaaatgatgtatttatttaaccaacacgtacatagtgcaaggtaaaacacaaatacctaacaaatattaattcagtgattacccagaacaaacctaggaagagagcactattgtcatccccagttgcagatagggaaactgaggcccaaggaggttacctgacttgccccacatcacacagctggaaagtggctgaaccgggattcaaacccagacatgatgctgccccagttgggtcttgctgctgccatgatttcaaggcctggaaggggtcagagaaagtcaaaagtcaggaggccagcatcagagtagggcaaggacctcccccagcaacagccagagcctgaga

SEQ ID NO: 11461 - DNA, 1717 bp, Artificial sequence
  DNA replication origin
gctcctggctgggtgggtgttctgccaatcccttccccaactcctaaagtgggagggtggtggtgaggccagggaaggggcgcaggtcagagatatgccccctctcctctcccagactgtgcatgggtaaagcagggcagagaggggctggtggaggggcgggaagtttctctgtttagggccaggaaatgatttccatgcaaatgagatgcaaactccttaatgagtttgcaattaggagaccaaggctgccaggccgggcagcgcctgcaggttttatgaatgggccagcgtaggcgggggggagggggcgcgccggcccgcccccacatttccctgccgcggcgcccgcgacatgccgcgccgcacgttgctgcctccaggccccgccgcgacctggcccaccgccagcgggtcagctgctccggacggcgcgggaggctgccggccagagtccccgccacgccgccggccggcgacgcaaaggagccgacgacactccccctggggcccggcaggggctctgtcctcgggcccccttttttcccggttattggaatgatttcccgaagcaggaaggccagaagttagccttcaggccccgttgtatttaaaatgggctgccctgggacttcactgaccaaaggagggggctgggcccctaacttgggtgacagcaatgaccttgggagggatggaattatacgtgacaggagagggaccagttcccatcccagagctccttgcacctctccaattccctcatgccagtccacacctccctaacctcaaaaggcctgttcccaccaccccagggcacctgctttttctgcagagccaccctagtccactttgggtcttgctctgacctggggcccaggagagggtctcctaagtgggtgggtacacacaggtttgctgtggtccagaaggaggctgaccagagtttgagagtttgagcccagttaggtcacagccccctacctcctcccctcccctctcctccccctgtccccgccctgccccattgctttcagagtaaattaactaattacctccaattaaagcacctggctctctgtatcctcctaggccttcaatcactgcttctgggagtcctcttcatccaggcagggtctggaagggggcctgaccagtaagttggaagtcagtgaatcaatgaagtggggcggggaagacaggatggaggaagcccacagtgccatttactgcttgggagtggtccaggcagccaggacctctgacttggccagcttgcagactgaggttgggtctggggacttgggccctaggggggcctgtgaaggctgggagcaggagctgcctttggaggttaagtccctggtgaagggcctgtgcagatgtgtgcagatgtcaaggccctgagggtgaccctagaagcccctcagcaggagaagcaacttgagggtcaggtcctagaagctagcagttcttggcacctgctgcctccctcacccagcaggcagggagagactccaaatgcctgtaggcccaaccagtccctcctgtctttaaccccagctggctcctcctgctgctcaggaagtgaaaacccctccattcttttctccgggcccccttggtggcccccaggcacaggcccaacactagctctgcccagcactgtcctggcccaccccacgtgtaggacgtgatggggaggatacctggtggc

SEQ ID NO: 11462 - DNA, 1745 bp, Artificial sequence
  DNA replication origin
tccccgccccagaattatttcagtttcctcatctgtcagttctaggggtggacttcattcattcaatactgtgtccctgacctctgctccctgccaggctctgaactagtcatgtgtcaggctggatacttagatggacaagacaagccatcccctgcccacagctgccccacctgaagtctaggccagtgacctccgaagtttttttgatcatgtgcccttagcaataaaaaagattgttgagtacgcacccgtcagatgagtatgtttttatatagtttaccttgtaaaacacactcacactaaatgaaaaaaggattcgatgaaaaataaataggcattctaaaactttcttccagtacccctgaaccacgcacacatatggcacttggaacccaactgctccaggagctgggagggtagggtcagtccagccatactcaggacggatgtgtggtcagtgttccagaacatccttgcccacccctttatgccctagcaaaggaagggagaaacttcagatacagcaggtgggagtgtgggcagatgggaagcgtaagcaggtttatgtctgaggaggcagacaagaggcaggtttttattttagactgtgatgttgaaaattttgtgatcactttttacactgtcccaggacatacagaaccaagacatagtgtcccaagtagtatctaatttcatatactttaggtagttctattccatttccaaaggtttagaataccgccccacctcaacccccaggaaactggggagcactccctccactacacacacttgggacacgaaggacagaccctggttggggaggcacttaggtgtcccttccttaggggctttatctctcacttcccctcctgggttggaggctcctgtgaccccctcgcctgggcaggtccccatgcagggtagagcacttggaggcctctgtaaacatgggttacaggagagagggggcaagaggccacagctggggtacataaggaaacccctctgtgggcccccttactcagagaagtctcaggagaaaccctttcccccacccccagtcctggcaccaagctggagaaagacaaaatggcttgtgaaggcatctgtctgccctccagggtggctgccaggggggcagccatgatggctggcctggtgtgggtgcctttgtgtgccatgactgggtgtctgtttctgcagtcactaggcgcttgttctgtggggtgaggggtgtgggggtgggggcacggcctatggcagggcacgtacgtgaggctgggcacgaaaagcctcacccacctcctgccaggtacaaccagctgctggggccaactgccgaccgcctcctcccttccctgggcacggccaggccggggggcaaatgacttggcaggcacctcccctcagttggacccactagggcagggccggctcacctggggcacaggcagggctcctggctgggtgggtgttctgccaatcccttccccaactcctaaagtgggagggtggtggtgaggccagggaaggggcgcaggtcagagatatgccccctctcctctcccagactgtgcatgggtaaagcagggcagagaggggctggtggaggggcgggaagtttctctgtttagggccaggaaatgatttccatgcaaatgagatgcaaactccttaatgagtttgcaattaggagaccaaggctgccaggccgggcagcgcctgcaggttttatgaat

SEQ ID NO: 11463 - DNA, 1493 bp, Artificial sequence
  DNA replication origin
aaatacgaaaattagctgggcgtggtggcatgcacctgtaatcccggctactcgggaggctgacacaggagaatcgcttaaacccgggaggcggaggttgagtgagctgagatcgtgccactgcactccagcctgggtgacagagcaagacttcgtctcaaaaaaaaaaaaaaaaaaaggaaaacaaaacaaaacaacataatactctggtaaggcaaggcagggatggaggacaggagttaagaaagatttgagggaaaatagctatttagtaggtagaagtagcttggcatagagaaaggaccatgctgggaaacagggcagggagttcagaaattcaagttagcactatcaaattatcttgggataggttattgagaggtgggctttgtattcagaggaacttcatagtgaaggagaatggggtagggggttgggggtgagcacagggcaagctgcaggctgttcctgtggaggggagctgggccagctcagctgctgactggtggaggcctgggctgaggcagggaggggagatgcctgcagcagccaatgcacagctgggggtctggtgagactgtgtgtgatctgggctacagggctttctctcctgctggcctgtgctgcctctcgccctgcccttgtgctctggagctgcccctcctctgagccatgtccaagaaataaagcgcatccatgcctccctgcacctgcagtcttaaacctgttgggctactcaattgataaacttcccctgaggtggaataggcaggatctggtgaaagtttggaggtggatggaggtgagggtaccttctagggctctgacttggtggaatggatggggctctttatggagttcaggatcttaggaggggagagaggagaaggcagggaattcttttctgcttgtttagttgcaagtgttttgttgacagtacggtacaccaaacataaggtcgggggtgagaatagagggagagagacttgagaggcttcagaaatgcacggtgcttctaatcatgaggtcacccaacgagaggctggggagagaggcgcagtaagccagggtggagcgctggagaagccgatgtttaggaggcaggtgggcaggaagaagctgggtggggagtcaagaagacagtcaaggagatgggaggaggactggggaagtggagtcctggaagccagggaggtgatgttccaagaggaagtggtcaacctcaacagatgaagtgaggcctgtggagggacaggtggagtggctacaggccatcactggtgaagcagtggggtcaggcagcctgtggtggggtgagaagggggaagtgcaggtgacttctgcaagaagcttggctgagaagggaaggagagagatgggctgtaactggaggtcgacataaggattttaggatgggagacacctgagcaactcttcttgtagacaggtggttctccccttgtttcgagggggtctttggtaagaatatgttg

SEQ ID NO: 11464 - DNA, 1255 bp, Artificial sequence
  DNA replication origin
gctccgggctcctgcggcggccgcggcagtgtatgggggagggggagcggggggagggagggggagggggcggagccccgcaggtcccgccccgcacgccggcgcacgcaaggtgcgcgcgcactctcagatcgcgtccgccgggctgggcctggcgcgcaggcgctaggaagaggccgcgtggggcgaaggcggcgcttggctggtggggcccgcggcgggattttcccgggcggcgagagcggtatggtggggggcaggggtgggcgttaagtcctcattccctccttctcctcttcctttctctgcagtaggggaggcccactccccggggtgagtgaggagaggccagagtgggaggcagagcgtcagtgggaggggtcccgacggggaggggggggtcccgacggggaggggggtcccgacggggaggggaggccccttacccggatcctcctcccttccgctctccgtgggctgcttctgcgacccccaagtccgtggccggcgctcacctgctttccccgggttgcggcgtcgacttggggagggcgggctgcgttcagccgtcgctggtcactccggagcgtctcctccggcttctccgctttccgcgctcccctcccctttcccaacttaggtctggagatgagttagccagacgcctctgtggtgtgaggattgagtttttgctttcactctgtcaacgctgatgagtgcgccctcccccaggccagggggttccctggtttcttatttcaccagagactgcatctaccagtgattaagactggaaagatgaagggagagactgagactctttctatatatcacccacacaaatagatcataaaggcacaacgggcaccaacctggtcatttaatttctggttcctggaggggacaaaaaggaagtattgctttccacagccgacgataaatgaactttgccaccgtaagagacggacgggactgaatttataaagaggttaaaagggcatatgacagacacctcaggctacttgggaaactctgggagtttgggagataattaactctcagggctggtggtggtggggaactgccactgctgaacagaaggacactgcccacctggggggtttggatcttgtagttggtcagcgtctctgctgtatgctggattttcaagagttcattagtagcttgtggaatgcaactgtaaggtttgatttattgcagtgtttttcaaactgaatcctattggtgagttgga

SEQ ID NO: 11465 - DNA, 979 bp, Artificial sequence
  DNA replication origin
ccggtccggggtaagggctcgggctcgggcaagggcagggttcgcaggtgctggcacgaggccggccgctgcccccggctctggggactgactggtcggcgggctggagaggcggccggccccgggagcgtgtcctctccttgcgccccacacagtgcagttcattcatgagccgcccgggcctgcgttggagggtgcggtggggaaaagattcagacgcgaaaccgagagtggggcaaaggccctgttgtggggagggggcgccgctttgtccctcctggctgtcttgaccgcctaaggcggacagtcccaaagcttggcaccttgttccccagaaaaggaaaggacgcttgggaagtggggaggagaggtcagaggggctggctgcccttggggcgctgtgctgccccctgcctgggtcccctgggcagaggtctggccgctcggggcaagcctgagcactccaccgccctggggggctggggcttgcctacccattaccagtctgcagcagccggggagcaatgaggctgtgcccaacacctgctgaagaggggcccatcctgcctcccaggccagggtgaggtggggagtgggagtgtcagccaggcttcaagtgggggtgtgctggcagcgtgattgtcctccagggcaccagagggtccaggccttggcatgccccaggtggcacatgctggggcctgctgttggctcactcagtgcagtcttggcctgtgggtggatggggacatggcaaggcagaaggcaggcagtgggtaactaagaacccccttggacatcattcaagttctctccaagtatagcagagtcttagagacctgcgttcaaattctagctctactattcttcagctgtgtgaccttgacaagttacttaacctgtctgaacctcagttttcattaaaaagtgtttatgcctataattccagcactttgggagactgaggcggacagatcac

SEQ ID NO: 11466 - DNA, 879 bp, Artificial sequence
  DNA replication origin
gatgagtaaactgaggcaaaaaaaagattcaatagcttccctagctagcaagccatgaggtagggatttgaatccatgcagtctgggtcttatctattatggtattatcactccaagtgatttgcaaactgtccttcttcaaactctgaggttctaaagaggtatgctctatgcgtgggaggagaggtgaggggaggccaggcagacatgcatgccaccctactgtcatcggagcagccctgcttttccacactgggtttcacaccgataaagagatcagaatccaagtccaaagccactgatctagttgaacctttccattttttcagttagactgaggggtgagggaaggggacttctctgagatcaggactaaatgcaggctctctctcttccctgggtgtttctccaggtgttgcacacctgagggtggcctctctcagggggaaggtggcagggagcccaagggaagtgcacacaggggtttttgggagctggttggtggcacggggttggaacaagcagaacgggctgggctgggcaagtggaagagggatcagggcctggtatctgtgtgttgtgacccagcgtggaaagtgacaggggcatgaggcctcacgttgaggtactccacaggcttggtgacgttgaacttgtccatggtggtgatgatgatggctggagtggtgaggaagaagaggaggatgaagaggacgacattgatgaccaggcagcgcagccaccagatgaagcctcggatggagaggtgctccctggcaaggtggggaaccggtcagtccaggaaccaagggcaggattggcccccagtgacaccaagacactccctctcctccgcctacctactgagcccatcccagg

SEQ ID NO: 11467 - DNA, 706 bp, Artificial sequence
  DNA replication origin
atgtgatctgtgtccaagcacatcccgctgagggaaggcacaggtgtgggtaagtatggccatgttggtgtgactttgccctggggcccacatgccagctgggtctggcctgagctgatggctctccccctcctccccacaggccaggccccagactgagccagggaccgggcgggagccccgaggggccggtctcccagccgggccctgtccactcggggtggcctgcattcctagagtggagagggtgaagtcctgggtccccccgagcagggcccaggtcccggcgcggcggtgcctaccgaagggcacgatgatggggcaggtgatactgtaggtcatgaccaccgtgaagacgcacatcatccaggcgtaggctgcgccaaactggaactcgtaggcctgatgctgggggggagacgggcaggaggatggctcagggaggcagggactgaccagaggggcagggaaggagggagggggaagggagccaggacctctggggccggaaaagaagccatggggaacaggacctaatgtctagggtagggtagggcagagcagatggagagaggggctatggccgagaggagggtcagggcggttgcagtgatggggcacggagaggggccttcaagggtcggggcctggcaggtagggggcaagagttgggtggacttgagagtgggatgcccagagccctctt

SEQ ID NO: 11468 - DNA, 1627 bp, Artificial sequence
  DNA replication origin
ttttggagtaggataatcctggcaccagcactgaccgaagcctgcccagtggacagaagatatagtgagggttgtgcatgagagggatctgccacagacatgcctctccactcccaacagaaatgtctttctggaagaatgccttgcatctagcacaaaactgattattgcccctctgtcctccagcagttcctcccaaagaccactcctaatcacctctggcctcaggcgggaggggaactaacacccacccacccctgccctccctgcaaatgggaacatcaaggttcccagtgcttaactgagggacaagtgacaatttagcagagaggcaagatttgaatccagactgtcttccagactcaggacctaccttaaaataatatctgagttgcttatggaggcagacctgcctgcaaagcccagcactcagcaagtgctcaataaatatttgatttgaattctttccatggctttgaaagtctaatcacccagactgctgctctgcaaaacagtttaacctggcctggcagttggtgggggtgggggagaggagagatggacaattgtacaagggtttattttgctacctattccatcgtggtttcagtcctcacagcctggaagttgtttccccctgctaagtttcggtcagtatgtcacactgtgacccagaaatggcttgagtccatctaggaggaagtttgcctggctagctcacagtagggaggaaaatatcctccagcgagtttgaggacttctcagctagtggtggtgggaagaggggtgatacgtttgctaagagactgggtgggaggccacccagggaggcagtgcagaaatgcatccccttgagggtcatcccaccctagaagagactagggttgggtgagttgccttaagaactgacttcatcatttcctcctccctagtgggaggcccctcaggggtcaaataagagcctcagaagagtcaacatgcttaaggaaacacagttagaaagtgcagtctgggcagggcgcggtggctcacgcctgtaatctcagcactttgggaggcagaggcaggaggatcacctgaggtcgggagaccagcctgaccaacatggagaaaccccgtctctactaaaaatacaaaattagccgggcgtggtggcgtatgcctgtaatcccagctcctacggaggctgaggcaggagaatcgcttgaatccgggaggcggaggttgcagtgagccgagatcgcgccattgctctccagcctggacaacaagagcgaaactccgtcttaaaaaaaaaaaaaaaaagagttagacacatttgcatcccagcctccggataatttgcttattgttcccaggcaataatcctctctctctgggtgactcttgggctctatctaggttcagacgaggacagtgaggagtacaggatccaattgggattccagtcccctccccacacccgtcagaaggcttggttgggaaagaagtgagccccaagctatccgccccacccccagccctgcggggctttctgcctgccacacgccgtccctgctcactaccccatcggtttccttcgggagtcttcaaagccagtgcacgtgctcccaggtctcagggaggc

SEQ ID NO: 11469 - DNA, 1081 bp, Artificial sequence
  DNA replication origin
gtttccttcgggagtcttcaaagccagtgcacgtgctcccaggtctcagggaggcgacccagggggaggggcagagagaagggggtccgagcccttgggcccctaaccccgtccctttccggagcctcgggtgcccaaaggcgccggccgccagtcccaggcccgaagggcccctcccactgagtcggctctggtctccccgcccctgagccgcgaggactggacgcagctggctgcggagctctgggcgggcgctggggtcgcctgttgcagcctctcttccgcccggcggcccacaccggtcaggcccggcgcgggctgcgctctccagctgtggctatggccccagccccgagatgaggagggagagaactaggggcccgcaggcctgggaatttccgtcccccaccaagtccggatgctcactccaaagtctcagcaggtgcgcggggcggggccggggggcctggcggggcggggtggggtgggggcgaggtctgcgccgttctcacgctgccgggcgggacagggggccagtagggggacccgctgggctacagtgtctcaggggagtcagaatctttggtttctggatgcggggccacttttctgggccttcgaaggccattattagatgactgcctccccaaactccccagccacttacagatgtcccaggaacatagggtagggggaagaggtctggaaaattagcctagaagaccagcccagacctaactgaacaaagaatttagtcttctcgaaccccgagccagtacccacactgtgaacacacctgtctttacttaaaaaatcttgatgttttattcatcatggagtctttaaaaaaaaacaaaaaccgagtctcgctctgttgttcaggctggagggcagtggtgcgatcacagcctactgcagcctcgacctcatggactcaagccatcctcccacctcagcctcccaaaatgccaggaccacaggcatgcgtcaacatgctcagctaatttttttttttttttttttttaagagacagagtctccctgtgttgaccaggctggtcttgaactcctaagctcaagt

SEQ ID NO: 11470 - DNA, 2128 bp, Artificial sequence
  DNA replication origin
atggagatacagtcacaaacacaactgagaacacagacagtcatgagacatgtgctggttaccaacccccaggccaagcaaacacacttccagcaaacacacatgacttgttggtgacagctgagaggacacatgcctggggagagagaggactgtgtgtgaggtggtgaggcatgcatggggcctgccaagttggggagggagtctgggccaagccacggtcccatatagggtggtgaataaggtgtagagtagaggtgcagcaggaccaacccttcccaccccaccccttcgacagggacctgagggagctcagggagggagagaagccagaagaccaggcagagactgaagagagctggcaaggcctggctagaaaaactccaggcaaggcctgtgtaagttggggctcccaggctgtccagcagggggccctggcacccagcaacctctgcttgggaggtggctacagaggggtgtgggtgttggctaggggcccagcaggatggatgccagacggacttctctccaacaataacagccctggctgttgccatccaccgagctggcagggccccagtttgggtggggagaggaaccagcctttcccagtctggcctgagaccctcaccacttccctccagttttcttccacctccagccccctctgtacacaactgcagccactggccaccagccttgccatgcctggcagatcttctgaccactagccctgccacccccacagacccagagaccaggaaaggagggtggggagcgaggaagggggccaaggcagagggcagaggagggctaggagaggaagagagagagactggacaaacatgagggcaggaattagggggttgtggacagacatgaagccactctcaagtcatggggctgtgcctggaaaaataccacctaaacccatcttcctgccctctggttagggctggcggggatgtgggggatgggggtggggtgggggagggttgggaaggaatatgtgtgtcatctctgtggggcatggaaacagaaggctggggacacccattctggagtagcttggggagagccactgaccctaattagaaaagccacctctctccttagggccctgtctgtttctctggggacagggtaggactaccttatccctatgatgtgaggtactgccagttgttaatcagtgtctgtggcttctctaggggacaagcccttcgggtcagtgggcatggggtgggcagcgtgggttggattttctcctcaggacctttccagccttaggatcatcctctagcactgagtactgctggaagggcagggagtgccccccaccccaccccatttattgcccgaccaaagagagggcctccctccccctcccttggagggacttgctggaccacccctcagcacgcccacaccttcctccttagctagtgaaagacatactcagcaaggcttccgcctgtcaggatggctgggacaataggattcactgaggatataaggctgttcctagctttttctcttcccattcccacctgtgcctcagttttccaaagtgctggatttagaaagggtgaattatgagggagctggagggctttgccccacccccctccgcgcgcacacgcaagcacaggcagaggcacataccccctccaagtcaaagttgtgagtggggtggtgtttgcgcgtctgtggctgggactggatgtgtcagggatgggaaaacccatcatgctggtcacagaaaatgcgcggtggggacagaagcagttttgaaggaaaagaagaggagggggactgaaagaaagaagggggcgctgaaagggagggcgctgggaggaaaaaggtgcagtgtggaggaagcgcggcgtgggcagggcttgggaagggataacggaatatctgaggtggagtgggccgtggagcgtcggggccggtctgagcagcgggtgtgtaaatggaacagtcccgagatgaattttatgggagtctgcgcaggtccttaatgtgtggctgtaccctccagccccatgtaccccacacgatggacagacagccttggtgtggcagggcccaaagaggtcctatctaccgcaataacacgaccagg

SEQ ID NO: 11471 - DNA, 1824 bp, Artificial sequence
  DNA replication origin
ctgggggcgcaggggctcggggtgggagcggcggagcgcgcggagtcgccgcggggtggcaggggtgggccgggggcggggccgcgggcgtcggggaggtggcagtgggcgcagggcggggcgagctcagcggagggcgggtttgaatgtgccccggcgggagagggaagctgcagcgagagcgcgcggatctcagcgcgggagcagtgcttctgcggcaggtgctgcccggggccggggactggggactggggactgccggggcggaagacgccgctgcccgcctgccacggagggcagggagggcgggcctgacggctccgcagcccggagaagggacgccgggtggggccccagtgcggagcgtgcggagccgcgcagcacgtggcgcgcacgggccagggagcctgaggaccctgcggggaccgggacccaagctgggcggggcggcctggctcccgggcctaaaacaggctgcggtcacgttgacctccgcaaggggcaggcgagtggacgggtgatccccatcgatctggtcggtatcagggaggggccgtgccgctgactgcgctggcggaggggtatggggatggggatggggatggaggctcgcgagcggaggtgcaggctcgcgagcggaggtgcggggctgtctctttaaccccggtcttttactggctaaactcgtatccctggcgtctccttcctgcgcacgtcttcatttactgatttactgtgagggtatatgagagggtgaagacaaacagtcctcggctttgcttaccaggagagagcagtcgtaggtcaaggctggctccaaccctgccctcacacctctaggggtctctctgcagccctgtggtagtccctttgcctactcctctcggtggcctccagaccctccaactttcctcctgcttgtgtaagctccccatgccaggatgtgtgtgatggggcggggctgagctgcctgacactcaagtcaggctgggaatgatcttggtctccacctcatttttccctttagttgaatcagagttccccccacctcccagtctacagggctaactgagaagcagcttttatacctctctccattccaaaaggagcttgaacatttaatatggattctagctcctccactcaccagctctgtgacttcaggcaagtgactcaacccctctgaacctcagctggccccatctattcagtgctagtactagcttatgggtggttgtgaagaaaagacaagagatctgcaggtagtggctagccccatatgaaatcctgggagtggagaattgcaggagaggtgttgggagtctggaggcagggaggtactcaatttggtggctactttcaggggcccacctcagcaggccaaggcatagttggagggacaccagatgctctgagctggtatcagatccctgtttgccgctgggcaaaggcagacaaaagcaaaacacgaaggctggccagctgaatgttaggatatgggcaggaggagagggctggagttgaattgtgcccaagactggtatgggaactcctgagaacagagagagcaggggtgtagcagggggccagggaagaaataaatacttcttctctaagcctaagccagttttacccaggagaacaggagctattctccccaccctaggcccccatctgctttgaagctacacctgctcttaactgccaggaatcttgcctgtggggtggagtacggggtatgcgggtatgaagtaagaacctagaggaagagtccctactacctaatagaaaacctgagacctaggcagggctcagtggctcatg

SEQ ID NO: 11472 - DNA, 1037 bp, Artificial sequence
  DNA replication origin
tcagattcaattttgtggagtaaaatgagcatagcaatagtcatcactttacagggttattgggaaatcagataaggccatgtaagacactgagtacaggggtggctggaccaagtagcgttgttattcactatctcagtgaataacaagtttcacgacccacgcggttgtcagggcaagtgtgactatccctgccttacagatgagtggcgccgcgacggaacaagcctggctcaaggtcacccggacacggggcagtggcgtgggtctgtctgacacgcagtctggtcacccacccgccaggacgcagaagcgcagagcagtggggcctgacgcccgccagggggcgcgcgggccgggtgacatcaccccctccgctcctcgcggcgggatggggcaggggcctggtccccgtcgcacctctcgccgcccccagccccacggttctcggctgtccgcgaggcttagggacccgcgtggtggttcacgctggaaatatctggagtaggggaagtgaggctttggtctcgaagcttccggggactggagaggcgggggaggggaatgaacgcaggtgggaaggagcctggaataggctaggtgggggaacgtggggtgcggggagggccatcctgaggctcatcctggtaactgatagcgccacgtagctctggggacctcacctcctgcatccatgctctcccgcacttaatttccttaagtcaacacatatgtcatcccctggtaaggacgaggaggcgggcctaggggaggagtgactaatccgggatcacagctggtacagggcaagcccaggagagaggacggaggccttcgtggggccctgctgactcacatttagcggtcaccctgcagtctgttgccagaatgccaacttgctcacttccagcgagcaccaggactgccaaggctgcagagggctccgagtgggcacgtcctctccccgagagcatctacacaggaagccaggtcataccgagatgggctggaggggtccagcccggacataaggccat

SEQ ID NO: 11473 - DNA, 1236 bp, Artificial sequence
  DNA replication origin
gctagaggggggtcccccccgcaggtactccactctcagtctgcaaaagtgtacgcccgcagagccgccccaggtgcctgggtgttgtgtgattgacgcggggaaggaggggtcagccgatccctccccaaccctccatcccatccctgaggattgggctggtacccgcgtctctcggacaggtcagagcgggtcgccgggtggggtcgctgcaaaaaccctgccccggccgcagccggagaggcggagcctcgcggggagggggcgggaccgccgagacaggcctggaaactgctggaaatgccgcagtgccgccgccgcgccttccgccgcatgtcggcaaagagtccccgccagccccggccggcgccctccccctacgctgagctgcccctcagcgcgaaccctccgcccttcctctactcctgcgagagtcgggatctggggctacccaaggttgggtcccgaatgccagtccctctgtcgggacgcgagatgtgtagggcagatgctaggaagaagattgggtctgggagcggtggtccgcgtggttagctgcctccgctctttttcggtgtcccccccagtcccgcccttgggtgtggggacgcctgccccacaagtgtttagggaggtcagtgggttcctcgcccgtagagacaccgtttatgccaaatgagcactcctcatccccgctcttgatggagtcatgtcctagacgtgaaactatggggctgtgatcacaagcaaatgtgtgggcggatccgttgcttgggttcttccccgccccctctttttttcggaccatgacgtcaaggtgggctggtggcggcaggtgcggggttgacaatcatactcctttaaggcggagggatctacaggagggcggctgtactgtgcttcgccttatatagggcgacttggggcacgcagtagctctctcgagtcactccggcgcagtgttgggactgtctgggtatcggaaagcaagcctacgttgctcactattacgtataatccttttcttttcaaggtaaggctgagatctccgctaggcttctttccctttagtgctgtattcgtgttgtttttgtttttttctgtcctttagggagccttagtctagatgtcggggtggcttgtggataacgctctggatttttatagggtgagggtagtggtgggtgaggttttttgagtcctcctcggttttctctagtgtgtttggggggtggg

SEQ ID NO: 11474 - DNA, 1444 bp, Artificial sequence
  DNA replication origin
ggcggcggcgggagcgcagggggcgcgcggcccggggactcgcattccccggttccccctccaccccacgcggcctggaccatggacgccaggtgggggctagggcagcagcgagctcacgtgaccgagcccccgggccacgtgactgccgcgcctcagcacgggggccgggtggggtcccggctgctcggccgtcggccagcatatcgctgcccggagccagcggggatgggagctgcggcttggttttgtgctccttggggagcttcgggcggaggggctggggaccctgacgtcccggatcgtggaggggagtgtgggggaaggggcgcttcctctgacctgagcagccggctagcgttggagggaacagaggagacctgtgtggccagaggggcggatccgcccccggggagggaggaagctctgcctggccagcgccggcgcaccccctccccgagagagagagagagagagaggctctttgtccgggccggagctgcagcggagggggcggggaggagactccgggcactactccagtgtggtcccctctggagggcggaggggatgaggagctgcgccctaatccttatgtccgctttccttacagatggtgggcagtggtggtgctggctgcgttcccctccctaggggcaggtggggagactcccgaagcccctccggagtcatggacccagctatggttcttccgatttgtggtgaatgctgctggctatgccagctttatggtacctggctacctcctggtgcagtacttcaggcggaagaactacctggagaccggtgtgtgaagaaagggcggggaagtgagctaggtcgggaaagagggtatttggccagcagtccaaacgggatatgacttggagagggcgggaggtcggtaggccggacagcagggcaggctggctgctctggggaagatgaagtgctatggagaagatttggggcttgactttgtgtgctttcttcaggtaggggcctctgctttcccctggtgaaagcttgtgtgtttggcaatgagcccaaggcctctgatgaggttcccctggcgccccgaacagaggcggcagagaccaccccgatgtggcaggccctgaagctgctcttctgtgccacagggctccaggtgggtaggtgggctcagcctctcttcctgggttggatgccggtgggcagggattctgtgaaggtttccattttaccagtcccagagctttgctggctggtgtgtttcgtgtcctcctcccaggggcacactgcacctccatctttgaggtgtttgggggaaatgcccttttgtttcttccttttctcctctccagcactggtactgaaagttcatgctgttatttcaagatgtctagtgcagaagagaggactcctcttgccctattctctgtgatttctactgtgccgttat

SEQ ID NO: 11475 - DNA, 1512 bp, Artificial sequence
  DNA replication origin
gctgtgtaccgactgaagccaggcagggtctgggatcctcagggctccacctctccatctggaagccggagccataactgctgcagtttgggcccaggctatgtgctcttctggtgccctagggactgctgtggccagagcctggggccagccagtacagtcctgagccgaggaggagggactgcaagtggaagagagccagtctggaaggaagagctttccaggtggacagggcttcttggaagacccccaaagccccaggtatcctgggtgaagcctgtttgcctctcttgaaaatggcaggtgctcttgttttacccatgttgggtcagcctgaaactgccaaccagtaggaagcatggactctcctgagtgagaagagactgaaataggagcaagcagaaccctgagaggtgtcccatcttattgctgttgaggaccctgaaacaccgttgtttaaagacttcacacagaaggctctgaactgagccactggggaagggaagtttcagtaacatgacactaaaatggcagagacgttaaaaaaagtttttcccttctagagctgttttgcgcgcatgcatgtctgtgtgcattggggctttttagacaggcctgccctgtgactttgtggtagaggcagagagaaggaaattgtcccctgagcacggtagggccttgctgggtggggtcagaggccagtagttccaggcctttctctgtgtccagcacagacccttgtccttgctgtggaaatgatgagggatggagggacaagaggaagaatgagaggacacacgccctggagccctcaccactgccctgggggttgccatctggaggagcctggggataagggtaacccagggaggctgggcacgagggagctgactccacgtttttccccccgttcctcaccttcgagggccctgctaggtcacccctatgctggcatgaagagcatggggcaataaaccagcacagtctctgaccacttggagcgtctcatccagtgagagagacagccgttaaaagcataaacatccaaataaagatgcctttccaagttgcagtgggtgctatgaagggaaaagaatagtgggaaggaaaaggatggagtcggtagagggtcatactttgggtggtccgggaaccctcgcctgaggagtatcatctcaactgggatgtaaggatgagtaaagggatgggggcagagcattagggggaaagcctgtgaattagaggaactgagagcaagccagtggggcttcacagcgggcgagtgagtgggcgaggaacgcgggcgaggccatgtagagcctcgaagatcatgggaagtgggacagaattactacccagccaacaaagcaaggagacaccttcatcctgtcagaaaacggggaaactaacacagaggagcggcttgggatgcagagcctcaatgtcctgtccacaagatggcaatggtcaccatgacctctgggacgcttatgaagggcgatgacgaagcac

SEQ ID NO: 11476 - DNA, 2080 bp, Artificial sequence
  DNA replication origin
cagggtgctgacaggacaacagccttcctgtccagcctgcccacacccactcctctttgccctcagggctctgccgagccagctgcagctcaaagccaaattgaaagctgccgaagtagtccagagggggtttccagggctaagcaccccaccaccccagcacacaggaaagaaggagacagttgcagggtcaccccgtacccccaagcaactcagtgttacacattccaagggagagacacagaaactcttggaagaggagcaaggagacagtgcagcatcctgtcctgctgcccttccctgggagtcaagaggcacctctcagatagcacagaccaggtcgggcctaacagaggccctccattcctgtgtgcacctccaagaggaggtctttgtagtgcagaaaatgtatttgttgagggggccaagaaccttaatctaggggtaatgggggcagttgggaggggaagttccagtcttggggtttccccacgtcaggtggggaaaacgaaagccagtgatggagggtctaggccgggacagctgccttggggcattagtgaggggggtagattggctaaaaggcccgtctgggctggggagggggctgcttgggcaggagggtggcaggctttagcagcaggcagcaggagaggcccaggagagtgacggagggagggaggaactgctctggaaatcccctaggccagggcctgctctctgggtcacattcttgcagccacctccctctctcccccagtatcccctcctcccacttcctcttcccacttccatacctcccacagcccagacacctccaacagagggaggaaagtgccccctgctctctggggactcgctggggagcccggacatttctcccctccacacacacacccaatctggacacaacacctgcttctaactagagatggaaaaggctggggctgagaggctaacaaaagacggcaatgtcaaaagtcccctctccttggatcaaaggtcatcagaggtatcttgcgtgcagcccccaaaaccttggggttctgggcctgagggctggtgatccaggcagagtacagaaaggactgggtcactcctctcccacccactgggtccaccagctgtctttatcaatggccacccaggattaggaccctgcatctccaaaaagcaggttaggacagccacctcctgcctcccctactcctatttatatgagcacccttgaccagggattccagccctccccaactctatttctcatccccagttcccaacctttccctcctctgtcaatgttttcttcttcctggggggctaaatcctcaactggccaacccatcccacacaactgccttttacttcaactgccctctggcccactcccaccaaactccatctgggtctggaggaggaagggttaagtgagggagtgagacacgacagttagtgggactgggggctctggaggtagaggatgtcagggacgctgactctagccctcacttcccctttcttagcagaggaggaagtaagctggggcagccagccgcctgtctgtctgctggggcaagagtgccccagcctggctcaccccatcctcctgaggaccagtcccaaacctacaccctggtggcaccccccatgcctagcttcctggccccgactggcaacctgtaactggcacctgttgttccttgagacagagcattctgaggtcaggaactgggaatcccagatattgagcaaataaggatgtccccttccccagcaagaagaaacaaaaaaactggacttggtcaggggaattttctcttcctaagggtggattattggtagatttccaagatgctggctgggttaagggtcctgccagctctgcccaccccgaaatgggaggacagagatgattccatggcctagctggacctcaaaagtgggctgagagttaagtctggagtttggaagagcgaatggggacttgaaggatcttcacgggggagtgggggtgcccgacctgttgcggctcttgggcaggcccagagttagcatcccgattcagcctagcccccatact

SEQ ID NO: 11477 - DNA, 1249 bp, Artificial sequence
  DNA replication origin
gggaaggggcgccctagactctcacctcctctcgggcggggccctcgtccgccgccgccgctgccgccgccgccgtgagctcctccgagaccccggggccgccaccgccgccgccgccgccggcggcgctctctcccgcggccgagccagggggggacatggcgtagagggggcgcgtcgagctcaggacctcccggggggctgccaggggccgggggcatcctgcgcgggccctggggagaggacgggagggggcggggccctcgctgctccccaccccccgccgggggagggggcccggaaagggcaccgggagtaaggggctgggggctgagggtgggaggcaggctggggggccgggccggggggggccggggccgggggcgggtgtcaccttgaggccctcgcggcgccgctccgcctcccgcccgctcccgccgccgccttttgtctgagccgagctggagccagcgcgccccccctttcctgccagcgcagccgagccccgcccccagccccccaaactccgccttcccaagcctacctaataaccaccccccgaaggggtaaagcaacagggactccccacacctcttccccgctcccagccctgctcactgcacctccctcccgcgctcctatcctgggagaatctgtgccgcaacccctctccatctgttctccgtggactcggtgcccgaggttcaaccaacagcacccccccacacacacacacatctctggttcccccaagttcccagggcagaggagtggggagaggaaattgattcttggaaccctagggaagatccttactcccagtttcgtggtgaagggttaaggcagaagctagacttccagaggaatggaatagggggaaagggaagagattgaagctagatgtgggaaaggactaacagagggcagaggggagggcattggaaccggccttcactgaaccatctttcttccctaaaagaacagctccagagaagcagtgaagtgtgtgcaataccctaggctggagggcaggaaacctgagttctaattctgaattctgtatctgtcattaaggagttatgtgaccttgggcaagtgccttcctgtctctgagccttaatttcttcatctgtgcagtgaggaagttgactggacaatttctaaggctctgacttgtaggtgtaggaagcaagccaggctgagccactgcaggcagcctatcctttcaggccatccaccccacactgct

SEQ ID NO: 11478 - DNA, 1641 bp, Artificial sequence
  DNA replication origin
cccggcggggggtggggagcagcgagggccccgccccctcccgtcctctccccagggcccgcgcaggatgcccccggcccctggcagccccccgggaggtcctgagctcgacgcgccccctctacgccatgtccccccctggctcggccgcgggagagagcgccgccggcggcggcggcggcggtggcggccccggggtctcggaggagctcacggcggcggcggcagcggcggcggcggacgagggccccgcccgagaggaggtgagagtctagggcgccccttccccgggcgcggccgcagcctggccccccatcccccatcgcacgcgtcccccgctggttccgccgcagcgcggccggcgccccgcaccccgagccggccgctgcagccgcagtccgcgccgccgcccccacccggcggccggagctgtccgcggtgccggggaaggggccgcgccgggggcggggctcaggggtcccgggcagggggaggggcctaggggcggagcctcgcggatcctgggcttatgagagtgggggctatgctctaccggggtggggacggtggcggggatcctgtctcacagaggaggatgctaccttgaaggccaggaagggcggcttgtacgggctacagaacgaggagggtaccatggggaagtggtggtggtacctgatctgggaccctaaggaggtcagatgtgtacggggggtcccgcctgtggtcattgggagtgtgtgtgtgtgtgtgtgggggggggtgtgcacctctctctcacgaggctcctgctgcttcctcatatccctagttggggtccctagtactcagtcctctgaacctgaagacaaagagacggaggaaagtaccaggagcacccccactccagcctcccatgcacacttgtgcacacgcatgcaccctgtactagggcagaggcacacaagcggggatgggcctgcaggtaaagcccctttcagaggtacccacatggggacaagcacataaccaggtaggcacacgaaggggcccgtatgttcatacctcctaaggacaaggctccccgaaaggcacatgtaccctaatctccttgtccacatgtactgtgtgctatttcctagctcgcctaactatccatacttctagatccagggaccgatgcctattactgtacccttcttttccactcttttcctctctttcctggctggcctctaggtcaggcctgaggaattgagggggtaagtcaggatcccagcaggaggttgtgtgtgtgtgtgtgtgtgtgtgtgtggtgggggatgggttcctaaagctagacagcacagaggaggggtgggaaaacagaggccactacaagaaattaaactcaacactcaattaggatgtggctgctgggggccagcaccatggtaggcacctaggatgcaaagagaatgaagcatgggccctcaggagtacccagtgtagtggggagccagacatgtaaacaactcctgggccaaccctgggacagaatgtgccaggagctttaacagacaggctccaggagagtaccaaaaataattttctcttgataaattgctgggcttcaaacgttgtcctcgctaccccagtcccacatcccctatgcctgtcctc

SEQ ID NO: 11479 - DNA, 994 bp, Artificial sequence
  DNA replication origin
ccccccagggaggtggggagggagtgaggcagcacgtaagtgccacctcccatgttgaatgtcctgcactccccaccagctcctcacctgggtggtggtataggcgtctccattgcggtatctggtgacctggcgggtgcggcggacatagtggtagctgatggccttccaccagatgcagggcgtggcttgctgcatgcggcccacacgttcccgcacactgctcacatcaacacggtgctgcagctcatggcgggcttggcagtgccaacactccaccaggtagacggcgtacaacatgagcaggaaggccagggggatgtagacatagccgttggagcaggggctgtcatggtacatgaggctgttgccctggtaggcgctgctgaaggtgaggcgcgtcactgtggtgacgtggcaccaggccactgcccccaggcagccgtacatgagcagcgagagcaggaggcacttccagtgggactcacggcagagggacttggtgaaagagggctggatgggacgctgctgctcaggtgggcagggagaggggccaagatgagtgggaagtgagagcaggcaggacccagcacagagatggatacggggatggaggggcagaggccagcaccagagataacaggcagagagaaacagggatatggagagaaaaggtgagaccaagatgggagccaggggccagaggtagaaacagaagtgacacagagcaagccagaggacaggaaaggggaccggaatgccagtacaggagagtgcagagagagacaccccaagaggcagagaaggatcagagccagagatagaggcccaggcagcaaacacagatggataggatggtacccagagagcatccgaagacaaacacaaaaatggcaatgaaacagaagatgtggacagggaagacaggggaggacagacagacaggcatcagcgaaggaaggtccccagcccagaccccttccaggtcctctag

SEQ ID NO: 11480 - DNA, 1006 bp, Artificial sequence
  DNA replication origin
gtatgtggtggagatgagacttgaactcaatcaatctggctccaggatctctatactgtttagtgcttaatggatctacttagtgattaatggcagagtgtggtggctcaggcctgtaacctcagcactttggtgaggcagaaggatctcttgagccaggagtttgagaccagcccacccggcagcaacatagtaagaccccatctctataaataataaaaagaagtagctggtgtggtggtatgcacctgtagtcccggctactcaggaaactgaggtgggagaatcgcttgagcctgggcagttgaggctgtagtgagctgtgattgccacagtgcaagaccccatctcaaaaaaaaaaataaaaataaaaatagtgcttaatggctggagatggcttcacatgcccagtatcatagcatgctcttacctgttcagtgaggtgactgctactgagttctttcacaggtatggacacctaaactcagtgacttgtccaaagtctgctgctcttaagtggtagtgctaggctcaatcccagcttcctggatgtcaagttcaagggtctaagaggaggtgggcgtaggaagtctcactgagggtgggcaggtcaatcagcactttgtggactcgccaggatgagacatattggggtcctggaggagacgttcccagatgcaggccatctgtctcagtataaggatcaatagacagaagcctggggcgggtgagaagcaggaaggaggctgatgatagctacagcgtgaacaggcagactagagatagaggggttctttagggagtgcttctggggaacccattgggaaacacaattgtaaaagggaagaaagaagaagaggaggctgtttgtggtgatgtgggggcactttggaaaacagaggcagtggcaaatggatcaggcaggccagaggggcagttcatggccagggcctgacccctagaggaagcagggcttagttaaaatttaaatgcgcggccgggggcg

SEQ ID NO: 11481 - DNA, 698 bp, Artificial sequence
  DNA replication origin
tggccgagcccgggccctccaggccaaatagcttctccacgtggtagtgcgcgtaggccgtgcggtactcggccagcactcgcagcggccacgacagcgtgagcagcgccgcggcccagaaggccgacgagcaggcgtaccagggcggccgggccgggtccgggaaggccaccatgaactcacggaagtccacgttcttgaggtgcatgccctcgcgtgcctccatgtagtcgtctaggccctcgttctctgcgaagaagcgcgcgcgctggcacaggtacgcgttctcggcctccacgctggcgaaactgaagcacttggtgaagcgcagccgcgtggccggcgcgccctccagccccaccagcgtcttggacacgtcgcgaacgccgcagcgcgcgtagtcgaactcagcctccgccacgtgcgtgttgacgcgttcgtggtagacctgcggcgcggggggcaggcggcggggtcgcggggagcccgtcattggtgcccgcttctgcccactcaccctttcccgccccatctgtgctctggttgcctggtcggaccctaagtctgtcttggtttaggtgccggctggagctggttaggatctttccgtctgacttacagggcaactgacgccctctgtgtaatcagacgtgatgaccggactagaaccagccctacctgtgcgcatttaaattttt

SEQ ID NO: 11482 - DNA, 2256 bp, Artificial sequence
  DNA replication origin
gtgtgtgtgtgtgtgtgtgtatagccacagctgctagcagaagttctaattagagaaacaagaacattcagtgtaaagtttaattttagagattaattaattttctggttttcattttccctggcaatcagtaaagctaccaagaaaatagaccaaagaattggtttctctctaagtctgtgcatgtgtgggagatgaggctgtctgagacgacctaggcagaaatggtcaatacaggcaaaaataataatagaggtcccccttcccctcttgtgagaccaggctctgtctcaggaacaggcctgagggaggaggagccacgttcctccttccttggagccctgaggtggccaggctgtccccacacaaagcatgacatccaggtgccagctggctaagaaatggagcctgaggctgcagctcaccacctgtacctcacagatgtccattcagaggaaagaagggtgctccaaacgccaggcccccaaggagcacagactcagggtccaggcaggttcagtgctagtaggcaggtgggcactgctgtccaggaaaacctggtgggcagctgtttcccctgcccaagcctccctctctctagcctcttctccctcctcactcagccatctctacctgaaagtaaagctaaaccctttagaagccatgggccatggtatccccacaatttgggcccctcgcactccccgctaggaagaagggaaggggagccagaggcgatgttgcataggtggaggccacacagttggtggtgcaggcctggctgggctgaaggaagatgagaggggctgaaggagggtaaggaggagttctgatggctcaggcgaagtaagaagcatcaggggtgagagatgtgggtggcccaagggttatcctctctagcctgaaatgtgagctcaatccctgggtgctaaatctgctggggagactttagccaggggagttggcagggcaggagggctgttcacagacatgcacactgaagcacatcagggtggaggtggtggggggagcacacggagagaaggcggtgtcagagctttaggggaacaggacgtggggccagcgccctggggtggtggcaggatgcccctttgaagaccctgcgacacacagcagggcttcagctcataggatagggaaggatggaagggttgggcaagatttagagaatgcttgcctctgaccctgccattggaattatttctccagttggggcttgtgacaacgtcctcagtcccccagagatgtgtttgagcgacaagcacactccactcctccgcacaggtttagggaggcaaaggccgcccccacagacaccccacctctggaggtccttttcctctaccctccactgccctctcctctcttactcccacctgcttccagaggtccccgttgccacccaggtctatgtcatgctctctccccttagtcactcgtgctggccagctttaacgagtgctgcccgggtggcatctcactctctaaaaggggtatacactcagaacccaggtgaggaggcccctgttgggaggctgaggagtttagagagaggactgaggtacacagtcctccacatttcactcccctccccactgcaccctggcaacagctctgcaggactggggagcggaaggtgagtgatgtctgtgcagtgagcacagtccctctggacctggagtgggggcccagttagataaacaacagtggagggagcggcagaaaggaaaccccaatcttggggtcagcgccaagaagagggcagcaacatttccacggtgttggatggaggcctagggctgacacctggccccagcctcagacctgctgaatgcattagctagttggaatccagcctgctggtcaccaaaccattgccccctccatagagagaggccccaggggagtgaggccacgaaggaaggaaagccccaagttcccttctccacagcctctaaatctcccatccgcatgccagggcctctcccttcagacaaggcccaacgcggggcccacggcacggttgtcatctaacagaagatctgttgaagggctggacaggagggaggtgtccctttaggaactcagggttggggctggaagaatgactctgccagggggatctcggggagcagccgaccccctcccacccatcggtctctttatgtacagggacagcgggggtctcggccccatccgggcctgtcttgcggccctcacctccctttccctgcc

SEQ ID NO: 11483 - DNA, 1644 bp, Artificial sequence
  DNA replication origin
gacccccgcctcccgcagaaagcccacccgttcctagacacgtcccacggaagcacagggcatagcgcaaggccacagtcccactacccgcaaagcggccgcttccacggaaccgtcccgaggccgggcctggccaccctgcgcgcgagtaagccgcgtgcctggcgcgcagcggcagcggcagcggaggaagcagcggcgcgctcgtcctcccggcccggcccgctcctagcaacgcggggcgtccccaacgacaaagacctgcgccggcgcgcgggactctgcgtgaggcgagcgccggggctcccggagcgggtgaggcgacctccgggagtggggacacccagccccggtctcccttatcggggccccctctggccggctgggcccgggagcccctctagcgtcctctgcccacaccggcccgaagcccacgggcggccattgcctgggttgcgttttccgtggcggggaagcgccggtccgtacccacgggagaccccacgccctccacgcgaggacgccccgcgcctcctccccaccacagtcactgtctgcaaaccgtctggcccggggctggggatccgagtgaggcgaggggagggactgggaagaagagggggaaagtggggcatccgtagggcgtggaggagagcggtcccaagccctggggccctaggcttctccgaaaggccgtccgttcccatcacccgagggctgtaatccctcccgcgggtgcggaagcttcctcatctccctacctcccactgcactgccggtttccctgggttaccaaggagaagccagcgcctctacaccccaggtaggatgggggagggactcctggcctttggagctgagcttctctgctggggtgtctgagctgaaggtagggaggaggggtgggagactccagagccgctggagtcacttttgagacaacagacctgagtggtcaggagttgggaggaggccagcccaggggctgtggtaagtgaactggcggtttcacccagcccaagtccaagcacacgggccgaggctcagttggagaaagttttttgcccttccacaagtggaattcccaacttgggagtgacttaccccaaagtaagacatggtgggcatgaaggatatggaggtggctgtagacaaaagcccagagccctgagaacagaggagggctctcctgaggggatctggggtgggagcggctgagaaggcagagaaggcagtcagagcagtgggtgcaaagccagctcctggggaagtgtcccgggcacagaggcgctgtctgcccaaagagggccgggtgtctccacttctccactaagaggaagggaggaggggacagttgaggaccagaactgtgatgcacaagaaggtgagaatgcaaacctacagcatcttcctcgtgttcccattagggcaggtggaaggagctcctacccagaatggttagatttagctggggacctgaggaaggatggagaagacctgagacttcctgtggagggaatatgccaggggcaggagagcaccactctgcagcactctgttgggctccttgcaccctccaaaggatgcaggcagtggtccagccttgcggaagtctcctatacccagcagtgaactggaagaggg

SEQ ID NO: 11484 - DNA, 1867 bp, Artificial sequence
  DNA replication origin
cctcttcttcccagtccctcccctcgcctcactcggatccccagccccgggccagacggtttgcagacagtgactgtggtggggaggaggcgcggggcgtcctcgcgtggagggcgtggggtctcccgtgggtacggaccggcgcttccccgccacggaaaacgcaacccaggcaatggccgcccgtgggcttcgggccggtgtgggcagaggacgctagaggggctcccgggcccagccggccagagggggccccgataagggagaccggggctgggtgtccccactcccggaggtcgcctcacccgctccgggagccccggcgctcgcctcacgcagagtcccgcgcgccggcgcaggtctttgtcgttggggacgccccgcgttgctaggagcgggccgggccgggaggacgagcgcgccgctgcttcctccgctgccgctgccgctgcgcgccaggcacgcggcttactcgcgcgcagggtggccaggcccggcctcgggacggttccgtggaagcggccgctttgcgggtagtgggactgtggccttgcgctatgccctgtgcttccgtgggacgtgtctaggaacgggtgggctttctgcgggaggcgggggtcgggcagggctgctggtctggagtgcttgtgctctcttggtagcttttgtgtggcaatggatagggagctggtccaggaaaagcgtctgtggaagaagaggagggtggacgcaccttctccaaggcacctgtagaagtcactggaactcccgtgaggcctcctgttgaccttaggccctgcgggagggagggcaccttccacctttcccccagctgaaggtctggtaccagacgcaggaaggttccaggccaacacagcgctccttcacacagtccatgccctgtgccaaactctcttccagccctggcgcgacaagatgtggttggggccccagatctcctggagggcgagagggacagaccagagggacggctagtaaaaaaaaagaaattggccttcaggaagggagaggcagccagggtggcggggctttcaaagggtagctttgacttcagctctgccgaggactactagttggttaccctggatgaacatctcgaagctctgttaactcatcaataaatcaggggtgccaaaactcatcttggcgctcgcggaggagcttgaacctgggcctgtggtgagcactgctaaacaggctactgccccagtggccaggatgctgctttgcaagcagtgaggggccaggcacccgggattgggtcccttcaagccctcagcagtgccttaccagcaaatcatcagtgccttaattagaatgagaaactgcagaaaatgatgccaggcgggcccacgctgctcgaataatttttactagacagaatttggtagccagggagcccttgatttgaagatggatcccctgaggccctttccttcatctagcaacagagatctaggaacaaaggcagaggtccaaagtctggctgtctgaggtggactcattctggtagggaaggagggctttcctccatctctgcttcctcctgctttgaagtgccaattttcagcttcagctcaggcttgaggcaggtgctgtacaacttgttttaataagcatattgtttgtctgaccccgctctccagcctcctcacctgcccctatcccagctcactgctcagtggcactggccacctcacggcctctgcattggctgttccctcaggctggaatgcttttccctgatttccacacgggtcacaccctcacctcccagctccctgctcacatgtcacctcttggtgagggaatatcaccatccacactcctgatccccattctctat

SEQ ID NO: 11485 - DNA, 1668 bp, Artificial sequence
  DNA replication origin
acagataaccagagagatgcgggcataaacgggctctctgaacctggcactcaaactgcttcccctctgcaaggaagtcaatggagacacaaagttgtggccacggcaacttctttatttctgagtatgagacagagtcgtggtgcctggactaagagtggatggtgccccgggggaccaactctggctgagttggaactctgagttcttcccggggccggggggggcgggggggcggggtgggagggggcgtattcaagtcaacaaatgttcactcagggcctaacaagtgagcttggagccgagtagccaggtggtgacatcacggtccctgtcctactggcgctcgcacaacacggggccagacacacggaaagggccccaagggtcagcccccgggctgccctccacgcagaccccacagggtctcctcgtcgcccccccgacctccgcgcgcgtgcgcacaagctgctagagggagcggcgggcagcggacggcgggaaaaggagacttacctcggtattcctccatacgccccccttgatcataattcgaggcatcttggcggcagggtgtctcggcaagcagccgagaggagcttcagagaagtagtaacagcgattgggccaccggactcaaagccgccacttcctccaagcgcgaccttctgctttgaagatctgcgcaagcgcaaggtgggagggggcgcagaatagcaagtctcgcgagatattgggtggctgaaagggaaaaagtgtcttgtggaagctcagctgcaggaagactaacacaaaaccatcaaaccactctggccaaagcgccttacgccccgcgcatgtccaaaacagaatggaagaaactacggctctcgcgagatagcggcggtagcgcttggctgggaacttagtggtgggattgatcgtgacgtcaccgagtggcagagggtgggaacgtcacgcgtacggaatttcagcacagttgctccgaagaaggctttgttaatttattaatctagccctttcaagtatttcagtaataggaatttattcacagaatactcaggaaaatccagtagtttatttaaggctcagtttcctaacctgtaaaatagagatcatagtaatgccaacctcacaggattgtcgtaagggctaaatgagatcatagacccagcacagtatctgatccataataactgctgcaaaacaatagcagctattactgcaaggagggcaacgccaacttcaccccgtccccaggtgatccaggcttcttccagaaacctgcagaaacgtcacgtcagagtttttaattcatcgcccagtctggattaataatgccattggtacgcactggtattagacaaagtcgagttgggttgaaatattgtgaaatcttggctttctcataagtttgggtaataaccttactgaatctcagtatcctcatctgaaaagtggagctaacaatacccgcctcgtaaatgaggaggcagattaactgaaacataactaaaacccagtgaggtagggattggcaaactctctgctaccccaccccaattactcatgcagtctccttcatccttccagaacatctctggctccatccctggaaaatatcaaaatatttagtgggttgggaaatgccctatttatagtacttag

SEQ ID NO: 11486 - DNA, 971 bp, Artificial sequence
  DNA replication origin
actctccaaagaaagaaagaaagaagagagggaggtagggaggcaagtggggaaagagagaaaggaagagaggaaaggaaggaaggagggagggagggaggaaaggagggaaggaaggaaggagggagggaagtaaggaaggaaggaaggaaggaaggaaagaaggagggagggagattgaatataatacattcttatttttaaaatgcctccagccatattgtttgcactgtaccttgaaattcattttctttagaaagatgaattcattttctttagaaaggaaggaaggaaggaaagaaaggagggagggagggaagaaaggaaggaaagaaggagggagggagggaaggaaagaaggaaaggagggagggaaggaaggaaagaaggagggagggaaggaaggaaggaaaaaaggaaggaaggaaaggaggagggagggaaggaaggagggagggagggaaggaaggaaagaaggaaggaaggaaagaaggagggaatgagggaaggaaggaaggaaggagggaatgagggaaggaaggaaggaaggaaggaggggagacagagggaggaagggaaattagagaggcgtgagggaaggtggagaaaagagaggagaaccattggcagtggctggatcctttatgacaagttcgggttttctttcctgtctaacttcttccttcctttcctgcctttttcccaccacaaatattgcctctagtgatagaacacctctagttccagtaaatggtaactgagaaacgaagtggtaatttacttgtcaactggtatttgcctgttccttaaatgatctagataaatgggcttaaatccctattcacaccttgtgcaaaatctgatgccctccccaagacttctccaaattcctgaaagtttacagtcttgtgatcacctctagttctaattccctgactccaataaatttgggttcttcccattgtcttatg

SEQ ID NO: 11487 - DNA, 673 bp, Artificial sequence
  DNA replication origin
gactctatgagtgtgtatgtatttatgtgtgtctgcgtgtggacttgcaagagtgtgtgtccgagtgcacatgagtggacgtgtaaggtaggacagcaatggatgcagtctctctctctcttttttgaggcgaaagcctggcttcccttcccggatcggccgcctgtgggactcgagagacctgtgcacgcaggggacgcggcggtgcccggggttagagctctcccctgtgaccgaaaagataattaaaaatcgcacgcgcaggagccagctcagctcctggctgcgcttccagttggtccggtctggctaaatgggttctcgcaccctggcggcgcccgggctgggaggccagtaggccgggcgcgaagagtaggttggggaccaggtgtcatagccggtggcgcagaatcgcttctcggagtcaccgagggtggcagtggcaggcggcggctgtggggcgggaggggcgcggcttggggctagtgtctgtggagggatttggggaagaggcaggaacgtggagagaaacgtgggaaagggaaagaccgacgagggaggcgtggagcagtgcatggaggaagggcaggtaaaaataaagccccaattaggaaggacagagtagtatcccctgaactccatccttacccctcgagagcgcacacctggctac

SEQ ID NO: 11488 - DNA, 1022 bp, Artificial sequence
  DNA replication origin
ggtgggagagggagggatttgcgcggagggactgagccccgagcccgccagggcatccggagggaggcccggccgggggtttctggggttagagccgccaaggcaggaggtcttggaggacgtccggggcccagccccgtgggcaggaagacaccggcgggcaggttccgccgctcccggccgggggcggggggcggtgtagcctcttaccttgaaggccacgggcagggtcttgttgcagcgccagtgcgagggcagcaccgagcacaggaagttggggctgtcggtgcggacgagttcggccgggtggtcggcgatgatctccaccatggtgcggttgtcgtggggcggccgcaaccggggcactgcagctgccgccgccgcagccgccgccgccgccgcagccgccgccgccgcctcctgctgctgctgctgctgttgctgctgctgctgctgctgttgctgctgctgctgttgctgctgctgttgcgcagccaccaccgggctcacgtcgctcattttgccgggctgcaggctgctggagggggggctgaagcgccggctggtgctcggatctacgggaatacgcatcacaacagccacaagttagcgaagtggccgggggagggggaggagggtggaaatgaggggcaaggaggaaattgggggggtgaaggcgagacggggggaaagaggatggaggtgatggggctgaggaggtgagaaatcaagtttgatgaggccgactgccgggcggagtctgatgggccaacagagtctggcgatgcggcgcagtcgggctggcgggtagggagacccgggaggcgcagatctttgccggagtctttggaacacccggggtggcagctgcgaacgggcgcgggggtgtgtttggcctggggaggcgggggacttgagtttgcagcttggaatggggtcccttggggcaccgcgtcctgggtgcgctggcgccccctcccagttggagtccggtggtgaagcggtgtgggttcagcagtcca

SEQ ID NO: 11489 - DNA, 797 bp, Artificial sequence
  DNA replication origin
gaagcggcccgagctcccgccccgtcccctggcccgcgcctcccagcactcgagggttcagcgcccaggccccctgaacgcccccgcttcggggcttgcggacgccccagcggccccgccttcctcccggtaacgggatctggcgcgggtcagcgaacagagcaaacgcccccgccctgacaccccctcctctggagaccctaggtttgtccaggaccctcccgggcactggtagcgcagcccgcgcgcctcagtcagcaccccacgcccagccccgggcactaatgcccggcaccggcaccccacgaatcccggcacgggagcccgggagggaccaggaccgctgaactctgcgggtcggggaaggggacgccgagacctgaggagaggcgtttggctgtgagggaagcgggtgagagcgcgcggagccccaaagagaggctgcgcgggcagcccgcaatgcggccaggccgggatgtcccggaaggacgcgggagccccaggggacaatgccggggatcctcgcccccgggaaaggggcggggtggagcaagtccgctcgcagtgcaagagtgggtactttggggatcctgggggaaagggagacggcgcgaaggagtgagtgagaatcaaggccaggcaggaggcatgaggagtgctgaacgggtcagggggactagggctgaagtcggggtggcagcgggcacaggtgggagagggagggatttgcgcggagggactgagccccgagcccgccagggcatccggagggaggcccggccgggggtttctggggt

SEQ ID NO: 11490 - DNA, 1650 bp, Artificial sequence
  DNA replication origin
ttcctgttcctatggcatccacccctaaatttgtcctggcctcattctcccaggagcaaggtggagggcaggaggcagacgggcccaggatggaaggtctccgagtcttggtcttctgactcaggccctgaggctactacctctgtggctgcccaaagtgacaggcgcggcctccgccttagtggctggcccggactcactttgtcggcggagggtcaggactggccctgtagtctgctcataggacctggctgtcacccacaggcaattcatcctgaccgcgtctgcaactgtgtatggaaaacaacagcagtcgctttaacagcaaaagcaacaaacacacaccaaacgggatcatccctgtgctcccaggtggtgggaggcagatacgggagggaggacacattttcctgcgatattgaataagatgagcaatggttattttgggccagtctccagcaagcatttggagagcgcctcagaactgcagatgaagccccggattgactttattgggtgatttcagcacggccaaatatttgtagtgtaaagaaatcataaaacgtgctggtggtccgggagctggatggggtacagtctgtgcatatttgagatgactgtgatttggtgacaggcctgtttgatcccctcacctagaaataagttaggatccgccacagaaataaattaaatgaagatggcctggaatccatttcctctgcccgtcccttttccccccttatctggagaaatcagcagtttttttggcctccaggtgcgatttgtactgaatgatcacagttgggctttctctccggcgctggaagcctgaactggcttccttgccacccgcctgctgcggaggacagggctccctcttagtgattatgttcgctgtttgtgtagtctgcggcatgtgcagtagaaggctgatcggtttgctttaattaagcttcaaaagagaacccaagcctccatcttatctcctgtttgctccttaattccctttccacggtccctgctgtaggtgggaaacggagcctgtggtcagatgcagggtgggaccctcacggtctgggtgagccttgccttgagaatgagtttctctgaacttcttccaagggaactcttttcgaatgttctctgatttccacagggagctaattgccaatgaccttttttaaaaaaaccctcttgggtgtttctcagtgcaggaagaagcagtggtggggagggggagctgcggccggcactagtgaccccaccgtctgagagcttctaacagggggcgagtttcagcaggctccgtggaaagccctcagtgaggcctggtgaaaataggccccccgtacttttgtagaattttccttctaaaactaacatgagggccgcagcagcagctttttgtcccaagtaatcaccggatggattttttttttttaaccagcttctgtgctcctcagaaggaacatttgtaaccatgcattctttatgtggtcttcgattaataaacaggaacccacctttctagaccgatggggaaacaattttttttctgtgtgctgctcctgtgtgtagggtccatgaatgggggctttgagaacttgtcctttcgtggccagatatcaaagtgctgctcacacatacaga

SEQ ID NO: 11491 - DNA, 892 bp, Artificial sequence
  DNA replication origin
tttgccagacaggagagccctccagaggacccagtactgccaaaatactcaggatacacacttccagttactacgttgctgccttttgtcttcctggctgttgctcacgtcttcaccagcctaatctcaggcttcaggaatcctagacagagtcccagcccttcacatgtcgctctgtctggagggacctgactgtgatctctactccccagcctgatgctgcctgcttcctttccctgaagtcacagctcaatgcttgaggcagcacaaggaagaagactctgggggaaccccagtctgtgatgtgggagggaaaggaggacaagggaaggaagagaggaaaggaggggagaggagaggagaggaggggaggggataggagaggaggggagaggagaggaagggagaaggggaggcaaggggaaaggaggggaggggagagaggagggaaggggaggggagagaggagggcagagagaaggggaaaggaagggagaggagaggaggggagacagaaggggagatgagagaggaggagatagagaggagaaggggaggagaggggaggggagagagaggagaaggggaggagaggggagaggagagagaaagggaagggaggggagagaggaggcgagacaggagagagaaaaggggaggggagaggagagaggaggagagaggagctgaggggaaaaaaagaaaagaaagggaagaacatgaggccagaaaatctttaaaaatgaactttctcttcccagagggatatgaatgggagaggaatgccacaaaaaagagcccatacaagtcaatataaatatggttattttaggactcggtggagaatggctgctggtggtctcccccttcttcctggtgggtcggcgttcat

SEQ ID NO: 11492 - DNA, 864 bp, Artificial sequence
  DNA replication origin
ccacagcgtgtctcccaggggcctctgggcactctgggggcaggagtgtgagagagctgagtactagtccctctaccatttcctaaaacgtcccattcctgccacccagcatctcttccctatgaagatcaaacccgcactatccctgtctgccaacatatgcaggtagaggagacccaaaggtcccacctcattcgattccagctgcagatgtcacggtgagagcccccttagctgcctcaccttggacgatgaacagtgtgaatcacagcaaagacagcctaagcccctctcttgccacaaaccccgccctgactacacctgagagtctcctcaccgctcacctctgcaaagagcttcttgagaagctctggaagactgtggcagagcgagtgttacttttaacctgtccagattttagcccaggtgaccataactctatcttccttacagggtcttctagagtaaccagaacaagggttggaggactggtgggagaaggcgaggaaggaggagggaacagaatggggacactcctgcctcttcacccctctctgagtcaatggtcatggccagtgctgctgcttataggcactctgaagctggttcccagcataatcaaatagaagccaaaggtcaggagatgcctttgccagacaggagagccctccagaggacccagtactgccaaaatactcaggatacacacttccagttactacgttgctgccttttgtcttcctggctgttgctcacgtcttcaccagcctaatctcaggcttcaggaatcctagacagagtcccagcccttcacatgtcgctctgtctggagggacctgactgtgatctctactccccagcctg

SEQ ID NO: 11493 - DNA, 1934 bp, Artificial sequence
  DNA replication origin
ctcggccccggggcggcccagcctcgccgagctccattagttggcatccgaaacatctggcaggggctcaggctggggccccagggacgaagccagtttggtgagggcccgcgctatgctgtccaggtggccgttcatggtccgcagctccaccaggatgtccccgacgtgggcctccaagctcgccgcagcggcgggccgggctcggggcggcggggatgtacccgcgtccacggtgccctcctccctgcccgcagtgctggggcgcggggcgcggctcctttccgggccctcggccggtgccaggacgggcggcggccgctccttgtcatccccgcgtgtgctgggagagatggtcgaagggcaaccggggagccagtcgaccagacgcggggcggcctccggggaggaggcgacgactgagtagcggcctgtgcgccgggaggcgccggggcctgggggcgccgaggctgcggggagcggaggcaacagcggaggcagcgctggcggacctggggaaaaggcctgaggctcgcaggaagaggaggagggagatggcagggcggcggtggaggggcctggctcctccgaggagaggaacaaggtggtcgaagactgggagtccaaggtactgggctctgaatctgtcaaggaagaaaccagagagtcactcaggcatgcatgctcatcagcatttattgtgcgccaactctatgcccagctccatgctaggtgcttaaacgaatgagaaggtggaaatgtatttcctacccatcagagcttgcagttcagtaaggaaaagagggttatatgagcagttaatgactggagaacaaagtgaagagggtgtggtacagagcctaggtactcaggggcagagaagatcagcaagtccaagaaggcatcctgacctagctctccacttggtctcgaaaggtggcacgggtgtgaagacagagatggacgtccaggcaggggaccatgctgcagcttatttggaggcaatcttgccaaggacagccctgaagactatgacaagaagggccttccccaagattgccaaaaacagaactgtgttaaacagatgaccctccacctccccagcagagcgaggctctcagggtggaggagaaagagttcagggccgggagccaggagaccttagtgctgattcttgctctgccagaaaatgccatgggacctcgggcaagccccatccctccttggagacttggttacatcctcccatttatataagaaggttggggccaatagcctctgggacccttcagaacagatcattctgccttcaaaagtctgcagcttgaagcattgatctaagttcacagtggacgcacttaaaaatctggaagcactttacagaccgacttttgttagttctcccctaatcccttgagcttccaggtagaaagcaggtggcagctctttgtgactggatatggtaacaaggtttaccaacctcagatcaaaggagccacatgaatgcgagctaccttaactgagctatctcagccaccctggtcaccgcctttggggagatggtccatgctcaccctggaaacatttctgagttttactggagccaggtttggaggcttctctcccggttccagctagaaccgtctgcgcttggctttctgcattgtccgtttgagtgcccaccctggtgccccgccctttggggattccaagcttttcaaaggcagaacttgctcgagtacctcagcttattatcttggggaggatgacctgatgaaagagtcagtgagtaaacatatcccccgctgcctgtgaacatgtgtgctctcaccctcgtcatgggtgagctgttccttcatctggtgtctggctcagattcagagaagccctagtcatctggggagaggttggtccctcatccctcccgactccag

SEQ ID NO: 11494 - DNA, 979 bp, Artificial sequence
  DNA replication origin
agttacttaaatacttcatgtctcagtttccccacttgtaaaattgggatcattatactatttgtaaatattatacaagttcacacatgtaaagtgctcaacatttttgcctagcacataataagtattattacttatttttttattaagcgataaattttttaataaagctattaaacaaatacatgtttttagtaaggaaggacatagcacaaacaggattaattaaagagaaggcaaagaagacaaagagaattccaccagattctggtgcaaaacattcaataattattttttaaagaactgaagggtgggaatgtctgttggtgcaaccactttagaaaacctatggcagtgtttacacaaggagagcattcttatacactacaactcagcaagtccactcctaagtatacatccaagagaaaagtgtctgtgaatccaaccaaaagatgtttgatagagagaatgttcgtgacagagtagtcatgatagtcacctgcacaaatgtccattgacagaagaatgaataagtaagtgtgtcggtgaaaatggatgatacacaactacacatagcacaatggatgaatctcacaaacatagtaatgagcgaaagaagccagacaccaacattccaggcaaaaagatcctatgctgctacaagccagaataatggttaccctgggacagtggagacgggagaaaagatgtggagaggagagagcaggaggagcttctagggctgtggctaacattttattcttcatctggcgctcgttacatgggtgggttggattgtgaaaattcattgaggcatacacctaagatatgtgcatcttttctgtgtttgcatcctacttcactaaaacaaccagaagagaacgggaatgaagtaagatcagaaaataaaggaagaaatagaaagaaaatgaaagaagggagaagaaaaataaacaaacccagaaggctgaaaggcatg

SEQ ID NO: 11495 - DNA, 1641 bp, Artificial sequence
  DNA replication origin
gcgggcagcaggcagaatcccactgacccacggcggcagagagagggaggcggggcgcgccgcgccgcgtacggccccacgcaaaggcccgcgggcaccgcgccgcccccacgcgctcgcaccggcgggcaggtgagcaggcagcgccgcgcgctagcagctggcccccgtagacgccccagccgccgcctccgcctccgcctccgccggcgcatcgcggacgcccagcaggtcggttatgtaaccgcgccggccaggctcgcccaggcaccccgtcccgccggggctgacagcagccccggggtcgtgccgggggtccgcggcggggatctggtctccgggccgggtctgggtgcagggcgggggcgggggcgggggcgggggcggtggcgggggtgggggcagtggcgggggtggggtttgtctccagatctgtggtcagtcccggctgcggccgtggggacggagatctcccgcgacccccctctagggggcgcgggtccaaaggagccccttccccactgcccgtggcccgggggtttgccttcctggaagcagcagcaggtgcataagtgaaggagcgaggatgacgcctgtgatccccgggactgaggcttagagagggtctagaagagactaactggatgcagagagcaaagaagatcgagagatcccttcttcccaatgcagaggctggggagggggtaggtgcactgaggtgcagcgggctgagaattgtcctgcttgggattagcggccttgggtcatctaaaaataacttcaagtttgaaaagtgaaatggagcggagcgcagtgtgccgggttcgtcctgcctgtgggatgcttcgctccagaagtcaccagagggaacaggcaaatcccagccgcctgatccctcggccgcctccaggtctcgctggtttccagggtgcctcggtttgccttttagttaatgatttattcttcgaggtacttctgcctatttcttatcccaaaatgaattatagcagaatgcatgctttgaatctttcctgtttcttacaatgggatagaggtgttcaactgccaaatgaagtttttttaagtctcagtttagtaaaaacaaaagtttctggggttcctttaatatgcattcccacagttttccacaattggagatgaagggatgtcacagcattccagctcacacttctctctcccttcagccagaatttcactcaacttatcatgcagaggggaggctttaggaaatgtaggacaactttaacagtgcaactcaagtttcacacctttgttatcctttattacatcacttcaaaacgaagaacaaatgtaccacaaggtaccacgcaacacttgctaaccggcctctgcattctgggggcacagtgaagttggaaatacccaaaagctggaaaggatcaagaggcaggtcagcattgactgtcaactaggcaggagagtgagcatttggctgcttttcagtgtagtcattgattttctttagccttagagctattatattaagtatgatcagccattgagttcaattagtctaaaatgtgagttgcactttgcattcaaatccactgcaaatcaaatcagcatttactgagcatctactacctgagtccagtccat

SEQ ID NO: 11496 - DNA, 1278 bp, Artificial sequence
  DNA replication origin
cagcacatgcctaagggaagcattagaagagattagaaggaaaaggccgtggagacctcaatccctcctcctcccaccgcgggcctggcctccaccgccacctctgccaggcgggcatggaaggggcgacctctccgatgcgcactgccgggcgcgaagccgcccgcgcaccctcccccagcgcggcgcgtgccactggcccgggaggcccaggcgtgggcagccgggtacctagctcggccacggtagccgcgcagccggacagtaggaatttgctcgctcggggccatctctgggtcagcggcaaaagcctctcctcctcctccgggacggacattcagcagtagcgcaagacgataacgcactccttctcgccgctgcgctgcaccgcgccgcggcggccgcttccctgccagggcggccccttttcaaccggcgagtggccgggtgaggaccatttccctcgttcggctcggccgggtggacccgcaaccttcctagcagtcccagctggagtggtccagctgccccttacaccccagaatagaaaaacacagcggagcccaggaggttactgggcaatgtagtccgccgggctccgctacgtctctgattggccggccgcgggtccctctgcggctccgcccccggcctccatggcaacgcggctggttctcgcccgtcagtcctagcccggccctgcccctccttgcattttttccgcgctggctgagattcaaagagaagtggaggtgggagggagcgacaatggaaaaatcacctgaaaactgggacagaggaaggaagctacagttacgaaggagagctgcaaaagttgcagcagaaaggttgggagtcccgacaggttccgtagcccacagaaaagaagcaagggacggcaggactgtttcacacttttctgcttctggaaggtgctggacaaaaacatggaactaatttccccaacagtgattataatcctgggttgccttgctctgttcttactccttcagcggaagaatttgcgtagacccccgtgcatcaagggctggattccttggattggagttggatttgagtttgggaaagcccctctagaatttatagagaaagcaagaatcaaggtatgtggtcgtggcagacggggtctccagaggagacaatgctttcttttttaaactttctttcattgactcttaagtgcagggctagaacacggggaacatacctgcttgcctcaactaaaggatctagtcatttctgaattcctctactaac

SEQ ID NO: 11497 - DNA, 1471 bp, Artificial sequence
  DNA replication origin
cgtcaagatgtgctcgacgcccggaatgccggcgccgggggcctcgctggccctgcgggtgtccttcgtggacgtgcatcccgatgtgatcccggtgcagctgtgggggctggtgggcgagcggcggggcgagtacctgcggctgagccgggaaatccaggaagcggcggccacgcgcggccagtgggcgctgggcagcgcctcggcctcgcccggcgagctgtgcctggtgcaggtcgggcttttgtggcaccgctgccgcgtggtcagccggcaggcacaggagagccgtgtcttcctgctggacgagggccgcaccatcacggccggagcaggctcgctggcgcctgggcgcagagagttcttcaatttgccctcggaagtgctgggctgcgtgctagcgggcctggtgccggcaggctgcggcgcgggctcaggcgagccgccgcagcactggcccgccgacgccgtggacttccttagcaaccttcagggcaaggaggtgcacgggtgcgtcctggacgtgctgctgctccatcgcctggtcctcctggaggtgcctgatgtgttccaacagatgcgggagctgggcctggctcggcgggtgcccgacagcctcttccgttcgctgctggagcgctatctcacagcggccactgctagcgtgggctccggggtcccggttctctcgcgagtcccgctcaagcaaaagcagcctggtctggattacttctatccccagctgcagctgggcgtgacggaggccgtggtcataacccaagtgtgccatccccaccgcattcactgccagctccgcagcgtctcgcaggagatccaccgcctctccgagagcatggcccaggtataccggggttccacggggacaggggatgagaactctaccagtgccacctgggaggagagggaggagagcccagataagccgggctctccgtgtgcatcctgtggcctggatggacattggtacagagcactgttgcttgagacttttcggccccagcgctgtgcccaggtgcttcatgtggactatggaaggaaggagttagtgagttgcagcagccttcggtacttgctgcctgaatattttcgaatgccggtggtgacctacccttgtgctttgtatggactctgggacggtgggagaggctggtctcggtcacaggtcggtgacctgaagacactgatactaggcaaggcagtgaatgcaaagattgaattttattgctcctttgagcatgtgtattatgtcagcctgtatggagaagatgggattaatctgaaccgtgtgtttggagtacagtcgtgttgcttggctgaccgagtccttcagagccaggcaacagaggaggaggaaccagaaacatctcagtctcagtctcctgctgaagaagtagatgaagagatttcactcccagccttaagatctatcaggttaaagatgaatgccttc

SEQ ID NO: 11498 - DNA, 1770 bp, Artificial sequence
  DNA replication origin
gtgcaaaggggacagagacacaatggagaggaaatgaggacccagctgtcccaggttctgtctgagggaaaagtcctgcggtgctaagcaagcccttccacacctcagaagggatttctcaactgtaaaatgagtggctgaaccagattcacaacactcctaatgctgcaactccttcagtcttgctggctgtacagtaggcagtcacagactatggtgccagccttgggtatgaagggcccagttcaatgaagaaagacattgagacatcaccacatggccagcagcagcttctggtgcacaaatatctggggaggggaaagcactttcagtgcccaagtgcaaggagctgaagtaggcctgctggaaaatgccaaggtggtgcgctgtctcaccactttctgcagggccagcagaattcctctgtgagggaatctgcctgggtgatggaggctcaccagtgcctcgtgaccagaaggccatctgcttcttcttgatcaggccagtgcttaatgctcagatctctgaattcaatgtaagctcaaggtttcgtgctgagcctcttgggattgccaacacctcaggggatacattttccagctcctacccatataccagtctcccagctcagcattctcatttggatcaaaagtaatttgtgcaagcctgatttgttaacacatcccaaatctgaatccgtgtgccttttaaaggtggcaagctgccatttatgagccatacgcacctctccttcctcatcaccactgcagtaatcccaagaaccacaggcatgaataaaagcccgaacttttcgtttttggtgacagaaatttctcttacaagctccaggagatgatgaggaagacagtgttctctgttttctgattttgcttaattttttaaaaatgagcctctcccttgacttggtgacacagctgtgatcttatctggccggcagggggatgctccaggtaggacaaagagtgctttgttttgttcttacagcagccacgcataactgggctccaaaaacgcaatactcctcaaagggagagtgagagagagggagagagggagaagggtgtgtgagagagagagcggagggagagagagagaggaggcagagtgagaggtgtgtagtggtgtgtgtgtgtgtgagagagagagagagagagagagagagagagagagagagagagagagagagagagagagagagagagagagagagacggagagagagattgtccctgtaggagatctacagataagaaaactccggggcgggcgcggtggctcatgcctgtaatcccagcattttgggaggcggaggcgggcgaatcacgaggtcaggagatcgagaccattgtggcgaacacagcgaaaccccgtctctactaaaaattcaaaaaaattagccgagcgtgatacggcacgccagcagtcccagctactcgggaagttgaggcaggagaattgcttgaacccgggagacagaggttgcagtgagtcgagatcgcgcctctgcactccagcctggcgacaaaatgagactccgcctcaaaagaaagaaagaaggaacgaaagaaagagagagagagagaaaaaaaagaaaagaaaactccatgtgttccctgcctgtcctgattctccccccagctctgagctcttagggttgcttcctttcgggaaaaggtttggaagaactggtgtctaataccgtcatcctctccctctccccgcaaggatcctagcgctgtttccgagggc

SEQ ID NO: 11499 - DNA, 1243 bp, Artificial sequence
  DNA replication origin
actgcagatcctgaagaatctaaggtagcaaaatactttccactgagaagtcaaggttgtgtgtgaaacagtgaaacatgaggtctggcccctattgctattataaaaatgttaagctatgtaagcttttgggatggcttttctgccatcagagcaatctgtggaactggttgccaaggagccagcaaaggctagatgagttcctttacaaaacagttctattgaagaataatttacatgccatcaaatgctctcattttaagtgtataactcaatgatgtttagtagacatatggttgtgcaaccaccaccacaaaccaattttagaagattttcaacaccctaaagagatctctcctgcccattagcaatcactcccagctgccactcacatgctctggcagtcactaatcgttttgtctctatagatttgccttttctggacatttcatgcaaatgaacagatgagttcttaagagtaggtgtctcaatgactcatctattcagtcatataacaaatatacattaggcacacttaatgtgccaagcactgttgtaggtgccaggtgctcaccctaaagtggacagataggctagatcccatgcagctgagaaggcaataagttaactcacaaaaacagtaaagggggatggaatgtgaaggggaggcccaaagatctcaggagcccttacctggagctcataatgtagtctgaagaattcagaccagaagaattcaggtctcttggaggaggtggtggtatctgaacagaaaactaaaagggaggctgggttaagcagaagaagaggaggagagagcacacactaggccaaggagctgctttaggaaggcccagaccgaagagaatttatgccaagtttgagagaccaaagcaagtttggcaaggctggagtatggtgtatgtgagggatctgggacagggagggggaagcgatggccctagtgaccctagaaagcagatgaagcccggtcacagatgcccagggcatatcagtttgatggtaccttgagggcaatgagaagcctctggaaggccttaagtaaagttggttgtgacatagtggtattgcaaacatattggaacagggcaaaaatgcaggcagggagaccaagtaggagacttctggagcaacctaggtaagagatgctgagaggtgacagcgtgctggcagtcctcacagccctcgctcactctcggcgcctcctctgcctgggctccca

SEQ ID NO: 11500 - DNA, 1146 bp, Artificial sequence
  DNA replication origin
cagccacgatgatcgcgggctcccttctcctggtgagcgcttgcgtggaccgggggtggcggcggcgccggagcagaaggaaccgctctccgggagccgggcgggtcaccgggccggggcttagggaggcgcggggcccggccgactgggttacgggcactgaggggtttccaagggaaggcaacacaccagagggcctcgactaggttatttgggggaatctcagggctcagccggggctggggaatgaagacgaattgttttccttgcagtctggctttgctggaggagacgctagaggtagccgcccagcttctgcgcatttgagggcttttccccctactcggcctacctcgcgctccccacgcccgcagccacagccccccacccatcggccactgcccctctgcgtggtgtggggcctcgccgcggtgtggggctcccacggccggccgaggccggcgctttgttgcagctgcaatgtcatgtcgggatgctaccgcagtggaagacagtggtaccggtgcgcgccggacaccggagacctccgggtgctgtcgcgcggtgcattcccgagcagggcgcaagccgccccctcctcaatccctttaccctctctcttccctcttggctcgggtggggtctcaggttctgtatgccgaaatatcacccttagacccactctccggcgcctccaaagcgccggcttccagccagccagcgcgccggcactggaatggggggagggggaaggagatgtgtgtgaaggaagatgaattttctacagtctttccgatccctcgtttacctgtggctaggcaggtgaccctgcagggtggtgcagtctccctcatcgtctaagctgcatccacatctcgggtcaatcatcttgaccaaaaacttaccctcaacttcccccaaattccctccctttatttccaaatattggggtgaaggggcaagttaggtggaagaaaatttgagatcaaacccttgagcttcccttgcctatcttttatcactgcaggagggatggaaattcttagctaaaaaccgaacaaaaaaacccccaagaaacaagagcttgttttcacgacagggctgtgtaagggaaaagcaggcttgctgtctccttccccaaaaggg

SEQ ID NO: 11501 - DNA, 825 bp, Artificial sequence
  DNA replication origin
aagcttcgctatgggaagtcgttcctttgctctctcgcgcccagtcctcctccctggttctcctcagccgctgtcggaggagagcacccggagacgcgggctgcagtcgcggcggcttctccccgcctgggcggccgcgccgctgggcaggtgctgagcgcccctagagcctcccttgccgcctccctcctctgcccggccgcagcagtgcacatggggtgttggaggtagatgggctcccggcccgggaggcggcggtggatgcggcgctgggcagaagcagccgccgattccagctgccccgcgcgccccgggcgcccctgcgagtccccggttcagccatggggacctctccgagcagcagcaccgccctcgcctcctgcagccgcatcgcccgccgagccacagccacgatgatcgcgggctcccttctcctggtgagcgcttgcgtggaccgggggtggcggcggcgccggagcagaaggaaccgctctccgggagccgggcgggtcaccgggccggggcttagggaggcgcggggcccggccgactgggttacgggcactgaggggtttccaagggaaggcaacacaccagagggcctcgactaggttatttgggggaatctcagggctcagccggggctggggaatgaagacgaattgttttccttgcagtctggctttgctggaggagacgctagaggtagccgcccagcttctgcgcatttgagggcttttccccctactcggcctacctcgcgctccccacgcccgcagccacagccccccacccatcggccactgcccctctgcgtggtgtggg

SEQ ID NO: 11502 - DNA, 1260 bp, Artificial sequence
  DNA replication origin
cagtgcccgtaacccagtcggccgggccccgcgcctccctaagccccggcccggtgacccgcccggctcccggagagcggttccttctgctccggcgccgccgccacccccggtccacgcaagcgctcaccaggagaagggagcccgcgatcatcgtggctgtggctcggcgggcgatgcggctgcaggaggcgagggcggtgctgctgctcggagaggtccccatggctgaaccggggactcgcaggggcgcccggggcgcgcggggcagctggaatcggcggctgcttctgcccagcgccgcatccaccgccgcctcccgggccgggagcccatctacctccaacaccccatgtgcactgctgcggccgggcagaggagggaggcggcaagggaggctctaggggcgctcagcacctgcccagcggcgcggccgcccaggcggggagaagccgccgcgactgcagcccgcgtctccgggtgctctcctccgacagcggctgaggagaaccagggaggaggactgggcgcgagagagcaaaggaacgacttcccatagcgaagcttccagccactgccaaccaccctcctccgctgcccagactggtcggcgagggactgagtcggtggccaccgggcgcagggacacacgtggtggcgccgaaggggcgggggaccggccctttgtgatgtcacccgggaggaggccgggctctttgtgcggttggaaaggcgaaggcgttccaggtagagcggggagggagagggtgccccttggcgttcgctgaggaaattgcacgcgcctgttgacccagggaaagcgctgagaaagcatctcactcctgatctaactttacttattttttccgagataattccaactaaattatttcagctacatacgcctttccattgtttcggacacgatgattaaatcagagagcgatggtgaatagaccacagagcacttagatcaactgcgtgacgaaaaaggagacctgtgtgttgcttctcaaactttgctgccctgtggaatcacctggagagttcaaaacatatatattgattcttgggtcccacctctagagactctgatttaattggaacaggacaggatctggtctgggcattgaggtttgttgttgttgttgtttgtttgttttttaagttttcagggtgattttaatatggggcaaagattttaattttttatattttaattttaatatgggcttatgaatgcaattaaggaaatccaaa

SEQ ID NO: 11503 - DNA, 1013 bp, Artificial sequence
  DNA replication origin
ggggtaaggttatagattaacagcatcccaagacagaatttttcttagtacagaacaaaatggagtctcctatgtctacttctttctacagagacacagtaacaatctgatctctctttcttttccccacatttcccccttttctattcgacaaaaccgtcatcgtcatcatggccctttctcaatgagctgttgggtacacctcccagacagggtggcggccgggcagaggggctcctcacttcccagacgggatggccaggcagaggcgccccccacctcctggacggggcagcggccgggcgggggctgccccccacctccctcccggactgggtggctggccgggcaggggttgccccccacctccctcccggacgggcggctggctggggggggggtgctgccctccacctcccggacggggcggctgcccggcaagacgctcctcacttcccagatggggcggctgccaggcggaggggctcctcacttctcagacggggcggccgggcagagacgctcctcacctcccagatggggtggcggtcgggcagagacactcctcagatcccagacggggtcgcggccgggcagaggcgcttctcacatcccagacagggcggcggggcagaggagctccccacatctcagacgatgggcggcctgggcaacattgagcactgagtgagcgagactccgtctgcaatcctggcacctcgggaggcccaggcgggcagatcactcgcggtcaggagctggagaccagcctggccaacacggcaaaaccgcgtctccaccaaaaaatacaaaaaccggtcaggcgtggcggcacgcgcctgcaatcccaggcactgggcaggctgaggcaggagaatcaggcagggaggttgcagtgagcccagatggcggcagtacagtccagcctcgactcggcatcagagggagaccgtggaaagtgcgagatgagggagcggcatcagagggagaccgtggaaagtggggggagaggg

SEQ ID NO: 11504 - DNA, 1384 bp, Artificial sequence
  DNA replication origin
gagaagtgaggagcccctccgcccggcagctgccccgtctgagaagtgaggagcctctccgcccggcagccaccccatctgggaagtgaggagcgtctccgcccggcagccaccccgtccgggagggaggtggggggggtcagccccccgcccggccagccgccccatccgggagggaggtggggggtcagcccccccgcccggacagccgtgccgtccaggagggaggtgggggggtcagccccccgcccggccagccgccccgtccgggaggtgaggggcgcctctgcccggccgcccctactgggaagtgaggagcccctcagcccggccagccaccccgtccgggagggagatgggggggtcagcccccccacccggccagccgccccgtccgggagggaggtggggggggtcagccccccccgcccggccagccgccccgtccgggaggtgaggggcgcctctgcccagccaccaccccgtctgggaggtgtgcccaacggctcattgagaacgggccaggatgacaatggcggctttgtggaatagaagggcgggaaaggcggggaagagattgagaaatcggatggttgccgtgtctgtgtagaaagaggtagacatgggagacttttcattttgttctgcactaagaaaaattcctctgtcttgggatcctgttgatctgtgaccttgcccccaaccctgtgctctctgaaacatgtgctgtgtccactcagggttaaatggattaagggcggtgcaagatgtgctttgttaaacagatgcttgaaggcagcatgctcgttaagagtcatcaccaatccctaatctcaagtaatcagggacacaaacactgcggaaggccgcagggtcctctgcctaggaaaacgagacctttgttcacttgtttatctgctgaccttccctccactattgtcccatgaccctgccaaatccccctctgtgagaaacacccaagaattatcaataaaaaaataaattaaaaaaaaaaaaaaaaaaaaaaaaagaaactgccacagccaccccagccttcagcaaccactaagtcaacagtcatcaacatcaaggcaaaatcctccaccagcaaaaagatggtgactcactgaaggctcagatgatcgttagcaatttttaccaatattttaaaattaatgtatccacattgctttttttaatataatgcgattgcactctcaatacagtataatgtaaacataacttttacatcactgagaaatcaaaacattcatgtgactcactttattgaggtatctgctctactatgacatttgctctattgtggtggtctggaactgaacctgcagtatctccaaggtacccctgtagcagaataaaatac

SEQ ID NO: 11505 - DNA, 1338 bp, Artificial sequence
  DNA replication origin
caatctcttccccgcctttcccgcccttctattccacaaagccgccattgtcatcctggcccgttctcaatgagccgttgggcacacctcccagacggggtggtggctgggcagaggcgcccctcacctcccggacggggcggctggccgggcggggggggctgaccccccccacctccctcccggacggggcggctggccgggtgggggggctgacccccccatctccctcccggacggggtggctggccgggctgaggggctcctcacttcccagtaggggcggccgggcagaggcgcccctcacctcccggacggggcggctggccgggcggggggctgacccccccacctccctcctggacggcacggctgtccgggcgggggggctgaccccccacctccctcccggatggggcggctggccgggcggggggctgaccccccccacctccctcccggacggggtggctgccgggcggagacgctcctcacttcccagatggggtggctgccgggcggagaggctcctcacttctcagacggggcagctgccgggcggaggggctcctcacttctcagacggggtggttgccaggcagagggtctcctcacttctcagacggggcggccgggcagagacgctcctcacctcccagacggggtctcggccgggcagaggcgctcctcacatcccagatggggcggcggggcagaggcgctccccacatctcagacgatgggcggccgggcagagaggctcctcacttcctagatgtgatggcggctgggaagaggcgctcctcacttcctagatgggatggcggccgggcagagacgctcctcactttccagactgggcagccaggcagaggagctcctcacatcccagacgatgggcggccaggcagagacactcctcacttcccagacggggtggcggccgggcagaggctgcaatctcggcactttgggaggccaaggcaggcggctgggaggtgtaggttgtagtgagccgagatcacgccactgcactccagcctgggcaccattgagcactgagtgaacgagactccgtctgcaatcccggcacctcgggaggccgaggttggcggatcactcgcggttaggggctggagaccggcccggccaacacagcgaaaccccgtctccaccaaaaccagtcaggcgtggcggcgcgtgcctgcaatcgcaggcattcggcagagtgaggcaggagaatcaggcagggaggttgcagtgagccgagatggcagcagtacagtccagcttcggctccgcatgagagggagaccgtggggagagggagacggaggg

SEQ ID NO: 11506 - DNA, 1344 bp, Artificial sequence
  DNA replication origin
ctccttgggctctaattgcccttgctccaatgggccagcagcaccttcaccatttatttcctcttcaattcactccagcggggagggaagagggaacacaaaactctaaaaataactgtcagcatcttaaaaaaagaaaaaagcttatctgcccccccacccccaacgtgctcccgcccttctccctcctctccccccctcagccccccccccctttatggggcacatgtctgcttcttacaacaccgaggcacatggttccagttaggcaccgaaccccaccaagacagagaggaaatccacatctgtgggacgctccacacggaaccacctccagcgagggaggccaggggactgcagcaccgagatgaagggctagaccgagggaacgctgctcatgcggtgagagccagcgcgggaggcggcgagggcgcggggagaccggggagggggtgggccccgcggcgcccgccgcccgcccccacgcgcgctgtcggtatttgcccgccttgctgcaacttgctgcagtgtttgaaagagtagtaggagcgcatggaggtggggccggggaaagaccaggcggagtggttgtggggtgagcgcggagtgggtggggaggcggcggcggtggggaggggggactggccccagggggtgggatgggggagaacggggtagcccggcgcttacacatgtcacatgtgctttttaagacggccgggagcgcctgcgagctggatctggtggaggatgctgcggcaggtgcttcgcagagggctccagtcgttctgccacaggctgggtttgtgcgtgagccggcacccggtctttttcctcaccgtgcccgcagtcctgacaatcaccttcggcctcagcgcgctcaaccgcttccagcccgagggcgacctggagcgcctggtcgctcccagccacagcctggccaagatcgagcgcagcctggccagcagccttttccccctggaccagtccaaaagccagctctattcggacttacacacccctgggaggtatggcagggtgatcctcctctccccaaccggggacaatattttgctccaggctgaggggatcctgcagacccaccgagccgtgctggaaatgaaggtgaaccacaagggctataattatactttttcccatctgtgtgtgttgagaaatcaggataagaaatgcgtgctggatgatattatttcagtgctagaggatctcaggcaggctgccgtctccaataagacaacagccagggtgcaagtgaggtatcccaacactaaattaaaggtatgctccttctgcatgcttctgccaattaaagaggcagcactt

SEQ ID NO: 11507 - DNA, 1068 bp, Artificial sequence
  DNA replication origin
tcaccccacaaccactccgcctggtctttccccggccccacctccatgcgctcctactactctttcaaacactgcagcaagttgcagcaaggcgggcaaataccgacagcgcgcgtgggggcgggcggcgggcgccgcggggcccaccccctccccggtctccccgcgccctcgccgcctcccgcgctggctctcaccgcatgagcagcgttccctcggtctagcccttcatctcggtgctgcagtcccctggcctccctcgctggaggtggttccgtgtggagcgtcccacagatgtggatttcctctctgtcttggtggggttcggtgcctaactggaaccatgtgcctcggtgttgtaagaagcagacatgtgccccataaagggggggggggctgagggggggagaggagggagaagggcgggagcacgttgggggtgggggggcagataagcttttttctttttttaagatgctgacagttatttttagagttttgtgttccctcttccctccccgctggagtgaattgaagaggaaataaatggtgaaggtgctgctggcccattggagcaagggcaattagagcccaaggagtggggcatggagggagacagccccagggctccaggagacagccttctcgcccctccagtttccctgtgccctcgaattctgcttttcagcgaagaaaaggagcagagaggatgatgctgcatttttaacacaccacacagcatgcaagggatttcctcgcaacaccttcctcgctgtgattccacagaccagtccgctgcagctgagggctgcggagactccatctatccctggtgcgttgggaccgtctggatagcttctttcctctgatggctggagaggaggcatttgccaatagcagtagcctgtgtgcgtgtgcgtgtgcgtgtgtgtgtattgaaagtgaagatctacaggcaatatgaggtttctcataacatgttacattcactttctgtattcttgagattaaaggacagaaagttcctaaagctgatttcagtccccttttccagtgtctccttccacc

SEQ ID NO: 11508 - DNA, 875 bp, Artificial sequence
  DNA replication origin
ccggccgccatcccatctgggaagtgaggagcgcctcttcccagccgccatcccatctaggaagtgaggagcgtctctgcccggccgcccatcgtctgagatgtggggagcgcccctaccccgctgccccgtctgggatgtgaggagcgcctccgccgggccgcgaccctgtctgagaagtgaggagcccttccacccggcagccgccccgtctgagaagtgaggagcccctccgcccagcagccaccccgtccgggagggaggtgggggtcagcccccgccaggccagccgccccgtccgggagggaggtgggggggtcagacccccgcccggccagccgccccgtccgggagggaggtgggggggtcagccccccgcccggccagccgcccctgctgcgaagtgaggagcccctctgcccggccaccaccccatctgggaggtgtgcccagtggctcattgagaatgggccatgatgacagtggcagttttgtggaatagaaagcggggaaaggtggggaaaagattgagaaatcggatggttgccgtgtctgtgtagaaagaagtagacatgggagacttttcattttgttctgtactaagaaaaattattctgccttgggatcctgttgatctgtgaccttacccccaaccctgtgctctctgaaacatgtgctgtgtccactcagggttaaatggattaagggcggtgcaagatgtgctttgttaaacagatgcttggaggcagcatgctccttaagagtcatcaccactccctaatctcaagtacccagggacacaaacactgcggaaggccgcagggtcctctgcctaggaaaaccagagacctttgttcatttgtttatctgctgac

SEQ ID NO: 11509 - DNA, 1065 bp, Artificial sequence
  DNA replication origin
gaataatttttcttagtacagaacaaaatgaaaagtctcccatgtctacttctttctacacagacacggcaaccatccgatttctcaatcttttccccacctttccccgctttctattccacaaaactgccactgtcatcatggcccattctcaatgagccactgggcacacctcccagatggggtggtggccgggcagaggggctcctcacttcgcagcaggggcggctggccgggcggggggctgacccccccacctccctcccggacggggcggctggccgggcgggggtctgacccccccacctccctcccggacggggcggctggcctggcgggggctgacccccacctccctcccggacggggtggctgctgggcggaggggctcctcacttctcagacggggcggctgccgggtggaagggctcctcacttctcagacagggtcgcggcccggcggaggcgctcctcacatcccagacggggcagcggggtaggggcgctccccacatctcagacgatgggcggccgggcagagacgctcctcacttcctagatgggatggcggctgggaagaggcgctcctcacttcccagatgggatggcggccgggcagagacgctcctcacttcccagacggggtggcggccaggcagaggctgcaatctcggcactttgggaggccaaggcaggtggctgggaggtggaggttgtagcgagccgagatcatgccactgcactccagcctgggcaccattgagcactgagtgaatgagactccgtttgcaatcccggcacctcgggaggccgaggctggcggatcactcgcggttaggagctggagaccagcccggccaacacagcgaaaccccgtctccaccaaaaaaatacgaaaaccagtcaggtgtggtggcgtgcgcctgcaatcacaggcactcggcaggctgaggcaggagaatcaggcagggaggttgcagtgagccaagatggcagcagtacagtccagcttccgctcggcatcagagggagaccgtggaaagagagggagagggagaccgtggg

SEQ ID NO: 11510 - DNA, 1077 bp, Artificial sequence
  DNA replication origin
aacacaaacaattttaagtcctgaaaaaattcatttggatgtttgttttgcttctgttttatagcttgttttaaatcaaagactacaccttcctgagacaagcgttgattacacacaaaatgaagactggccagggccgtggctcaagcctgtaatcccagaattttgggaggcccaggtgggtgtgtgggtagggtgggggatcctgggtatctcgtaagcccaggagttccagaccagcctgggcaatataggagagccccacccctaccatctcttagaaaaatataaataaataaataaataaataaataaataaataaataaataaaagccgggcatgggggtgcgcgcctgtagtcccggctacttgacgggctgaggtgggagcctggaaagtcgaggctgcgccactgcactctatcctgagctacagagcgagaccatatctaatgtgggggggtggggtaagaggaagggggagcggggagagggagagagaaagagagcgggaaaaaagaaggaggaggaagaggaggaggaggacacaggtgtgaccattgtcctccagagctacagattctggcattctaaaggaagaaggacaaagaaaccaaaaccagtttctccaaggcttcagcttttcagtctgaccatttgatctacattccattattttggcagcatggtgggagtggattcggaatggacaaaaacccttttcagaattagatcagctaattaaaatgcacacaaacttctttgttccttcacctcaaggagcgtccttggaaagcaaacatacttcggggcatttcagtgggggcgcagtgcgagggtgtcctttgcgcctcagctccggagaaaaacgaaaggtgggtgggaaactaggatagaggtgaaaagtaagaggggactgaatcagcgaatgacaaagggagcagggctccggacaggggtaggaggaagaagaggagtgactggggcttgtgtcaagcttcttctgaatggctagacagccgccaggtgggagaggcggagggtgaagaggcgggttccgcacgcggttagcctggg

SEQ ID NO: 11511 - DNA, 1103 bp, Artificial sequence
  DNA replication origin
gcgaggcgcggggcgcgcggcgggccaggctggggaccgggaagcccgcggagcctcgcttttaagcggaatggtctgggacagccccaggtggttgccaggggaagggaggaagggaaggttctgctgagacgtcgaggttggaaataaaaacttcggaaaggcgaagcggatttagaaaaggagggaagtcgaggcgggcgaagcgggccatggagattgctaagaggaaaagttggagagaaaaggaaggaagagaagcagactcccgggtggcgggcgcgggccgctaggtcagacgaaaggtggagggatgcagaggctccccaaagagccgagaaagacacgcgacccctccggatcgggacagctcctgaaagcccggcgcagagccgcctcgaagatcctaagagtgggcgactcacaggcgcggccggcaagctcctgggggactcgggctcggacgagcgcccacaggcagcgcctggcgcccacacctcctgcccccccccgaatcctaatgttggggtgtgtgtatgtgtggaggtatgtaggagagaggaggaggagataagagaggagagggagaaaagcaggagagagcgcgagagagcagagaggagagagattggtcttgttgctgaatgatgcttggggttttccttttctctttgtggttgtgtatcgactgtaacgaagagccgcgcctacgcgcctggtggggattgtttcggttcggcctccttttctttccttaacaggcgggataatggtaaagtccaaggcgctagaactgtcctaaagaatattagcgcccaaagtgggcatgacattagcaagcacggggccatggtgaaaacagctcaagctatatgcatgcagaggcatttcagtgggttctaaaaagtaaccagggtaacattcgttctttacagaaagtaaagtagctaaatggaaaaggaaggagggagagaagaaaggagggagggagagaggaagagggaggggtggagtggaagggagggaagagagaagagaaaagaggggagggagagagagaaagagaaataaacagggagagagagggaatattacaggtggtc

SEQ ID NO: 11512 - DNA, 1181 bp, Artificial sequence
  DNA replication origin
aattgcaactcagaaatacattgctacttggctgcctctactctattatagtacaccttgaaggcaaggttaattaagtcctgttgtggggtttgagggccggaatttaatttttgtagttttatttaatgtcaggagcggattgggtaataaaatgtatattgagaataagacggccttttgaccttttagggtctagggctgtaaagcatctcagggttgctgctgaacgaaccatgaactgggctgggtttttcatatttgatgaaaaagagcctaaatgctaactgattttgggagaggtcagataaagaaaaaggagcattaaccttgactatgcctttagctccagccacctttttaagaggaaattgctgggcaggtgggggagggatagtcgaggaattaaactgtaagccagacctggtgtgatgagggaggtgataaaaggattatagggtgggggagcagaggctgaggaagaattgggacctggctgggcctggcaaggagcagcctggggaggaggggagaagtcagatgggtctgtagaaaaggaagattagaaagactcagtgatgcttggggttgggactgagagaacaggagggagggaaagaaggaggatttgggatgagtcgcattgggaacagagactagggaggaaacaatgtgtaaaagaatgtctggacgtcaggcatctcagacggtttgtctattttacgataagaattatctagatcttgtaggatggaaaaatcgaaaatgctgttttctggctatttggaaccactgtcaagtttgtaatggggtcaagtggcattgcagaagaaaataaggcatttaggtttaggtcaggtgtgagttgaagaggttttaagttcttgagaacacaggataagggagaaggaggaatggagggtggaaggctgcccatagtgaaggaggcgagccaagagaaaagagagagtagagacacggagagaaggggtcagcgggttcttgccccctagaaaagcggagaaggggtagagacacggagagaaggggtctgggcgttcttgccccccagaaaagcggtacttgccactaagggtgaaggagaaggggttgggggggttcttgccccccagaaaagtggagaaggggtagagacatggagagaaggggtcaggggggtc

SEQ ID NO: 11513 - DNA, 807 bp, Artificial sequence
  DNA replication origin
tggttgataaggcacagatcctgaactaacctgtaagccttgtctggttttaggacaggtaaaatggtggaattgtaaagagagtttataggctttaaaaggccatgctgggctgggtgcggtggctcacgcctgtaatcccagcactttgggaggccgaggcgggtggatcatgaggtcaggagatcgagaccatcctggctaacaaggtgaaaccccgtctctactaaaaatacaaaaaattagccgggcgcggtggcgggcgcctgtagtcccagctactcgggaggctgaggcaggagaatggcgtgaacccgggaagcggagcttgcagtgagccgagattgcgccactgcagtccgcagtccggcctgggcgacagagcgagactccgtctcaaaaaaaaaaaaaaaaaaaaaaaaaaaaaaggccatgctgtaacaggtgagtgataacaggctttaatccttttaaagcgtgctgtgggatgggatattggcattgagtggggtaagggtgattaggttttaatgggatggtaaagggtgcatgatcagtcgccaaggagggagtagaggtgtcttatatttgtgggttaaggtggggggggatacaagaggaggatgcgaaggaggctttgaactggggtaaagggcagcagtgaggtgtggctgtaatctaggaacagtgagggaagcagataattcaattaaaatgtctcggcctaataagggaactgggcaggtggggataactaaaaaggagtgcataaaagaatgttgtctaagatggcaccagagttgggga

SEQ ID NO: 11514 - DNA, 946 bp, Artificial sequence
  DNA replication origin
gcagtgagccgagatggcagcagcaccgtccagccttggctcggcatcagagggagaccgtggagggagagggagagggagagggagagggagagggagagggagagggagagggagagggagagcttgagctttggagcctctctaaaagggctctgtaccgcagtgcctttgaagaatttgagcttgggttgcacagaggtttttgcaagactctgtgcaatcggagtagaggtagagtgtagtgggaagagcatgcaggttgagtgtttatcaggggatcttgtgtcagaggtttcttgtgagggtttatagtgattcctttttagaggcaggcatgtgttccaaataggttataaacgctgtagctttttcccatttttgaccaaaatataggaacttaactttttattttttcctccaacagtttatttagacattttaaaaagctgactgatttggacaaatattgctatgctactaaaggctgttaattgtaaacattctaccatcttgatatttaaaggaatctagttactttcttcaagtggactgtattgttattgttcatagatttcaatgatatttggctcacagataaagggttataatagggatcatgttgagtagtctgtactgttcagagtatcaaaagtttgcatgattgcttttaaaagccaagtaatgagatatttctgcaagtaagatcatagtctgataagtattcctacaactgctaccttttagctttcattttctctaccttctcttgtaaacgtccacattttgcccttgtaagaaaagaaacaagcctgtctcattgtaatgcttggcttgtgtgttggtttttttcaacagtgagcttcttgagagcagggaattatgttatttgtcattttatcctaagggtctagcacagtacctggctcaataaatgtttatgggt

SEQ ID NO: 11515 - DNA, 1246 bp, Artificial sequence
  DNA replication origin
ctcttgacgagcatgctgccttcaagcatctgtttaacaaagcacatcttgcaccgcccttaatccatttaaccctgagtggacacagcacatgtttcagagagcacagggttggggataaggtcacagatcaacaggatcccaaggcagaagaatttttcttagtacagaacaaaatgaaaagtctcccatgtctacttctatccacacaaacccggcaaccatctgatttctcaattttttccccacccttcccgcctttctattccacaaaaccgccattgtcatcatggcccatccccagtgagccgctgggcacacctcccagacggggtcgtggccgggcagaggggctcctcacttcccagtaggggcggctgggcagaagcgcccctcacctcccggatggggcggctggccgggcggggggctgacccccccacctccctcccggacggggtggctgccgggcggagacgctcctcacttcccagacggggtggctgccggacggaggggctcctcacttctcagacggggcggttgccaggcagagggtttcctcacttctcagacggggcggccgggcagagacgctcctcacctcccagacggggttgcggccagcagaggcgctcctcacatcccagacagggcggcggggcagaggtgctccccacatctcagacgatgggcggccgggcagagacgctcctcacttcctagatgggaaggcagcggggaagaggcgctcctcgcttcctagatgggatggcagccgggcagagacgctcctcactttccagactgggcagccaggcagagaggctcctcatatcccagacgatgggtggccaagcagagacgctcctcacttcccagacggggtggcggctgggcagaggctgcaatctcggcactttggggggccaaggcaggcggctgggaggtggaggctgtagcgagccgagatcacgccactgcactccagcctgggcacccactgagcactgagtgaacgagactccgtccgcaatcccggcaccccgggaggccgaggctggcggatcactcgcggctaggagctggagaccagcccggccaacacagcaaaaccccgtctccaccaaaaaaaaaacgaaaaccagtgaggcgtagcaggctgaggcaggagaatcaggcagggaggctgcagtgagccgagatggcagcagcaccgtccagccttggctcggcatcagaggga

SEQ ID NO: 11516 - DNA, 940 bp, Artificial sequence
  DNA replication origin
ggagcctctctgcctggctgcccagtctggaaagtgaggagcgtctctgcccggctgccatcccatctaggaagcgaggagcgcctcttccccgctgccttcccatctaggaagtgaggagcgtctctgcccggccgcccatcgtctgagatgtggggagcacctctgccccgccgccctgtctgggatgtgaggagcgcctctgctggccgcaaccccgtctgggaggtgaggagcgtctctgcccggccgccccgtctgagaagtgaggaaaccctctgcctggcaaccgccccgtctgagaagtgaggagcccctccgtccggcagccaccccgtctgggaagtgaggagcgtctccgcccggcagccaccccgtccgggagggaggtgggggggtcagccccccgcccggccagccgccccatccgggaggtgaggggcgcttctgcccagccgcccctactgggaagtgaggagcccctctgcccggccacgaccccgtctgggaggtgtgcccagcggctcactggggatgggccatgatgacaatggcggttttgtggaatagaaaggcgggaagggtggggaaaaaattgagaaatcagatggttgccgggtttgtgtggatagaagtagacatgggagacttttcattttgttctgtactaagaaaaattcttctgccttgggatcctgttgatctgtgaccttatccccaaccctgtgctctctgaaacatgtgctgtgtccactcagggttaaatggattaagggcggtgcaagatgtgctttgttaaacagatgcttgaaggcagcatgctcgtcaagagtcatcaccactccctaatcttaagtacccagggacacaaacactgcggaaggccgcagggtcctctgcctaggaaaaccagagacctttgttcacttgtttatctgct

SEQ ID NO: 11517 - DNA, 1299 bp, Artificial sequence
  DNA replication origin
aagaatatgagggcggttaaggcgtctctgtctcaaactctccggattttttgcagctaccagggactgcgagggtctgcgtcctgggtggaaggaagcggcgtcagtcaacttcctcgcagcggcggcagcggcgcgggctgcagcggagcgcgcgggtctgcgcatcccgcccccgggtcgggaaggggcggagctgggcgtcacccgcccccggcggtctcctcctcccggccgctcccccgagccgagcccgccgcggtcacagccacccgcgggaagctcgtggccgggaccccgaggcgggagcgcgggctgggccgggctgggctacgcgcacgggctcggccgccgcccctgccggtgagtcccgccgcgggaggcgcggaacgggtcgagttgggtattgggaccgcgaggtcggggagccccggggcccgagctcgggaggcggggacgtcaggatcgcggcgttggggagtcctcgcaccccgagctcagaggggaggtccagagtcgcagcgttgggaacctgaggccaggggccggagtttagggccccgatgttgagtctccgaatccaagcccggaaggggggacgacgggttaggatgctggggagccctggagctctgaacggctgtagtggggtggccaggactgcgatgctggggagtcatggagcctgagcctggagagctggcgggggtgtggggaccgcgatgttgggaaggctgagcccggagggcgggagattcaggaccaagacgtgggggagtccgacagggcagaacgaggggcgtcctgtccgcatttgtggggcgccctccgcagggcggaggggaacggaacctgggaggggagtgcggaggagaggaagcccggggcggtagggagagcccgaggaagggcagcccgaggtaggggaaccccggaaagagtagggtgggtctaggcatgtgctttcgccggggaaagatggagggggcttctctgagagggtgggcgcgaggagcggagttgtgatgggaaccgccggcagctggctaatgggcggatgctggggcttggctggatgggaacgccgcggtggggtgtcggaggtggctggtggggctggaacgctgggaacgtctgtctaggctatgagaacgcagcgccctcggtggaacagggtcgtagataactcgagagggaatctagtctagggagcaagaccgggcatccccagacggaggcgggtggggacctcgcactcagcgcgcttggggaatattcggagcctgggtttgggggctg

SEQ ID NO: 11518 - DNA, 1166 bp, Artificial sequence
  DNA replication origin
cagtctactgaatctcattattgatttttcagcacatacatttcagtagccctgtcagaattaaaacaaaccaaataattttaagagctaaactgtggcaagagtttaaaaaaaaaaaagaatccaagctgctgctactttttaaaaaattttgtctagaaaatgcaaataaaaacacaaggttggggaaggagcaaaacaaaatctaaacaggaatctttttacaaaaacgttagaataaaaagaacagggccggggaagaataaacagcaactaatcaattcttgagggaactggaaaggaatatctcttacaaagcagggaaagatgctttgggaggaaggtgagcaagttttggggaaaacccgcaacggagaaagaaaggaatggggagaggatgggactaaattgtggaaaatgtagaagatggagaaaaaagaatggggttggatgcaagcataaagaagaaaggaaaaagacctggcggaaagaagaggagcggaatcgatatacatacaaaacaggaaatggagctgggagtgggagatactaccgggtacaggattcagaagaggaagaggtggggcgggaatgacggacctgtgggaatgaggttgaaggtgcatagtggcggggggttttaagggcggcgatggacggagacaggttatgatgtgagagaacgagctagggagagggcccagagataggttgggagtagggtgggggaaacagtgatctaaagggacaagaggcaggggcttggaggagcagggccgtaagaaagaacgcggctaacgggatgagaatgaaggcgccaacacactgccaagatggagtgggaaaaaactagagagggatgaggcggagggcaaaggatcggagagaggggatgaggatggctagggaagaacggcagaagttcggcccagaataaagaacagggtcaggacagaagacgtgtttggagagaagacagacttgagtggaggggaatggaggtgcactgagcggggaaacctcctgggctgctggaaggtggggacaggtgggagtctggcagataactgctcaccgtagagtccttaaaggacgtgcccggaagaaagggcaagccatgcacgggattggacaccattgcagccggtaccaccgccgccacctag

SEQ ID NO: 11519 - DNA, 1248 bp, Artificial sequence
  DNA replication origin
tgcccttcccgcggaggaaggagcggagcgaggagtgggaaagctgggcccacttcctgtccgggcaggcctgggcgcccgcctcctccgcggcctgctttctccaccgcgagcggctgagcctcgggccccgagaatgcggccgggcgcggcgctggcgcgggacgaggaggagccgagccccgctcgccgcccccgtacgcctccgccccggtagcccgcgcgtgcccagcggctagagggttaagcccgcggggggcggggccaggcgcgccgagtgcgggccgcgggctgggcgggggctgggcgggggctgcggccgggggcggttacgggcggccgggggcgggcggaggaagggggcgggccccgaagttgttccgcgctgggcgggcgagcggctgtgggagagcgggcggcgggccggcgggcggaccgggccggtgctggagaagtttgcgctgcggttcgtgagcgcagggtgcgggccccgccggccgctgcgcgcccgctgccatggctttccgcaggaggacgaaaagttacccgctcttcagccaggagttcgtcatccacaaccatgcggacatcggcttctgcctggtgctctgcgtcctcatcgggcttatgttcgaggtgagagcctggggaggagggagctggagggacagtgccccctgtcgtgcaccgcccggcacacccctgcaggtcagcgggccctcctctgatcggaggctcctggctgccgtgtacgttatctgcaccccggctttgtgcactgtacccctccggcctgtaccccggccagcccagacagcacccccagctccgcgccgtgccagccatgccatgctctgccgcccccttgggcactcatcgtatcctgcagctctgtctgcagccctgaaaccccagcctggcctcgaaccaaccgccgcgctgccaccatggcttgacgcgtggggttccctttctggcgtccaggagccaagcccagagactcccagacccgcagtcattgcacaaccccctcttgccccaaggggtggccactagctcttctgggcttttccagtgggagagacccagaaccttttccacttcctatgtgattttctgggtgttttgcatctcagctctggaacgtgctcggatgttcacgtgtggccctggccccatcccagcagtggccttctgctctcgtctcgctcccacttttttgctgtgctctagaaggccaatttttgg

SEQ ID NO: 11520 - DNA, 909 bp, Artificial sequence
  DNA replication origin
cagccccccgccaggccagccgccccgtccgggaggtgaggggcgcctctgcccggccgcccctactgggaagtgaggagcccctctgcccggccagccgccccgtccgggagggaagtgggggggtcagccccccgcccggccagccgcctcgtccgggaggtgaggggcgcctctgcccggccgcccctactgggaagtgaggagcccctctgcccggccagccaccccgtccgggagggaggtggggggggtcagccccctgccccgccagccgccccatccgggagggaggtgagggggtcagcccccccgcccggccagccgccccgtccgggagggaggtgggggggtcagccccccgcccggccagccgccccgtccgggagggaggtggggggggtcagccccctgcccggccagccgtcccgtccgggatgtgaggggcgcctctgcccggccgcccctactgggaagtgaggagcgcctctgcccggccaccaccccgtctgggaggtgtacccaacagctcattgagaacgggccatgatgacaatggcggttttgtggaatagaaagggcggaaaggtggggaaaagattgagaaatcggatggttgcggtgtctgtgtggaaagaagtagacatgggagacttttcactttgttctgtactaagaaaaattcttatcctgttgatctgtgaccttaccccccaaccctgtgctctctgaaacatgtgctgtgtccactcagggttaaatggattaagggcggtgcaagatgtgctttgttaaacagatgcttgaaggcagcatgctcgttaagagtcatcaccactccctaatctcaagtacccagggacacaaacactgcggaaggcctcagggtcctctgcctaggaaaaccag

SEQ ID NO: 11521 - DNA, 1345 bp, Artificial sequence
  DNA replication origin
cccggacggggcggctggccgggcggggggctgacccccccacctccctcccggacggggcggctggccgggcgggggggctgaccccctcacctccctcccggatggggcggctggcggggcagggggctgaccccccccacctccctcccggacggggtggctggccgggcagaggggctcctcacttcccagtaggggcggccgggcagaggcgcccctcacctcccggacgaggcggctggccgggcggggggctgacccccccacttccctcccggacggggcggctggccgggcagaggggctcctcacttcccagtaggggcggccgggcagaggcgcccctcacctcccggacggggcggctggcctggcggggggctgacccccacctccctcccggacggggcagctggcctggcgggggctgacccccacctccctcccggacagggcggctgccgggcggagacgctcctcacttcctagacggggtggctgccgggcagaggggctcctcacttctcagacagggcggttgccgggcggagggtctcctcccttctcagatggggcggctgggcagagacgctcctcacctcccagacggggtcgcggccaggcagaggcgctcctcacatcccagacggggcggcggggcaaaggcgctccccacatctcagaggatgggcggccgggcagagacgctcctcacttcctagatgggatggcggccgagaagaggcgctcctcacttcctagatgggatggcggccgggcagagacgctcctcactttccagactgggcagccaggcagaggggctcctcacatcccagacgatgggtggccaggcagagacgctcctcacttcctagacggggtggcggccgggcagaggctgcactctgggcactttgggaggccaaggcaggcggctgggaggtggaggttgtagcgagccgagatcacgccactgcactccagcctgggcaccattgagcactgagtgaaccagacaccatctgcaatcccggcacctccggaggccaaggctggcggatcactcgcggttaggagctggagaccagcccggccaacacagcaaaaccccgtctccaccaaaaaaatacgaaaaccagtcaggcgtggcggcgtgcgcctgcaatcgcaggcactcggcaggctgaggcaggagaatcaggcagggaggttgcagtgagccgagatggcagcagtacaggccagcttcggctcggcatcagagggagaccgtggaaagagacggagagggagaccgtggggagagggagaccatggggagggggagagggagacggag

SEQ ID NO: 11522 - DNA, 826 bp, Artificial sequence
  DNA replication origin
gccactgcactccagcctgggcaccattgagcactgagtgaaccagacaccatctgcaatcccggcacctccggaggccaaggctggcggatcactcgcggttaggagctggagaccagcccggccaacacagcaaaaccccgtctccaccaaaaaaatacgaaaaccagtcaggcgtggcggcgtgcgcctgcaatcgcaggcactcggcaggctgaggcaggagaatcaggcagggaggttgcagtgagccgagatggcagcagtacaggccagcttcggctcggcatcagagggagaccgtggaaagagacggagagggagaccgtggggagagggagaccatggggagggggagagggagacggagaccgtggggagagggagaccatggggagagggagagggagagggagagggagagggagagggagactgagacagagtcttgctctgttgcccaggatggagtgcagtggcgcgattttggctcactgtaacctctgccccaccccggttcaagcgattctcctgcctcaacctcccgaatagctgggactacaggctcaggtatttctttaaagcaatgcaagaacggcctaatgcagacataaagagacatttcacctaatagtggcaaataagcccatgaaaatctcatcgttagccattagagaaatgcaaattaaaaccgcgatgaagtctcctcatagtgcagctgccattaccgctgccctctgccctccggcctgtcaatctacctgcagcatgagcagcctgcacctctacagcacatcggtcactggctcccacaaaatcaagtccc

SEQ ID NO: 11523 - DNA, 1170 bp, Artificial sequence
  DNA replication origin
cagcccgcggggatgggtggccgggccgcccacacgggcagcaccggcactgcgcatgctcggcgcgtcggcgcaggtttccgcagctgagggggcagctccgcggcggcgtccggggtctccagtagggctgacgctccggtgctcgcacaatcccccgcctcggctggcaacgggcgtccctccactccccgagtccccggcagccgccgccaccccagcgcgccccgatctggccccctgccccgcgaagatggctgccgtacgccgggcccgcagttattgccgctgcctggtgcgcttctccgaccgagaactctgctaagctccgctgcagagacaggcaggagtagacacccggacacccagcacccctcctccggggggcggtgcagagggggcacggagagcccctcgagcgcagcaggccgccccgccagcatggtaacctggccagggggctcgagggtggacgccgcggggcgggagcgtggtgtgcagaggggccgggcctagggctgggggtcggcggggactctggggaggagtgggagcttcacggctgccacccgttagagggccctggcctgagaaggagtgcgtcggggggcggggggtgccaaccctggcttctccccaggattccttcctgctgagcctccccaacccccgccgagctcgatgtgaggaggagggtttgcaggacagccggggaaaatgtcccttctcggctcactgagtatattgaaccagtctcggtcctctcaagggattttatcagaagcattgagcatagattgaggtaagctgtcacagcgcctgaattcgggagggagctctggcaagaggagacacttgttgattgctcttctgcggaaaagccaggcccaccgacagtccctgccggcaccttgaggagccctgggtgtaggacgcatctgccccgcgaggcgtcattccctgggaggatgttggcaggcggtcctggcggagtggggttggagggttcgtctccgcggcgtcggtgccgtccaaatgagagactgagctaagttgcagagcttgacagtgcagattccatgagactgttccatattggaatacgtagtctctgccctatgcctttctttggtttagaataaattgttcatctgagaaactaatctctgg

SEQ ID NO: 11524 - DNA, 899 bp, Artificial sequence
  DNA replication origin
tctccgcccggcagccaccccgcccgggagggaggtgggggggggtcagcccccgccaggccagccgccccgtccgggagggaggtgggggggtcagccccctgcccggccagccgccctgtccgggaggtgaggggcgcctctgcccggccgcccctactgggaagtgaggagcccctctgcccagccagccgccccgtccgggagggaggtggggggtcagccccgcgcccagccagccgccccgtccgggagggaggtgggggggtcagccccctgcccggcgagccgccccgtctgggagggaggtgggggggtcagccccctgcccagcgagccgccccgtccgggagggaggtggggggggtcagccccccgcccggccagccgccccgtccgggaggtgaggggcgcctctgcctggccgcccctactgggaagtgaggagcccctctgcccggccaccaccccgtctgggaggtgtacccaacagctcattgagaacgggccatgatgacaatggtggttttgtggaatagaaaagggggaaaggtggggaaaagattgagaaatcggttggttgctgtgctgtgtagaaagaagtagacatgggagatttttcattttgttctgtactaagaaaaattcttctgcgttgggatcctgttgatctgtgaccttacccccaaccctgtgctctctgaaacatgtgctgtgtccactcagggttaaatggattaagggcggtgcaagatgtgctttgttaaacagatgcttgaaggcagcatgctcgttgagagtcatcaccactccccagtctcaagtacccagggacacaaacactctgcctaggaaaaccagagacctttgttcacttgtttgcctgctgaccttccctc

SEQ ID NO: 11525 - DNA, 1234 bp, Artificial sequence
  DNA replication origin
cggggtggtggccgggcagaggggctcctcacttcccagtaggggcggccaggcagaggcgcccctcacctcccggacggggcggctggccgggcggggggctgaccccccccacctccctcccggacggggcggctcgctgggcagggggctgacccccccacctccctcccagacggggcggctcgccgggcagggggctgacccccccacctccctcccggacggggcggctggctgggcgcggggctgaccccccacctccctcccggacggggcggctggctgggcagaggggctcctcacttcccagtaggggcggccgggcagaggcgcccctcacctcccggacagggcggctggccgggcagggggctgacccccccacctccctcccggacggggcggctggcctggcgggggctgacccccccccacctccctcccgggcggggtggctgccgggcggagacgctcctcacttcccagacggggtggcagccgggcggaggggctcctcacttctcagacggggcagttgccaggcggagggtctcctcacttctcagacggggcggccgggcagagacgctcctcacctcccagacggggtcgcggctgggccgaggcgctccccacatctcagacgatgggcggccgggcagagacgctcctcacttcctagatgggatggcggccgggaagaggcgctcctcacttcccaggtaggatggcggccgggcagagacgctcctcactttccagactgggcagccaggcagagggtctcctcacatcccagatgatgggcggccaggcagagacgctcctcacttcccagacggggtggcggccgggcagaggctgcaatctccgcactttgtggggccaaggcaggcggctgggaggtggaggttgtagcgagccgagatcacgccactgcactccagcctgggcaccattgagcactgagttaacgagactccgtctgcaatcccggcacctcgggatgccgaggctggcggatcactcgcggttaggagctggagaccagcccggccaacacagcgaaaccccgtctccaccaaaaaaataagaaaaccagtcaggcgtggcggcgcgcgcctgcaattgcaggcactcggcaggcggaggcaggagaatcaggcagggaggttgcagtgagccgagatggcagcagcacagtccagctttggctcggcatgagagggag

SEQ ID NO: 11526 - DNA, 1154 bp, Artificial sequence
  DNA replication origin
cactccagcctgggcaccattgagcactgagttaacgagactccgtctgcaatcccggcacctcgggatgccgaggctggcggatcactcgcggttaggagctggagaccagcccggccaacacagcgaaaccccgtctccaccaaaaaaataagaaaaccagtcaggcgtggcggcgcgcgcctgcaattgcaggcactcggcaggcggaggcaggagaatcaggcagggaggttgcagtgagccgagatggcagcagcacagtccagctttggctcggcatgagagggagaccgtggaaaggggaggagaaaggggagaggggagaggggagaggggagagggagaggggagaggggagagggagaggggagaggggagaggggagaggggagaggggagaggggagaggggagagggagaggggagaggggagaggggagaggggagagggagaggggagagagagaggggagagggagaggggagagagagaggggagaggggcaaacacacacacctcttaaacattcaaggaaatttcttccccactgggagacaaagatgtattctagtcttgaaaggcaacacacaaatacacttgatcttaaaaactcagatatagaacattttttcagcagttggtagcgggagggtaacatgattttagaactttattctaggggaattcttattcacagctaaagaagaaatgtacagtcaagttcaaagttcttcccccagttctcagcagagtcaagacaaggaccatttacaacaatccacacaacaaacgagcattcagaaaagggttcaccactgtagaaaattactcttgtagagttttatcatcttaaagctgccaacttaattttcttttgaaactagaagaagaagtggtgataacttttaattgagtgaagcacactgttatttggaaaaagacaacgataattcacacacagaatgctccttgctggtgggtgaaggccagattgctgcagttggacttagaactccactttcacatagaactttgctgacagtaactaattaatgcccacaaggctgcagtgaagcaaggtaaaaaaaaatccatcaggtgcaggagttagtcatcctcctgactggttttatttctgtgtgtccaatga

SEQ ID NO: 11527 - DNA, 759 bp, Artificial sequence
  DNA replication origin
aacggcagcccttggtactcagggagggatgaggctggtgggaaagcgagagggcggggactcgggggcgaccggggcggccctttctgggagcctgatccctggagaggcgggagcggttggctgcgagggaggcgcgcggcgggggggcggttgtgctctgcgccgggggagctagagtgtgtgttgtcttgcgagttgtaaggaaaagtgcctttttactgtttccacgccggtaagactctcccaccccaccacctcgggtcgacggagcaatgcctagagcaagagttgttcttgctgaactgcgtcttgcaaccgttccgtgttcttgcacttggcggttccccccgccccatccacaattgtgaattaagctccttgattgcaaatttggagaatgcatttggccagttatgcaaagtggcggaggtggcggggtcgggggcggggggtctctttcggaagaatccagtgcatggtttattagctagactgaggaaccgagaggtgctagatgggatttgtggggagcgagcagcctaatttgttttaaatagcgggacccgtggcaggaagtgcttcatagaattgtacggaagagctgatgttgcttgtcaggttttgtaactcattctcctaaccgcttggcagataacctgttggtctgcacttgttttgcttgcacgtctcagccaaaagcatttcgtgcagaatctacagatagaaacaggcggttttgcattagatggccgtgga

SEQ ID NO: 11528 - DNA, 1187 bp, Artificial sequence
  DNA replication origin
ccccggctctcccgccgcgcgctccggcccgcagggcgggaggacccaggcggacagatccatccctccgcgtctggtgtgggcacggtgtcgtgccccgcggcgcctgtcagcgcgcacaggtgggaccgcagcacagagaacgctcccgagcgccctgcctcagcctcggcgtggggcgagccgcccgcgcccgcacccgcacccctttccccgcgcccgaggagccgggctgtaccccggagccggcggagctggaggccgcgggcggagcgcgggttgccccggcagctctttctcggcaccaggtccgagacctaacggcagttctctctgaccgcttcccggccgcgcgctcgcgcgggtgtcatggccgagcggcggcccccgacgaagtttcccggagctgacggctttaccttttagcccaaggggcggcagcagctttgagcagcagcaaggcggcggcggcggagggagcgcgggtggcagccggcgcagaggcggatgtagaaggagacaccggtggctaggacccgcgcgatgggaagaggaaggcgccggctatctacaatcagaacgtgggctgaccgtgacgtcacaatggcgcggccagccaatcgggacccgaaggatgaatcaagcgctatgatgtcatgcggcccgggagccaatcgcgggacaatagaactttcgtgatcgtaaattccagaatccgatgcggtggagagcctaggccggggttggcccctcggttccacgtgtctctgggaaatttttttcccctttcttcctaataagcctgcgtggaacgcagagcctgcgcaatagccccggtgaagttgtcgatgccctgaactctggtttttttactgccaggcgtggcaggagtctgtggccgcatttgggtggcagaagcccaccctcgttacggtctcctctatgagttatgtcatgctgaaggggatccacttcatcgttaaagctgaaagggttaaatgcccacggagaccgccggagtgaaggtctgcagttgaacaagataaaggaacaagaacaaaacgactcaaaactgttgtaaccataactcccttgcaaaggatttaccgtgtatttttcttagggattctgatttttctttggaagccactatcaactccatttctactctagaaattattctaaag

SEQ ID NO: 11529 - DNA, 1041 bp, Artificial sequence
  DNA replication origin
atgggaattctatttttttttttatatctctactgtaacatctaaatagttgaaaacttatttaagccagccatctaacatttatagaagcatctctatttctgtgataccttcattctgtatgtacaggtcacttctctctccacccccagaaggaaaaacccagctgggtgagggtggacagatttgttttgattagagtgggcacatttcttcgacctaatgtttgaaagaggaggtgaaaaatcattggccctgccattcactcagacacttgagtgcctgctgcaggcagaatgggcatgctctcatgagtgaagacggacagctctgtctctgtggagctggggggttgaagaacaatcaaatacccatagattcataagcgtcaaagtggggctgtgctagcaggaggagatggggagcaaagagtacaacctaggtatccagtggactctggtgggtggagggggagggggtgggatgtccaaggttccaggaggagtgaaataggaatgaggagcggaggacagtcttagggagggggagcagtgtgtgtagaagtcctaggatgaaccaaacaagcggggacttcctgggaactagaagaaagcaagctggccagtgtgactaggaggctgaggaggaagtgcaggtatggggtaaagggaagctggcaggtaattggcaggccaggtcaggttaaccataaattttagttgttctcctaaaagcagttgaaggccttggaaaggttgggttgggcagatggcatcccctttttgctttgcagccctcacttgggctgtagtgtgagagtagctgtggagctggtgccagggcttactaggaggtgagtgagggagctccctgaggggagacaagggctgcctggatgcccgtgggtgctggtgataggaaaagtgggtggtttaaaagatgacagagtcagtgaactgctggggagagaagacacatcaaggcttttgctataggtcattgtcctgaaaaccttaagagtactagagtagaggccaagga

SEQ ID NO: 11530 - DNA, 746 bp, Artificial sequence
  DNA replication origin
gggcatagcggtagatctcctcggggacgtagaccagcgagcagtggcgcttgtcgatgctctccacatgacggttgcaccgccacagggggatgcagtggaacatcgccgcccccgccgccgcctagccgggtcccgagcggcggagacccgggctccgagcccgctctggccggcggctccgctcagtccgctgccctctccgcgctcgttgttggctcttgggttagctcgcttctcgcgccgggcttcgcggtcggaagtgcttcaaggaacctggagcgggagcccctgccccgtccctgtacccccgcccgccagccggtgcctccactcccacccgccagtcgccgtcgccgcccccgccgccgcgcggagcttcctactcgcagccgccgcgcggactgagcatgcgcgccagtgggtgcgcgccgagggcgtttcccggcccgagggatgctccgctccgggttttcccggcgacctgcatccagagagggtcgactgacctgcgggccggctgctggcggtctgcttactccggcaaagacgggggcgcatcgggccgtttgaggaaggcagactgtgaaaggacttgggacaaagatgaggcggagtagaggcggcctgagcagagcagaacaactttgatatttagttttatttaactcgcactcctctccttgctccccttccccaaaacaactttctcttccggggtcacacaggaccgccccaaagcgtac

SEQ ID NO: 11531 - DNA, 1166 bp, Artificial sequence
  DNA replication origin
aagggccgggcgcgcctctcctttagtcaaggcatgtcccggaggaccttgtgacctgggcagcgctcaagcgggccgcactatctcggcatcttgggaggaatgaggaatgtgctccgtgctttatcgcgggtgggcttggccggctggcctgcggtggctgcgggggtggacgcgagatgggcgcaggggagagctgggcctggagcgctaggggcaggtgcccagatgccggccgcccgggccttgcctacgtggacctgttgcgtggtgggagctgcggtgaacgtcagcggaggctctgcccgcgggccagccttgcagccgcctttcccggagcgggcacagtcgtcctgctgactttctctccttgcagtgatgcgttatctcttcagagttgtttatgtaaattgatcactccattgccgccgaacttgtcaagcgacatgtgctgatggtgctttgaccgagagtaggggtacagcgaacttctttcaagcttgcctcgggaacttagctagagtaacccctcggggaaggtgtctcaaacccaggtgtgtgcaggaagtcggtgtgcaataatccaaaggtgtgcaggaagtagggagactgctggcagtcggggattggacctgttttaggcctgagctttggaacgcaaacttcttgttgccctttagttaacacaagccaaatcattgtcacagaaacactagtcaagtgttctgacttgttagaatgacctgatacgttctccagcgctgatggagcatttaaacaataagaactgtgtgtttttctcaatattttaagtggtggtgttcttcttggattaactttcctgggttcatgtggaattgattggatgtttgctctgtgtaatcatggagattatcctcactaggacctttgcaaagccccccaggctttatttagcttagaagcagcaaagccatcaagttccctcaggcgtttattatttcgcaggcattttcaaacacatgatttttttctggccttttacgtccttgaagatttcttaccagtcgtcagctccctcactgctttaagttgtgtaattttaggcagtgatatcaccaggaatatagaatatgtaatttaatagttttcaggggcttcaggatgacattattgaagatggagtg

SEQ ID NO: 11532 - DNA, 1098 bp, Artificial sequence
  DNA replication origin
gggggagtgaaggataacagttgaattattggtttgagtgactgggtaccaccttcagaatttgaagaaagaggccgggcgcggtggctcacgcctgtaatcccagcactttgggaggccgaggcgggcggatcacgaggtcaggagatcgagaccatcctggctaacacggtgaaaccccgtctctactaaaaatacaaaaaatcagccgggcgtggtggcgggcgcctgtagtcccagctactcgggaggctgaggcaggagaatggcgtgaacccgggaggcggagcttgcagtgagccgagatcgcgccactgcactccagcctgggcaagagtgcaagactccgtctcaaaaaaaaaaaaaaaaaaaaaaaaatttgaagaaagaggggaaggatgcttgtggataaataaaagatcaaacctgttggctttagttttctcagttcaggatgagatagggcagtctgctaggtgagggaggtggaggtggagcatggggtgccttgggggtagtgagagaaaggaatgggagggggagctaatgggcattgctgaggttggcatgaagttttggtggtgccaggcttctgatttttttttcctctagagtgctcaactatacaggcttagaatagagaaaggtggattgtgggtgctggttctacctatggaatagggagtggctggatgagagggtgggatggggccactgaggatgccgatgaaaaggtacttgggatgctgtacagagagagagaagggagttccagaaggaatgggtgggcagaaagaaaaatggaacagcagcatagtggattgtggccatgggagaggtcatggccagatccaggatactggagttgaagattcataagaggaagcagctgtgagtgaggccatattatggggtgtgactcaggagtggactgtgtggattggaggggtgtggtggtcattgcccttaaggaagcccaggagttgctatgcttgcttgctgggtggatcagctccatgagggaccaaaaaatcaaatacctgtggcagcgccaagtgggcaaattgtaggatagggtgggctagttatagacaaacc

SEQ ID NO: 11533 - DNA, 851 bp, Artificial sequence
  DNA replication origin
gggtccccagaggactggcgccgcccctcgtggaggctgcatttgtttcctcttttccagtgtaggagtgcgccgaggaccccgggaggggaagcgggaggagagaccgctgggaaaagtctcgtgggaggaagtccagggtggaagcagagggcatgggggtggggggttccgggaaaaggtgggagagcttaggtcgctgaggggcgtgggtgttctttagatcctgagtggggagcagaacttgaaaagacagttttttcacacaacctcttaattgtacaggatcccgtttctgagtgcagactggtagcgacctgtgtttttcatacttgggtcggcctgagtctgggtctgtgtgccctagcagctctccaggagagcctgtacctaccaaagtttgagaaccactgctctagatcctggtgagtgatctagaagaggagagtaggcctagagcagattgctcctggaacgggacttggagacttttggcctattctgtgtgatatgtggggagacttacctgtgtaaggttaatggacaggcagagaatgcctgtgttcattgcaggagtcataggtatgtaaagagacaacagcgctttctttataggaggaggctgggaggttatggaaacacaggttagcatgttgtctatgctcggagcggtgaagttatagggtctctctgacctagaagtggaaatgagagctcaggcggccagaacacttaagaagaaggtgtgcgggtggcaagcaattgaggctagaatttaatgctcaacagcttatgtccaaattcccagttacaaacatcttgctaggttactggcaggcacctcccttctt

SEQ ID NO: 11534 - DNA, 911 bp, Artificial sequence
  DNA replication origin
accctccgcctggcaaccgccccatctgagaagtgaggagcccctccgcccagcagccgccccatctgagaaatgaggagcccctccgcccggcaaccacaccatctgggaagtgaggagcatctctgccccgccagccgccccgtcctggagggaggtgggggggtcagccccccgcccggccagccgccccgtctgggaggtgaggggcgcctctgcccagccacccctactgggaagtgaggagcccctctgcccggccagccgccccgtcagggagggaggtgggggggtcagccccccgcccggccagccgtcccttccgggagggaggtgggggggtcagccccccgcccggccagccgccccgtctgggaggtgaggggcgcctctgcccagccgcccctactgggaagtgaggagcccctctgcccggccagccgccccgtctgggaggtgtacccaacagctcattgagaacgggccatgatgacaatggcggttttgtggaatagaaaggggggaaaggtggggaaaagattgagaaatcggatggttgccgtgtctgtgtagaaagaggtagacatgggaaacttttcattttgttctgtactaagaaaaattctttggccttgggatcctgttgatctgtgaccttacccccaaccctgtgctctctgaaacatgtgctgtgtccactcagggttaaatggattaagggtggtgcaagatgtgctttgttaaacagatgcttgaaggcagcatgctcgttaagagtcatcaccactccctaatctcaagtacccagggacacaaacactgcggaaggctgcagggtcctctgcctaggaaaaccagagacctttgttcacttgtttatctgctgaccttccctccactattgtcctatg

SEQ ID NO: 11535 - DNA, 1146 bp, Artificial sequence
  DNA replication origin
tacacctcccagacggggcggctggccgggcagaggggctcctcacttcccagtaggggcggctgggcagaggcgcccctcacctcccagacggggcggctggccgggcggggggctgacccccccacctccctcccggaagggacggctggccgggcggggggctgacccccccacctccctccctgacggggcggctggccgggcagaggggctcctcacttcccagtaggggtggctgggcagaggcgcccctcacctcccagacggggcggctggccgggcggggggctgacccccccacctccctccaggacggggcggctggcggggcagagatgctcctcacttcccagatggtgtggttgccgggcggaggggctcctcatttctcagatggggcggctgctgggcggaggggctcctcacttctcagatggggcggttgccaggcggagggtctcctcacttctcagacggggcggccgggcagagacgctcctcacctcccagacggggtcgcggccgggcagaggcgctcctcacatcccagacggggcggcggggcagaggcgctgcccacatctcagacgatgggcggccgggcagagacgctcctcacttcctagatgggatggcggccaggcagagacgctcctcactttccagactgggcagccaggcagaggggctcctcacgtcccagacgatgggcggccaggcagagacgctcctcacttcccagacggggtggcggccgggcagaggctgcactctccgcgctttgggaggccaaggcaggcggctgggaggtggaggttgtagcaagccgagatcatgccactgcactccagcctgggcaccattgagcaccgagtgaaccagactccgtctgcaatcccggcacctcgggaggctgaggctggtggatcactcgcggttaggagccggagaccagcccggccaacacagcgaaaccccgtctccaccaaaaaaaatacgaaaaccagtcaggcgtggcggcgcgtgcctgcaatcgcaggcactcggcaggccgaggcaggagaatcaggcagggaggttgcagtgagccgagatggcagcagtacagtccagcttcgactcggcatcagagggagaccgtgg

SEQ ID NO: 11536 - DNA, 1219 bp, Artificial sequence
  DNA replication origin
atgactcttaacgagcatgctgccttcaagcatctgtttaacaaagcacatcttgcaccgcccttaatccatttaaccctgagtggacacagcacatgtttcagagagcacagggttgggggtaaggtcacagatcaacaggatcccaaggcagaagaatttttcttagtacagaacaaaatgaaaagtctcccatgtctacttctttctacacagacacggcaaccatccgatttctcaatcttttccccacctttccgccctttctattccacaaaaccgccattgtcatcatggcccgttctcaatgagctgttgggtacacctcccagaccaggtggtggccgggcagaggggctcctcacttcccagtaggggcggccgggcagaggcacccctcacctcccggacggggcggctggccgggcggggggctgacccccccacctccctcccggacggggtggctgcggggcggagacgctcctcacttctcagacggggcggctgccggacggaggggctcctcacttctcagacggggcagctgccgggcggagggactcctcacttctcagacggggtggttgccaggcagagggtctcctcacttctcagatggggcggctgggcacagacgctcctcacctcccagacggggtcgcggccggtcagaggcgctcctcacatcccagacggggcagcggggcagaggcgcttcccacatctcagacgatgggcggccgggcagagacgctcctcatttcctagatgggatggtggccgggcagagacgctcctcactttccagactgggcagccagggagagggtctcctcacatcccagacgatgggcagccaggcagagacgctcctcacttcccagacggggtggcagccgggcagaggctgcaatctcggctctttgggaggccaaggcaggcggctgggaggtggttgtagcgagccgagatcacgccactgcattccagcctgggtaccattgagcactgagtgaacgagactccgtctgcaatcccggcacctcgagaggccgaggctggcggatcactcgcggttaggagctggagaccagcccggccaacaaagcgaaaccctgtctccaccaaaaaaatacgaaaaccagtcaggcgtggcggcgcgcgcctgcaatcgcaggcactcggcaggctgaggcaggagaatcaggcagggagg

SEQ ID NO: 11537 - DNA, 918 bp, Artificial sequence
  DNA replication origin
gagaccctctccctggctgcccagtctggaaagtgaggagcgtctctgcccggccaccatcccatctaggaaatgaggagcgtctctgcccggccgcccatcgtctgagatgtgggaagcgcctctgccccgctgccccgtctgggatgtgaggagcgcctctgaccggccgcgaccccgtctgggaggtgaggagcgtctgtgcccagccgccccatctgagaagtgaggagaccctctgcctggcaaccaccccgtctgagaagtgaggagtccctccgcccggcagctgccccgtctgagaagtgaggagcccctccgtccggcagccgccccgtctgagaagtgaggagcgtctccgccccgcagccaccccgtccgggagggaggtgggggggtcagccccccgcccggccagccgccccgtccgggaggtgaggggtgcctctgcccggccgcccctactgggaagtgaggagcccctctgcccggccaccacctggtctgggaggtgtacccaacagctcattgagaacgggccatgatgacaatggcggttttgtggaatagaaagggcggaaaggtggggaaaagattgagaaatcggatggttgccgtgtctgtgtagaaagaagtagacatgggagacttttcattttgttctgtactaagaaaaattcttctgccttgggatcctgttgatctgtgaccttacccccaaccctgtgctctctgaaacatgtgctgtgtccactcagggttaaatggattaagggcggtgcaagatgtgctttgttaaacagatgcttgaaggcagcatgctcgttaagagtcatcaccactccctaatctcaagtacccagggacacaaacactgcagaaggccgcagggtcctctgcctaggaaaaccagagacc

SEQ ID NO: 11538 - DNA, 1155 bp, Artificial sequence
  DNA replication origin
agctgagccagccggggcgctgaccgccgcgctcgccccctcccttccgccctccgccctccaccctccaccctccaccctccactctccaccctccaccctccaccctcctccctccctctctccccggcgcgggcgagtgtctgcggcgcggcggccaggaaatgccgcagatgcgccgcgcagcatccccggtgaaggcagcgcgccggtcctcccgcaccgctgccgcggcctcggcccggcccgaagcacgcgcctcgtgcagggccagcagagcggtcagcgcggccgcagagggtccgggcgcccgccggcccccgcccgccctcgccgcacgccccgctcctccgcttggcgtggcgctgctcgtcgccgcccctgggctcgctgagatttgccgctgctgaaacccgagagggactcgggctcccggagccgggcggcccaccatcggcctgcccggaggcctgggcgtttcctttgccggccctggcgccggcagccccctgcgcccccgctctgcgtcttcggcttccgtgcttctccccagcgtgctgctccttcctcttttccagttcccaaggctgtgtcttgctgactgcgatactgtccgggggttacgagggggagaggggaatttgtcagtcatcgcttagataaacttcggcatggcgggttacctctcccctgctgcttacctgtacgtggaggagcaggagtatctccaggcctacgaggatgtcctggagaggtacaaaggtatgtggtccctgccctggggctgcggagcttggcactgatcagagaggcaaccgctgcctttccttaatcagagccaccactccttgggcacgagtaaacaggtgtctggaccagtcttgggaatggaccaggtctttttgcacgggatttagtacccccagcgcagggaggatggtggggtgggcgacagtccggagacgcccttagatgagcggtagagaggggggaagggggttgtttccaagaagcacattgcgttttctctcccttgtaaaagctcttaagcactacgcgtaatcataattcttcctgggagggtggataccgattattctctatgggattactaaggcattgctgctgctgcttggctagggtattggttagccc

SEQ ID NO: 11539 - DNA, 1385 bp, Artificial sequence
  DNA replication origin
gcgcatcagcgcctgacagccgggccgcgcctgcgcctgagctcccggccgccgcgaggctgccgagtaccagcctgcggtccctcccttctgccccccagagcccacaggcgcatctgctgctgggctccgcggcgggcctataggttcacaactgccccatatttatcacctccctcctgctctctccttattattcattctacatagtactagtatccattaaactgagtaaaatggatacagttcccttaaattagatatatgtgtatcatatactaaagtgggtgagtttaagcgtccattggaggaaccaactgatacccaggcatgtaaatggatgtgtttaagagtaatgactggccgggcgcggtgtctcacgcctgtaatcccagcactttgggaggccgaggcgggtggatcacgaggtcaggagttcaagaccagcctggccaaaatggtgaaatcccgtctctactaaaaatacaaaatttagccgggcgtggtggcgggtacctataatcccagctactcgggaggttgaggcagagaactgcttgaacccgggaggtggaggttgcagtgagccgagatcacgccaccgtattccagcctgggcgacagagcaagactccgtctcaaaaaaaaaaaaaacagtgaagtcaggctgctgtacatagaatcttcactccttactgtgtcacatgggcaagttacttatcctctctgagactctcttcatcagtaaaacagcgatagtagtgcctaactcataaagttgtatagtaaatgaagtttagaataatgtctggtgttatataaggattagctgctgcacctactactttatttaggaggtggggtctcactctgtcatccaggctggagtacagtgacaggatgatacctcattgctactgctattattagataaatcagctgattgttgacagtctgacctatgtcaacttcacgtcttgtctaaatcttccttccctatttcctcctttcacatatactgaccttttgccctccatgattttttatttctttgttagcgttgggtgttgtgaactatggaccattttccattaatgcttagatagggatgagttcctcttgaaagaaaaaattgtgtactcgtgggaaaaaaaaactgacttgagatagaactggagcactcctcagcaattggcctacttctgttactccaaacaaagcaagaccacatctcttttttctatcctgaccactggtttataatctgagtttgaaccactgtcccagtaagtctttaaggttactagagttttcttacagctcgatatgcatttgtatgcacattagttcataaagtaacaaccaggcatcatatgggacacctt

SEQ ID NO: 11540 - DNA, 934 bp, Artificial sequence
  DNA replication origin
ctggccagccgccccgtccgggaggtgaggggcgcctctgcccggccgcccctactgggaagtgaggacccctctgcccggccagccgccccgtccaggagggaggtggggggggtcagccccccgcccggccagccgccccgtccgggagggaggtggggggatcagccccctgcctggccagccgccccgtccgggaggtgaggggcgcctctgcccggccgcccctactgggaagtgaggacccctctgcccggccagccgccccgtccgggagggaggtggggggaacagcccccctgcccggccagccgccctatccaggaggtgaggggcgcctctgcccggccgcccctactgggaagtgaggagcccctctgcctggccagccgccccgtccgggagggcggtgggggggtcagccccccgcccggccagccgccccatctgggaggtgaggggcacttctgccgggccgcccctactgggaagtgaggagcccctctgcccggccacgaccccgtctgggaggtgtgcccagcggctcattggggatgggccatgatgacaatggcggttttgtggaatagaaaggcgggaagggtggggaaaaaattgagaaatcggatggttgctgggtctgtgtggatagaagtagacatgggagacttttcattttgttctgtactaagaaaaattcttctgccttgggatcctgttgatctgtgaccttatccccaaccctgtgctctctgagacatgtgctgtgtccactcagggttagatggattaagggcggtgcaagatgtgctttgttgaacagatgcttgagggcagcatgctcgttgagagtcatcaccactccctaatcttaagtacccagggacacaaacgctgcggaaggccgcagggtcctctgcctaggaaaaccaga

SEQ ID NO: 11541 - DNA, 1298 bp, Artificial sequence
  DNA replication origin
tggccgggcggggggctgaccccccccacctccctcccggacggggcggctggccgggcagggggctgaccccccctcccccctcccggacgaggcggctggccgggcggggggctgacccccccacctccctcccggatggggcggctggccaggcggggggctgacccccccacctccctcctgggcggggcggctggccgggcagaggggctcctcacttcccagtaggggcggccgggcagaggcgcccctcacctcccggacggggcggctggccaggcggggggctgacccccctacctccctcccggactgggcggctggccgggcggggggttgaccccccacctccctcctggacggggcgactggccgggcagaggggctcctcacttcccagtaggggcggccgggcagaggagcccctcacctcccggacggggaggctggccgggcggggggctgaccccccccacctccctcccggacggggtggctgccgggcggagacgctcctcacttcccagacggggtggttgccagacggaggggctcctcacttctcagacggggcggttgccaggcagagggtttcctcacttctcagacggagcggccgggcagagacactcctcacctcccagacagggttgcggcccagcagaggcgctcctcacatcccagacagggcggtggggcagaggtgctccccacatctcagacgatgggcggccgggcagagacgctcctcacttcctagatgggatggcggcggggaagaggcgcttctcgcttcctagatgggatggcggccgggcagagacgctcctcactttccacactgggcagccaggcagaggggctcctcacatcccagacgatgggtggccaagcagagacgctcctcacttcccagacggggtggcggccgggcagaggctgcaatctcggctctttgggaggccaaggcaggcggctgggaggtggttgtagcgagccgagatcacgccactgcactccagcctgggcaccattgagcactgagtgaacgagactccatctgcaatcccggcacctcgggaggccgaggctggcggatcactcgcggttaggagctggagaccagcccggccaacacagcgaaaccccatctccaccaaaaaaaaacgaaaaccagtcaggcgtggcggcgcgcgcctgcaatcgcaggcactcggcaggctgaggcaggagaatcaggcagggaggttgcagtgagccgagatggcagcagtaccgtccagctttggctcggc

SEQ ID NO: 11542 - DNA, 1193 bp, Artificial sequence
  DNA replication origin
tcatcagccgagcccccgccgcggcgccccattcccgccccccgcaggctgccgcggctgcagcctgagcgccgcgtccccgccccgacccacgtgcgcccggcttctgggatgctgaggtcggcggcggccgcaggacgatgcgcggggcccgggcggccgcggcggcggcgctgctcctccccactcgccgcgtccccggcggggctgcgcccgggggctgcgcacggacgggggcgggggcgcctggggagggaggggagaggatcccagccgccgagtcgcagcctcgtcgctgtctgctgagtcatggcaagcgctccccgcagccctggatcactcgcgtagcgcggctggcgcggggtgcgcagccattgggctgggcgcggggccgcgagcgccaggcatgacgcgctgagccgcgctcacccgtgcccgccgtcccggcgtgcgcccagcgcgggtgcctgtgccgccgccctccagccccgccgtcgagtcgccctcgcctcgcccgcaccatgatcgccgcggctttcctcgtcttgctgagaccctacagcatccaatgtgccctcttcctcttgttgcttctgctgggcaccatcgccaccatcgtcttcttctgctgctggcaccgcaagctccagaaagggaggcatccgatgaaatcggtcttctcgggtcgttcaagaagccgaggtaagacacgccgcgacgggtttctgcgggctaccaggaacaattaagccgatttggagagtgaagcgcggctcgctcccttctcctcggctgcccctagccccatcattgcccactccccaggctgagtgcgtttctttaacgccccttgccctttttgccgtcacctccgccctccagtctcccaggtttgaataaccacggcgatgccgagggcagggaggggaggaaagaactcaaatttttagtcagtttgctaaagccttaagggtaatttgagcgtagtccggggctgcgccagcctcgccttcacgcatccttcgctggagcgtaggggtaagaaagtaaggcatggaaacttcggggctccccaactcccccagaactttcatgcaaacttctcgcggagaaatcacgtagagaccgatggccccaggactcctcctccctcccccaggatgtcccaccgaattccaggagtctgcgatgtg

SEQ ID NO: 11543 - DNA, 1192 bp, Artificial sequence
  DNA replication origin
tcagcagacagcgacgaggctgcgactcggcggctgggatcctctcccctccctccccaggcgcccccgcccccgtccgtgcgcagcccccgggcgcagccccgccggggacgcggcgagtggggaggagcagcgccgccgccgcggccgcccgggccccgcgcatcgtcctgcggccgccgccgacctcagcatcccagaagccgggcgcacgtgggtcggggcggggacgcggcgctcaggctgcagccgcggcagcctgcggggggcgggaatggggcgccgcggcgggggctcggctgatgacatcacggccaggctgcggcagcgcgggcgcgcggacatggctgcggcggtttcggcggcgtccgcgggctgcacccgggcctgagagcccagcgccctcccgcggggccgcccgccagtccgcgccgtccgcgggtgcattggccgggtgcctctagcttcccggacacccggagcttccgcctatccagcctccctcggccaaattgctgcggagcccgtcgtcagggggcgccaaggagccagggggaaaaccgagaggcgctgacaggagcctcccggcggtgctaccctccacctcccacctccctgcgccccgccccgaggttggggctttgaagaatgcagccgggtgagctattgcttgtgggggtttcctcgcactctgaagcgcgagcgccgggaagggccttccctgggaattgggatactccaggaacgggaggcccactcctctccaagcctctctaaactaggagcgctccggggtagtacgctctggtcggcagaggtgaactcttccaccccaaacttggtgcttatctcgcagctaagaattgggcactttcgatcttcttgtatccctgggtttgccctaaaaccctgactcatttagtgcatttgaagggcaaggcgatttcagatttagggacctggcagatgaagtaagttggtacttggcttataaacatttgggggagaaattttttagggagtgtgaggcaatagtgatctctcacacttgcaggcacactctgtctcccctttgtcccctccccacgtttcttcataaccagcaaaaagtatatggcagttggtggccaggggatttaacactgatgcaatgccagcacggaaggtatagcgagagcgctgcagtgtgcct

SEQ ID NO: 11544 - DNA, 1082 bp, Artificial sequence
  DNA replication origin
cagacgaagggcggccgggcagagacgcccctcacttcctagtctaggcggccgggcagagacacccgtcacctcccagacagggtggcggccgggcagaggtgcccctcacttcccagacggggtggtggccgggcagagatgcccctcacctcccagacggggcggccgtgcagaggcgcccctcacctcccggacggggcggccgggcagaggcgcccctcacctcccagacggggcggccgggcagaggcgctcctcacctcccggacggggcatccgggcagaggcgctcctcacttcccagacggggcggccgggcagaggcgctcctcactttccattcagggcaaccaggcagaggcgctcctcacttcctcccagacggggcggcggggcagaggcactcctcacttcccagagggggcggccaggcagaggtgctcttcacttcccattcggggcagccgggcagaggtgctcctcacttcctcccagactgggcggccgggcagaggcgcttctcacgtcccagacaatgggcggccaggcagagacgttcctcacttcctagagggggcggcggggcagaggggctccttacatcccagacgatgggtggccaggcagagacgctgctcacttcctagacggggtgaccggcgggcagaggctgtaatcttagcattttgggaggccaaggcaggccgctgggaggtggaagttgtagcgagccgagatcaagccactgcactccagcctgggcaacattgagcattgagtgagcgagactccgtctgcaatcccagcacctcgggaggcggaggcgggcagatcatccgaggccaggagctggagaccagcccggtcaacacggcgaaaccccgtctccaccaaaaatacaaaaaccagtcaggagtggcggcgcgtgcctggcaggccgaggcgggagaatcaccggagcccgaggcagggaggttgcagcgagccgagatcatggcggtacagtccaggctccgcaagaaagggagaccgtagaaaggggagaggggagaggggagacgggagaggggagaggggag

SEQ ID NO: 11545 - DNA, 690 bp, Artificial sequence
  DNA replication origin
cccgtctaggaagtgaggagcatctctgcccagccgcccatcgtctgagatgtggggagcgcctctgcccagccgtgatcccatctgggaggtgaggagtgtctctgcttggccgcccagtctgagaagtaaggagcccctccacccagcagccgccccgtctgagaagtgaggagcccctccgcctggcagccaccccatctgggaagtgaggagcgtctccgcccggcagccaccccgtccgggagggaggtgggggtcagcccccgcccggccagccaccccatctgggagggaggtagggggcacctccgcccggccgccacctcatctgggaggtggggggcgcctctgcccggctgccccttctgggaagtgaggagcccctctgcctggccaccaccccatctgggaggtgcacccaacagctcattgagaacaggccatgatgacgatggtggttttgtggaatagaaaagggggaaaggtggggaaaagatagagaaatcagattgttgctgtgtctgtgtagaaagaagtagacatgggagacttcattttgttctgtactgggaggggttcttctgccttgggatgctgttgatctgtgaccttgcccccagccctgtgctctctggggcatgtgctgtgtccactcagggttaaatggattaagggcggtgcaagata

SEQ ID NO: 11546 - DNA, 878 bp, Artificial sequence
  DNA replication origin
gcatggggttgggggtaaggttatagattaacagcatcccaaggcagaagaatttttcttagtacagaacaaaatggagtctcctatgtctgcttctttctacacagacacagtaacaatgtgatctctctttcttttccccacatttcccccttttctattcgacaaaaccgccatcatcatcatggaccattctcaatgagctgttgggtacaccccccgaacggggcggctggccgggcgggggctgccccccacctcctggacggggcggctgccgggcagagacgctcctcacttcccagacggggcggctgccaggcggaggggctcctcacttctcagacggggtggccgttcagagatgctcctcacttcccagacggggtggcggcggggcagagacactcctcagttcccaacagggtcgcagccaggcagaggcgctcttcacatctcagacggggcggcggggcagaggcgctccccacatcccagacgatgggcagccaggcagagacactcctcacttcctagatgggatgaggccgggaagaggcgctcctcacttcccagactgggcggccaggcagaggggctcctcacatcccagatgatgggcggccaggcagagacgctcctcacttcctagacggggtggcagccaggcagaggctgcaatctcggcactttgggaggccaaggcaggcagctgggaggtggaagttgtagccagccgagatcatgccactgcactccagcctgggcaacattgagcactgagtgagcaagactccatctgcaatcccggcacctcaggaggccgaggctggcagatcactcgcgctcaggagctggagaccaggctggccaacacg

SEQ ID NO: 11547 - DNA, 857 bp, Artificial sequence
  DNA replication origin
gcggggatggggggccggtcgtggattcccagcccgagaggcgacgatgcgacggctactcacaggaatatgtttactcattgaagattgtggcctaatcatacagccggtcccgaggcggcggcgacacaggcggtggcggtggctgcagggcaggaggcggcggtggtcgtggcggagcggcggtggcggcgatgcaggcggcggcgggggcaccagactctaccatgcagtgagcggctcggagcagagcgcgtagccgagccggcccgcagccgaaggagccaatacacgcgccgaggcgcccttgcgtcacaagccctcccctttatagccggcgcgacgtgcaaccctccagccaccaatcgcggcctggaaccgcgggccaggagccgacaggcgggggcggaggcccgccccctccggacgtcactccgcggcggccgccgccggtgtgaaccggttgatgaatggctaagcgccgagtcggagcatccccggggcgggggagggaaggggctgccgggagtgctccgggatgcaggaagcctgaagttaagaaggggtgggagcgagagagattccgatttatcgactggaaggaatcatgctgcaaaccacgtttctcataattaaaacggtccaggagtgcacacatgtcacatgaggagactcgaagtttgcctgaatcgtaaaatgcaatccttctagggctggaaccgcgtctcagtgtcgagcctgctttctactgccttaaccacggtcatctttgccagtggtttaccttggcacctgggccccgagtaccttcgtcatcaaataatatttatgtcgcaagaccgctgtacccggtgact

SEQ ID NO: 11548 - DNA, 1064 bp, Artificial sequence
  DNA replication origin
aaaagccgctttgtgaccgccgcctccgcccttggccctttggtctggcgcgacccgtccgggcatggcaggctccgcggcgtcccggggcctctttgttcggccggaggagagtggctgcactgggagcgggagacgtggcccggggtggggcgagggctgcgcgtgtcactgcggagccggatacggggagggcgcggcggtggcgggttcgcctccagatccgggcgggcgtggggtaggccggacagccaggcacgggtggtaacgatctggttccagagcttctcggagctccggggtgggcgcgggacagccactgggtgcagctacactcttgtgctcgacggccgggacccgagcctcagacaaaatggcctcggcgcccgcgcctgactgaaggcgcggcgcgaacccgtgattgcggcgcggagagggggcgcagcgggcgtgctcgggcgcacacagccgcgtgcgcggggcggcggccctctggggcattccgcgagctgcacccctgcccgggccagagtggggttctgctaggtgagaacttcggccgtccgccccgccctcctcccaggctccacctggtaattcgagctgttccggatttatcgccccacctcgggctcgtgataatgggaacaagtctagtcttgtcctttctctgggccagtcgtcgagaaatggcctggttcggagcgtcttggaaactgacagggctactgttagttacactgacgcgaaggacttcccgtccgggcaccagcatacatttcccctgccaattttggaagggccctggatggcgccttttaatcggggactgtttagaactatccctgagctctgtggtgtaatatgttgttgcctcctgttggtttgtggcagcagtagccaaccagagacggaattctgagggttttttatcttctgtccgcggagccccctaccagtccacgagtattaagttatttacactacgattggaactgttgacctgcccgacatctagatcctgaggcagtgcttcctgttactcagtcagttgaaaactagaa

SEQ ID NO: 11549 - DNA, 1092 bp, Artificial sequence
  DNA replication origin
ggacgctgccgccgccgaagaggaggaggagggggcccggtgggtgccgcggagagggggtacgcgcaggacgtcggcgtcgctgccacagcctcttttcctcctgggaccaaatggctgctgctgacgacactattcttggcttccgcgccgccctcctaatcctcgttgcagccgccgccgccctgagcccgaaggtcgcttgccgcgtggggacggtgcgacggcgcgagaccccgcagccatcggcgtgcggcggcggcgcgggagctggagaggggccgtgtcacgtgaccccactgtttaccgttccgggggccgcggcctgcgtcgctgccgcgcctgcgcgctttagggcctcgagcgccgcgcctccgtggggccccgggctgcagcgcttcccggcgttgccgcgcccctccctgtcttcggaggacgcggcaccgcctgcgggcttctagctcacacctccgcgccgccgggaggggcgaatcagaggagcgctttttctcgaccgtagtaagcactaaggcttcacagttaatataatattgatgcgcagctccccaaccccaggtactttttattaattgactgtgagttcaagaatggtagaataggatggagtagatgagccctctgcccaaatatctgtgctggctcggcacagcagccttaccattaactacctccgttaccctcaccctacatggctgatctacctcaggactcaaattgctacctccaagaaacattcttggtatccagtaagcagtcttcagaatgtggtcccaggtttccctgaggggtcgccaagacctttcagtagagcctccattcctttgccaggagcatgtgtctaaggccaaattttcttcccacccttcaaccaaaacagcatatagcagctgattcaatgcagaaacagataagagaatccagccatcttctattaagccagacattgaggaaatctgcagaaattttagatatcacccttttattaatttggaaaatatgcttttcataaatacattatttgtggtaacaaatattgtgtagaggtccagagacaaaaaaagtttgagaccc

SEQ ID NO: 11550 - DNA, 819 bp, Artificial sequence
  DNA replication origin
gaggagcccctctgcccggctgcccagtctgggaagtgagcagcgcctcttcccggccgccatgccctctaggaagtgaggagcgtctctgcctggccgcccatcgtctgagatgtggggagtgcctctgccccaccagcccatctgggatgtgaggagcacctctgcctgggagccaccccgtctgagaagtgaggagcccctccgcccggcagcctcaccgtctgggaagtgaggagcgtctctgcccggcagccgccccatccgggaggtggagggcagctcccgcccagccagccgccccgtccgggagggaggtgggggccagcccccccgtccgggaggtggggggcacctccgcccagccgctgccccgtccgggaggttgggggggcgcctcttccaggccgccccttctgggaagtgaggagcccctctgcctggcggccatcccatctgggaggtgtgcccaacagctcattgagaatgggccatgatgacgatggcggttttgtcaaatagaaaagggggaaatgtggggaaaagatacagaaatcagattgttgctgtgtctgtgtagaaagaagtagccataggagactccattttgttctgtactaagaaaaattcttctgccttgggatgctgttgatctatgaccttacccccaacctggtgctctctgaaacatgtgctgtgtccactcagggttaaatggattaagggcggtgcaagatgtgctttgttaaacagatgctttaaggcagcatgctccttgagtcatcaccactgcctaatctcaagtacccagggacacaa

SEQ ID NO: 11551 - DNA, 947 bp, Artificial sequence
  DNA replication origin
caatctgatttctgtatcttttccccacatttcccccttttctatttgacaaaaccgccatcgtcatcatggcccattctcaatgagctgttgggcacacctcccagatgggatggccgccaggcagaggggctcctcacttcccagaaggggcggcctggaagaggcgcccccccaacctcccggacggggcagcggctgggcggaggtgccccccacctcccggacgggggggctggcccccacctccctcccggacggggcggctggctgggcgggagctgccctccacctcccggatggggcggctgccgggcagagacgctcctcacttcccagacggtgaggctgccgggcggaggggctcctcacttctcagacggggtggctcccaggcagaggtgctcctcacatcccagatgggctggtggggcagaggcactccccacatctcagacgatgggcggccaggcagagacgctcctcacttcctagagggcatggcggccgggaagaggcgctgctcacttcccagactgggcagccgggcagaggggctcctcacatcccagacgatgggcggccaggcagagacgctcctcacttcccagatggggtggcggccgggcagaggctgcaatcttggcactttgggaggccaaggcaggcggctgggaggtggaggttgtagctagccgagatcacgccactgcactccagcctgggcaacattgagcactgagtgaacgagactccttctgcaatcccggcacctcgggaggccgaggctggcagattactcgcggttaggagctggagaccagcccagccaacacagcgaaaccccatctccaccaaaaaaatacgaaaactagttaggcgtggcggtgcgcgcctgcaatcgcaggcactcggcaggctgaggcaggagaatcaggcagggaggc

SEQ ID NO: 11552 - DNA, 1025 bp, Artificial sequence
  DNA replication origin
cgttttgaagttcttgtgtgctggagatatggctgggatttctctcgcagcagaggcaagtaattgcaactcttctttattattgtgcaccttgaaggtgaggttaattaagtcctgttgtggggtttcagggccagaatccaatttttggagatttatttaatgtcgggagcagattgggtaataaaatgcatattgagactaagacggccttctaacctttcagggtctagggctgtaaagcatctcagggttgctgccaaacaagccatgaactgggctgggtttttatatttgatgaaaaagagcctaaatgctaactgatttgggagaggtcggataaagaaaaaggagcattaaccttgactatgcttttagctccagtcacttccttaagaggaaccgttgggcaggtgggagaaggctagtctcggaatgaaactgtaagccgaatggggtgtggggagaggaggtgatagaagggtgggggagagaaggctgaggaagatttggagcctgattcagcctggaggggagtgacctggggcagtctggggaggaggggagaggtcagatgggctggtagaaaatgaagattggaaagactcagcaatgcttgggattgggacttaggggacaggcgggagggaaagaaggaagatttgggatgagttgcattgggaacagagactagggagggatcaatatgtaaaggaatgtctggacgtcaggcatctcagaccgtttgcccattttatgacaaaaataatctagatcttgtagtatggaaaaatagaaagtgccattttctggctatttggaaccattgtcaagtttgtactggggtcaagtggcattgcagaagaaaataaggcatttaggttttaggtcaggtttgagttgaagaggttttaagtttttgagagcacagactaagggagaagaaggaggaatggagggtggaaggttgcccatagtgaaggaggcaagcccagagaaaagagagggtagagacacagagagaa

SEQ ID NO: 11553 - DNA, 1060 bp, Artificial sequence
  DNA replication origin
tgcattgggaacagagactagggagggatcaatatgtaaaggaatgtctggacgtcaggcatctcagaccgtttgcccattttatgacaaaaataatctagatcttgtagtatggaaaaatagaaagtgccattttctggctatttggaaccattgtcaagtttgtactggggtcaagtggcattgcagaagaaaataaggcatttaggttttaggtcaggtttgagttgaagaggttttaagtttttgagagcacagactaagggagaagaaggaggaatggagggtggaaggttgcccatagtgaaggaggcaagcccagagaaaagagagggtagagacacagagagaaggggtgtgggggggggggtgcttgccccccgggaaagtggtgcttgccactaagggtgaaggatcaaggcaggcatacccacggtgatcagacacctctgaaacgtgggtgaataatcaagcaggtgtccccgcagtgattaaacgccaagggaagactgtcttcctgagtctgtgattggaaccggaattttggtttcacggataaaacgcatctcctctgtctctaccagaaaaggaaaggaattgaaattaagagaagtgagagattgaaggatggcgccatgattgaaagtagaaagaggttgagggatagtgacagaggttggataagagagtaaaaagaggccgcttacttgatttaaaattggtgagatgttccttgggctggttggtctgaggactggaggtcgtaggtggatctttctcatggaccaaagagcaagaggacagggaattgatctcccaagggaggtctcctgatctgagtcacggcaccaaatgtcacgtgcgtccaggtgaagagcccaccaaacaggctttgtgtgagcaataaagctgtttatttcccctgggtgcaggcaagctgagtctgaaaagagagtctgaaaagagtgtcagcaaagcgagataggggtagggccgttttataggatttgggtggatagtggaaaattatagtcaaatgggatttttctcttgcaggcag

SEQ ID NO: 11554 - DNA, 865 bp, Artificial sequence
  DNA replication origin
gagggaggaaagaggaaagagggaaggaaggaacgaaggaaagaaagaagggaaaaagaaagagaaacagaaagaagaaagaaggaagggagggagggataggggagggcaggaagaggaaggaagggagggaggaaaagggagggaggaaggaaggaaggaagggggaaagagaaacagaaagaaagaagaaaaggaaggaaggagagaaaaagagaaagaaagaagaaaacaaaagaaaaaagaaagaaagaaagaaagaaaaaagaaaagcaggaaaacacattattattaggattctccagagaaacagaaacaaatatatatatataatataataataattatatataatattacatattatatatataataaaaatgtatatatatagagagagagggagagacagagagagagacagagaaagagaggtttattataggaattgtctcataggattatggaggccaaaaatttcagaatatgctatctgcaaggtggagaaccaggaaagcctgtggtgtacttcagaccaaatcccaaggcctgagaacttggggggccactggtgtaagtctggaaatccaaaatcctgagaacctggagctctgatgtctaagggcaggagaagatggatggatgtcctagctccagaagactgtaaatctgcttctccttcccctttttgtttcagctaagccctcaatgaattggataatgcccactcgaattggtgagggaaaatctctttactcagtttactgatttaaatgctaatctcttctggaaattccctcacagacacacccagaaataatgtttcgccaactatctgagttttccttaatccaggcaagctcat

SEQ ID NO: 11555 - DNA, 1614 bp, Artificial sequence
  DNA replication origin
ttttcatgagtttatgtctttcaccaaatagactgtaaatttcttagaaattgagactcaagttttattcatcttccaaccccgtccccaccctattccaaacctgtacctacctctgcacacagaaagttatccaaaaagactttggagatttgattttttgataataattgtaagcaacatgtgtgaaaaagattttgtgtgcaagttactggctgggcactgaggacatacatattaataaacacagatccttcccttaagaagttacagttagtgatgaaaacaggaacgtaaagagacggttacagttaataagcaaaaaagtacatagaaggcagaaccaatcagactaggggacccagggaggtcactcacaagaaatgatacctgaattggtttgtgaagacattggacgattaaatgttaggtgggtgactgggggagggaagggggagaacgttttcaaaaaagaacaaggagtttgtgtaatggtacagaaggtggtgttagagcacttaccttgttgagaaaggagccaatgtttggtggagaggggtgggcagccgagattcaggggtagagcagtagacagcctaggttcaggaggagagggagtaggaagccgacattcaggggtggaagggtgaacagcctaggttcagtggaggaggggtgggcagcctagtttcagtggactgaggaggatagccttggttcaaggaagagcggggtgggcaccctaagttcagagatagaggggactggaagcctacgttcaggggtacaaggatgggcagcctaggttcatggagagaagggtgggcaaaacaggctaagggagagagaggtgggcagcctgcgtccagggaattgaggtagccagccttggttcagcgggagagggttgggcagcctagggaaagggatggggtgggcattctaggttcagtggtagatgggtgtgttttctaggttccagaggggaggtagtgggcatcttagattcaggagagtcatgtagcctgggttcaggggaagagaggaatgtgcagcctcagtttaaggaggagatagacagcctaggttcaagggatagggtttgggcaaactttgttcatagatagagtggttgggcagcctaggttcagggggatatggggttgggcagcttaggttcagggggagaggggcgagaggccaaggttcagggaaagagagggatagatagcataggttcagtgggagatgggtggggagcccaggatctagggagtggggtgggcagcctgggttcggggggatatagggtgggaaacctacgttcaggggctagtaggtgagcagcctaggttcagggaaagagagggtgtgacagcctaagttcagggggataggagtgggcagcccaagttcagcagtagaggagtgagctgccccaagatgcaaaactcatgagaactagagatgtaagaatcgtaagacctgtgtttgctttgctagggagtttgtactttttcctaacagttatagaaagctgtaaaaattatttaaatcagagaaaagtacaaggaattattgtttttaaaaatataaccttaaggtagtgatggg

SEQ ID NO: 11556 - DNA, 1237 bp, Artificial sequence
  DNA replication origin
cgtggtgatgtcactgcgtccgcacgcgccccgcccctgagcagtccttgctgccccgcccccgctcggctcgccgccaggggacgctagtgggtccagtctccttggcaaccacttgctcctccccctccgcccctttaacctttagggtgcgcgggtgcagtatatctcgcgctctctcccctttccccctcccctttccccaccccgggcgctcaggttggtctggaccggaagcgaagatggcgacttctggcgcggcctcggcggagctggtgatcggctggtgcatattcggcctcttactactggtaggggaggcgcttggagttttccccatgtttggactgggggaggaagggaggggcaggccctgcagttggcctctccgggccccggagaccctcttcgccccgccccgcttttagcttggactgtggagggctccttagtgttgggggcttgggcgggcggcgggggcaggggggtgtcgatttccggtctcttttgctgtcatttcaccgatgacgtctagggttgcagggtcctttttggaagctcttgccgtcatcgctgacttgggcaatggggccggtggggtttgggggcggaagagaccctcggggttgagaagtatgtggtggcctttcgtcccctgtaaaacattgtcacacggtgtggggcggcagcgctggatctttgcaagttaagtaggcgctggcgttgtttacttgtcaccttctctgtatgttttttccctcattttccctacccttggggctagtgagtctccaacctctgtgcccattgtgtgattctgccttgatgacgtgagttgctcgttctgacttccaggtgtcacattctcttctaatctttttttgattggtgtagatacctgtggagggcggagctgtagccctctttattaccagtatcggagtatatactactacctgtctgacctcaggtgctttcttttccaacgatcttatttctgcatattcagtgagcaaagtgtagatagaaatgtctcagagtggcctggctattacttccctgttcatattaaaaccctttggtttatttgggagttcaatttatttcctttcataacttctctaccttctcaaatcttctcttttctcatcgtccgaggctgtagttactttctgttctcacgtattttgacctttttgcattgcaaaacaaaaacctccagttctggaaatcaggc

SEQ ID NO: 11557 - DNA, 1087 bp, Artificial sequence
  DNA replication origin
cctccctcagagcgctccgcaccgccgtccccaccgaccttcaacggggccggggccaggctccgaccgccagcagtcgggtgaggggccgcggcgggcgaacggcggacgaagaggaggccgcttccttcctggcccctgggcaagagggacggagggaggggtcgtgggtgtcgggagccgggggagccagaggggacagtaagggggttacctctcgcccggctcggcctcttcccccgcctgtcgaacggaggagctcgttgtccagctgcaagaagacggcccgacccgggtcagcaccatcccgccccgggccccctcacatcgccatcacagcaaccgcaaacaccgcaaccgcggagccggttcgtcaccgcggctcggctactggcccagcgcggccagcgagcatgcgcagtcgccccagtcccgagggagcccgggccagccggctatacctgcgatcaacaggtccccggccgcacggccccgcccccggcctctctcacctcctcctcccgcctcttccctcccctctctgaggctaggccccgccccttcaagctccgtgccccgcccttcaggagcttcaactgcccctccagctccagcgccaactgagatttcgagagatttgtcctccctaccaggctcccgttcccaagttcccgcgagaacgggaggtttgcgtcaataaaaggcgcgcgtcaagaaaaggggctcgcttgtgggtttaagggatggaacttggaggtggttgaagagtagtgaacaagaagagggcaaaaacacggagttcgagaactttagccgtttttctcacaatgttgtttctccttttctctctttagctcctccgtgcagtcccgggtagagagcccggtccctgcgctagtcgatttgtgcagtaggaaaggaggctgcaggggatctgcgccggggcaggacagatgcctttcgggacccagtgtttgcatcttgggagatgtgggtgctgatctggttgtttcttggtttatgacgccaaaaagggcgggagggggctgatgaagtgaagcctttcgctaatacattccgttaacag

SEQ ID NO: 11558 - DNA, 1012 bp, Artificial sequence
  DNA replication origin
atacattttaaaaaagaaattctgttaaatttcatttaagattagttcttggacagctacacctaatggaggacaagaaaatttccaaattttaagtgtatgtttgtaggtcaacctttaacaagtcttaacccattatagtttcatttagtctgtactcaagttgctttcccaggcatgccaggtaaacataattcttaaaaattaaagctttaatcagtaagtgtaaccgatttgttgctactgtcactcttttgatgatacttccaccaaccggtaaagaaagaagaaatgttattaaactggaagatgaactagaaacattgagtggatacctagcttaggcagaaagcagcaaggactagaagggtatgtcacaaagaagtcttcagagatttaataaaaagtaaaacaaatggaatgaagttaagaggcttgacttatacaaatgggggggggagggtggaagagttttggaggggaaaaaattaagattagagactcactgggtgcagaatggaaaaggacgtgaggataggggccattagacagaaagcgatgaagcagggtaccagaggaaagagaaggcagtgagggtttccgaagctaagatggggcatggaatgaactccaatgcaaagcgatgctaaagcaaaacacaatcggcaactaacaaaaagggaaccaggaggaagtaccgaaaggaggtggatgagaggaaaataaaaccaaggaagaaattatggaggtaacaagagtgagaaacctggtcggccagggtaaggagctccggacagggaagagccaggcaagggatggaagcacagagatacgctgcttcccaaggagggaccacccgggcaaaaagacacgtgggaggcgcgggatgaaaaagcagaaccacgaaagcgggtaaaggagggacagagcgacgaagatggagcaggggtgaagggcaaacacgctaggcgcgaggttcaggaagaacgggtcgagggacgcgcgcaggggc

SEQ ID NO: 11559 - DNA, 1117 bp, Artificial sequence
  DNA replication origin
ctattctcgcgctgctgtgaagaaatactcgagaatgggtaatttacaaagaaaagaggtttaattcacagtgctgcatggctggggaggcctcagaaaacttacaatcatggcagaagttgaaagggaagaaagcatcttcttcacaggcatcagtgagaggtgacaacatgctagcagccctcggttgctctcggcgcctccttggcctcggcctccgctctggcctcgctcgaggagcccttcagcccacctctgcgctgtgggggctcctctctggggctgaccaaggccggagccggctccctctgctagcagggaggtatggagggagaggccccggcaggagccggggctgcgcacggcgctcgggggccaccgcgggttttcagtgggtgtgggctcggtgggccctgcacagggcgccgggcacctgctgggcttggtcgggggtaggagctccctctgggctgccggagtgcccaggataggtgcctcaaaatcccgctgagagcgccagcgagaggtgaagctgactgggcttttcggaggggtggggcttggagaacttttctgtctaggctaaaggattgtaaagacaccaatcagcacttggtgtttaactaaaggtttttaaatgcaccaatcagcactctgtcaaaacggaccaatgagcactctgtaagatggaccaatcagctctctgtaaaatggaccaatcagcaggatgtgggtggggccaaataagtgaataaaagcaggccacccgacccagcagcgacagcgttgtgctttctctctttgcagtcagttttggtgctgggcactctttgggtccgtgtgacgtttaagagctgtaaggccagtttgcagcttcattcgtgaagccagcgagatcacgaacccaccaggaggaatgaacaaccgtgctgcctttaagagctgtaacactcactgttagagtccatggcttcatatttcaagtcagccagaccaagaacccaccaattccggacataccgggaaggagaatacgccccaagaaccgaaactgccagacgcttataaaaccatcagatcttggccgggtgcagtggcttatgcctgtaatcccagc

SEQ ID NO: 11560 - DNA, 929 bp, Artificial sequence
  DNA replication origin
gtccattttacagagagctgattggtccatcttacagagtgctcattggtccgttttgacagagtgctgattggtgcatttaaaaacctttagttaaacaccaagtgctgattggtgtctttacaatcctttagcctagacagaaaagttctccaagccccacccctccgaaaagcccagtcagcttcacctctcgctggcgctctcagcgggattttgaggcacctatcctgggcactccggcagcccagagggagctcctacccccgaccaagcccagcaggtgcccggcgccctgtgcagggcccaccgagcccacacccactgaaaacccgcggtggcccccgagcgccgtgcgcagccccggctcctgccggggcctctccctccatacctccctgctagcagagggagccggctccggccttggtcagccccagagaggagcccccacagcgcagaggtgggctgaagggctcctcgagcgaggccagagcggaggccgaggccaaggaggcgccgagagcaaccgagggctgctagcatgttgtcacctctcactgatgcctgtgaagaagatgctttcttccctttcaacttctgccatgattgtaagttttctgaggcctccccagccatgcagcactgtgaattaaacctcttttctttgtaaattacccattctcgagtatttcttcacagcagcgcgagaatagagtaacacactgtgctttcactagcatttattactctaataacatttggcaggatcatctcaaatttgagcagcaaaataccagtccaaagcaacacatgcatcaactccaagcagagttaaatttaaatttgtccatcctggctaacacagtgaaaccctgtctctactaaaaatacaaaaaattagcggggcgtggtggcaggtgcctgta

SEQ ID NO: 11561 - DNA, 951 bp, Artificial sequence
  DNA replication origin
gcagggggggagccagggaaagagacaaggcccagcaagagggtgttagggtggacagtggcgaggtcactggagagaaggggtggatgaatgatgaattccgttattggatgtgggaagaggaggacccttggtgagtatgggagaaagaccgctggaagcagaatggtctgagcaaagttaggtttctggacgggcatggtagctaacacctataatctcggcactttgggaggctgaggcaggtgaatcacctgaggtcaggagttcaagaccagcctggccaacatggtgaaaccccgtctctactacaaatacaaaaattagctgggcgtggtggcaaatgcctataatcccagctactcaggaggctgagacatgagaatcacttgaaccaggaggtggaggttgcagtgagccgagattgcacctctgcactccagcctgggagacacagggagactgtttcaaaaaaaaaaaaaaaattaggtttctaatggagcagagggggagagatttgatctgggaaaggcttggggaggttctgtcttggctggacagggatttgaaaggatgttgtgatgatgagtggccaggaggtatgggttaggaagaggaagggtgcaatggccactgaggtcccctccaactcgagggttgtgtgattttgacaagttctgattctaaggactgaggttgtgtaaggcggtgcacctggttatacttgtcttctgtcggcagccaactcctcctcgcctacggcctatcaccagctttccagctggtggtagtttctattcaatggaggcttaaaagccctgacttttgtggcgagtgggtggacagtgggggtggggagcatgactaggaggcaggagggccaggagacaactcttaagaaatgcggcagcaaatgagtaggaaagacagatggtggcagtttcaaggggt

SEQ ID NO: 11562 - DNA, 868 bp, Artificial sequence
  DNA replication origin
agattctgacaccacctggagttggtgcagaccccacaggttagagggcacagtctccaacaagactgcccttatttcacatgccccccacgcgctggagagtcccaggccacctgcacttctgatcaactgactacactggatgtttcccacaatctcctcaggtttgctaatttgctagaatgactcacagaactcaggagagtgctgtaattatacaaattatcattgtaatcagtgttataaagaatacaagtcaggaccagccaaatgaagtgacacacaggccagcagagccaggtggaaggagcaggctgggagcatacaggtcttctgtgccttttcctcatacaggtgaagtctaggaaagcttagttttctggtctggagtcctgtggaccagggtgtgtcgaagccctggggatggatgtgctcccacagggagactctgtggcagcctcggattgcatcctgggggcaggcatttaaagtgactgcagggggggagccagggaaagagacaaggcccagcaagagggtgttagggtggacagtggcgaggtcactggagagaaggggtggatgaatgatgaattccgttattggatgtgggaagaggaggacccttggtgagtatgggagaaagaccgctggaagcagaatggtctgagcaaagttaggtttctggacgggcatggtagctaacacctataatctcggcactttgggaggctgaggcaggtgaatcacctgaggtcaggagttcaagaccagcctggccaacatggtgaaaccccgtctctactacaaatacaaaaattagctgggcgtggtggcaaatgcctataatcccagctactcaggaggc

SEQ ID NO: 11563 - DNA, 960 bp, Artificial sequence
  DNA replication origin
tacagccgcccggtgcagaaagcggagctgacccgcctggccaacacgttccgccaggtggcgcagctgcactggatcctggtggaggacgcggcggcgcgcagcgagctggtgagccgcttcctggcgcgggccgggctgcccagcactcacctgcacgtgcccacgccgcggcgctacaagcggcccgggctgccgcgcgccactgagcagcgcaacgcgggcctcgcctggctgcgccagaggcaccagcaccagcgcgcgcagcccggcgtgctcttcttcgctgacgacgacaacacctatagtctggagctcttccaggaggtaaaggccagcctgccccgctgggtgggcgagggcgggagtgggcctccgggccggccgggctgcagtcacacgccccttgcactccgggtgcacttttgagttctcagttctccgtgcgcgcattcggggcaccgagtggagccgctccttgctggcactccgcagcctccgctggccgtgggggtggaggggctgtgtgtgagaggatcactgtggcttaaggggcgggagtctgccctggggcttttctgtgtggagattgtgtcaagagaatagcacaggtgtgaggcgcgggaatgatttccaggggccaggctcctgacgacctgaggatggagcttagacctgcaggcgctggctgcgataggagatcagggagggacctgcaccgtagcgggtggcggtggaggggtgggggtggtggggacgggtaggctaggtgttactcgaggcttttcagtgcctacaggtgtgattctcagtctaggaccatatagggagaaaggtggagatagcctagagagaaatttgactattgcggcccactggcacggaaatggttgttagaagaaacactgacttctatggaggtccttcctctctttcccacacctcacaaaagtcttttct

SEQ ID NO: 11564 - DNA, 1258 bp, Artificial sequence
  DNA replication origin
gtggaagccgagaagcggcacccggtgcgcctcgccgctccagtccggcggtgctgcgggcacaagggctccagccgcgggcccccaggacgctctctgggacgccttcgagggcgggcggcggcgctgggggctttccttcctcacattcccgccggggtggcgaggagcgggtggagacgctgggggttgtgtcccggctgtgttcgcgcgccgcagcggaagcctgctctcagtcccttgctcttgtcttctcagaacctctccggatccagcagcaagatcccaaagcaaggaaagaaagaaaaagcgagggggcgggggcgctgcagaatccagcgtcctcccaagtcctcctgtgggaagacagcagcgctgctactggtggagaggggctgcgagagggaggcgcggagggaccccttggctctccgccgggtctggcgctaacggccccgcgagcaagctcgggaggcggccgctgcaccgcgggtggaggagcgggaggagcgtccccgcggggctgcacgacctcctggagggggtgatgctcgttcacctctcttcagctttgtgaaataccgcaaggtctttggagatgagccaggaaaatccattcacgtgcggaaatttgccgggctacgcgcgttgctgctgatgcctagggttcggagtgaaaggaggggagaaagcgaagggattcctcctcctgctcccagctgctgcgttgatgtgctggggtgtatcgaacagcggcaacaaaaagcgctttcactgcaaggcagacatcaataggagcccacggagatggaggggtgctgcacataggtgtttggcatgtgagacagtccataagaaagaatcaattcggagggctgctgcctgactgcagtttgatcatggcgggtgggggcgggtggaattcctaaaactccagccgagcatgtttaacttatttttcttcagtaatttggagtcacggtccctcccagttcttcgctgtcaccggaattactccgtttggctctcccaaggctcctgtcaagaaggcctaagaagtagaatggccttcattttcaggataaggaagctgaggttcagggtttaaaatgatttctctgaggtcagtggcaagtggcatatggaaatagaacgtgggtctcctgcgtgtgtctatagctagtggcgtcctcactgcatggcctgcagaaatcccacccaacacagccgggccggtttggccttcctacatataaag

SEQ ID NO: 11565 - DNA, 933 bp, Artificial sequence
  DNA replication origin
aggtgggggggtcagccccccgcccggccagccgccccgtccgggaggtgaggggcgcctctgcccggccgcccctactgggaagtgaggagcccctctgcctggccagccgccccatctgggaaggatgtgggggggttagccccccgcctggccagccgccccatctgggaggtgaggggcgcctctgcccggccgcccctactgggaagagaggagcccctctgcccggccagccaccccatccgggagggaggtgggggggtcagccccccacccagccagccgccccatccgggagggaggcggggaggtcagccccccgcccggccagccgccgcgtccaggaggggggcgggggggtcagccccccgcccggccagccaccccatccaggaggtgaggggcgcctctgcccagccgcccctactgggaagtgaggagcccctctgcccggccaccaccccgtctgggaggtgtactcaacagctcattgagaacgggccatgatgacaatggcggttttgtggaatagaaaggggggaaaggtggggaaaagattgagaaatcggatggttgccgtgtctgtgtagaaagaggtagacatgggagacttttcattttgttctgtactaagaaaaattcttctgccttgggatcctgttgatctgtgaccttacccccaaccttgtgctctctgaaacatgtgctgtgtccactcagggttgaatggattaagggtggtgcaagatgtgctttgttaaacagatgcttgaaggcagcatgctcgttaagagtcatcaccactccctaatctcaagtacccagggacacaaacactgcggaaggccgcagggtcctctgcctaggaaaaccagagacctttgttcacttatctgctgaccttccctccactattgtcctgtgaccctg

SEQ ID NO: 11566 - DNA, 1199 bp, Artificial sequence
  DNA replication origin
gctgacccccccacctccctcccggatggggtggctggccgggcagaggggctcctctcttcccagtaggggcggccgggcagaggcgcccctcacctcccagatggggcggctggccaggcggggggctaacccccccacatccttcccagatggggcggctggccaggcagaggggctcctcacttcccagtaggggcggccgggcagaggcgcccctcacctcccggacggggcggctggccgggcggggggctgacccccccacctccttcccggacggggcggctggccgggcagagggactcctcacttcccagtaggagcggccgggcagaggcacccctcacctcccggacgggcaggtggccgggcagggggatgatccccccacctccctcccggatggagcggctggctgggcagggggctaacccccccacctcccttccggacggggtggctggccaggcggggggctgacccccacctccctcccagacggggtggctgccaggcggagacgctcctcacttctcagagggtgtggctgccgggcggaggggctcctcacttctcagacggggcagttgccaggcagagggtctcctcacttctcagacggggcggccgggcagagacgctcctcacatcccagacggggcagcagggcagaggcgctccccacatctcagacaatgggtggcctggcagagacgctcctcacttcctagatgggatggcggccgggcagagacgctcctcactttccagactgggcagccaggcagagaggctcctcacatcccagacgatgggcagccaggcagagacgctcctcacttcccagacggggtggcggccgggcagaggctgcaatctcggcactttgcggggccaaggcaggcagctgggaagtggaggttgtagcgagccgagatcacgccactgcactccagcctgggtaccattgagcactgagtgaacgcgactccgtctgccatcccggcacctcgggaggccgaggctggcggatcactcgcggttaggagctggagaccagcccggccaacacagcgaaaccccgtctccaccaaaaaaatacgaaaaccagtcaggcgtggcggcgcgcgcttgcaatcgcaggcactcggcaggctgaggcaggagaatcaggcagggaggttgcagtgagccga

SEQ ID NO: 11567 - DNA, 1042 bp, Artificial sequence
  DNA replication origin
caactcagaaatacattgctaattggctgcctttactctattattgtacaccttgaaggcgaggttaattaagtcctgttgtggggtttgagggctggaatttaatttttggagttttatttaatgtcaggagcagattgggtaataaaatgtatattgagaataagactgccttttgaccttttagggtctaggactgtctcagggttgctgccgaacgagccatgaactgggctgggtttttcatatttgatgaaaaagagcctaaatgctaactgattttgggagaggtcagataaagaaaaaggagtattaaccttgactatgcctttagctccagccatctttttaagaggaaattgctgggcaggtgcgggagggctagtcgcagaacaaaactgtaagccggacaggctgtgaggaggggaggtaataaaaggattatagggtgggggagcagaggctgaggaagagttgggacctggctcggcctggcgaggggcagcctggggaggaggggagaagtcagatgggtctgtagaaaaggaagattagaaagactcagcgacgcttggggttgggactcagaggacaggtgggagggaaagaaggaggatttgggatgagtcacattgggaacagagactagggagggaacaatgtgtaaaagaatgcctggacatcaggcacctcagaccgtttgcctattttacgataagaattatctagatcttgtaggatggaaaaatcaaaagtgctgttttctggctatttggaaccactgttttgtttgtattggggtcaagcggcattgtagaagaaaataaggcatttaggtttaggtcaggtgtgagttgaagaggttttaagttactgagaacacaggctaagggagaagaaggaggaatggagggtggaaggctgcccatagtgaaggaggcaagcccagagaaaaaagagagtagagacatggagagaaggtgtggggagtgcttgcccccccaggaaagtggagaagggatagggacacggagagaagggg

SEQ ID NO: 11568 - DNA, 1179 bp, Artificial sequence
  DNA replication origin
gggggaggcaccgtgggtgggcgaggaccgcggggccccacggccgaggacattttcgtggcctgcccgccccctctgctcgctctctggctctcacctttcggatgcacgcccagcagctgcgcccctgcttccccctcacagcggagccctagcggcggcggcaggaggaggagcagcggcggcggcggcagcagcagcagcagcagagccggggagagcgagaacccagtctttcatggttgtttgcatccacccagccccggatgctgcctttgttttggtcgccctagcgaagctcggggccgcccggccgcctcccgcagcccagcctcggccggcgggggcgggcaggcggaggcgcggcgggagaggcgagggggcgagggctcgcgccaggctccgccgatccgggcgtctccggcggggcgcggggcgggggcggggctggggctggggctggggctgggactggggcggccgctgccgccgtggaggctgctcccaggctctgctgcctccaatttggggctgcgggagggagagggagagtttgggtgtcagttaggcggagtctcagaggcttccatccagggtgatgccgctgctctcgcagacatagctgccagccactcagtcccggcgccgctccgcccacgggcacccacccgcccactccccgggtccgagccacgcgtgccccggccgctacccctacagtcgccaacgtgcacagcacctcgctctatccccaggtacccctcacccatgagtcatcctccctcttctggtccctcgcctatgtcatcctccccagccctattttgcatgggtcgcattaatcatcatcatcctcgctaccatcttcatcatagagcattaatattatttgagcaaccacaatgttctgaacagcagaatggaacaccctgtggatacattttctttttcctccctgccaccgtgtctttcttatttactagttaagtgttcacagccacaacaatgtgattttttggatgcttttgatacacacacacacacacacacacacacacacacacacacacacatcctccaacagcctggattttctgggtatattgtactcatcaatgcagtgtctttcttgacccgtcctcgctaggactgttctgcagtgtatcaagatgccccaca

SEQ ID NO: 11569 - DNA, 1177 bp, Artificial sequence
  DNA replication origin
cctggatggaagcctctgagactccgcctaactgacacccaaactctccctctccctcccgcagccccaaattggaggcagcagagcctgggagcagcctccacggcggcagcggccgccccagtcccagccccagccccagccccagccccgcccccgccccgcgccccgccggagacgcccggatcggcggagcctggcgcgagccctcgccccctcgcctctcccgccgcgcctccgcctgcccgcccccgccggccgaggctgggctgcgggaggcggccgggcggccccgagcttcgctagggcgaccaaaacaaaggcagcatccggggctgggtggatgcaaacaaccatgaaagactgggttctcgctctccccggctctgctgctgctgctgctgccgccgccgccgctgctcctcctcctgccgccgccgctagggctccgctgtgagggggaagcaggggcgcagctgctgggcgtgcatccgaaaggtgagagccagagagcgagcagagggggcgggcaggccacgaaaatgtcctcggccgtggggccccgcggtcctcgcccacccacggtgcctccccccatgcaagagctgcccgacctgagccacctgaccgaagaggagaggaacattatcatggcagtgatggaccggcagaaggaagaggaggaaaaagaagaagccatgctcaagtaagccagccccagccgcgccatccatgcctccgtgcctccatccgtccattcaccactcactcccctagtcctcgcggctgagtgtggggaaggggctgccagggtgctgggtgcggacggaggcgcccgccttgggccaggggcgcggggcttgagcagggaagaggtcaggggaccggaggagggaggggatatgccacagatccaggaacccaaaggccgggggaggatgacttgagactggggtgcagaggagggatgggtggacgggggccacgctcgtggtgggaagtgcagaagctgagaggtgctgatcccacccaagtggaaggtccctgggctgggagcaggttagggggcaggggatgagtagaaacaaggggaggcaggatgaagaggtgctgaggacagctcctcttctcttcttggagttgtttagctggtcggggttaccccagtgaaggctgc

SEQ ID NO: 11570 - DNA, 1584 bp, Artificial sequence
  DNA replication origin
cggggtctctccagcacgttgtacaggtagttctgcacccgccggtacttgacgttgcgccggcagctctggctactcgtgtaagagagcggcttccccagcaggctcatccgggccccctgcttgccccggcggctctccctcaggccaccgccgccgccaccgagcgtggccgcgcgggtgcccagcagtagcaggccgtcgcccctggcggctgccgagttcagcagcaccctgccccggccggactccacatccttcatgccgctgcccaagcgccccccgcccgccgccgccgccgctgcgccgctcttcacccagagcccggcggcgccgccctcctctcctcccgcgtggtggcggggcatggcatcaccacgggcaccgcgagggggccgccagcgcctgcggcgggggcagcggcctcatgtgcgccggcgggtttcaaggaggaagccggcggccgacggggcgcccgccagccagagacctctgagccgggggcggggaagcaggcagccagcaaaccgcccgggcttcggggcgggaaaggaggggctgcagaggaggccgaggagtcccaatttctaacagcctttagcttcgaattctaaatccggacctgtttggggcgtcactttgagagggtttctcttgctccctcattcccgcgactaccactccctccttcccaaactgcccccggggatagagtgggggagtgcggggcgctccgaggcgcgctcccacgcgcgcacacccagccccaggcttccccttccctctctccactccccacgccctgcagcgaaacggccccagaagcccctctccgaggcgcgagttcggtttggttctggcaggggctttgcagctgtccggaaggtgaagtcagccttgtgtcctgaggagaaactggagatgcaggtcgctgtgccctcccgctgctacgtcgctgcgccggatcctgccatccttccgcaaggggtgagagcgggaacagccctgccctgccttccaggtattatctagcctggaggctggagcgcaaggtaacgctccgggaagtggcactcgggtccccgcacacgggcgagtcctcagcagttcagtggacagacccgcaggacgcggctgccaagtccgcgaggcaaggaccaggcatcttcccgcgcctcactccagcctgcggactgtgactttccatcccagtatcagacaagctcgcgagtaactgaacatcctttccagtccatgggtggggtgtggaaagggcgtaaaactccaaagtggctcctccgcggtgagcgagctgccccggggctctgcctgactgcagcgcgaagcctgggagaacaaacccagttccctccgtcaagaaatttccatttaagtccgagaaagtcatatgattgagaagttcagcagcggcggcgaggacccagtgtctgggaaagaacacctggaggatggggtgtccaggacgccggcttttcggggttccgaccccacccaccttatgttgtaacatacaagcttagagacctgttgcaaggaacaactgactgggtcttccaccacccc

SEQ ID NO: 11571 - DNA, 1315 bp, Artificial sequence
  DNA replication origin
atgccatgccccgccaccacgcgggaggagaggagggcggcgccgccgggctctgggtgaagagcggcgcagcggcggcggcggcgggcggggggcgcttgggcagcggcatgaaggatgtggagtccggccggggcagggtgctgctgaactcggcagccgccaggggcgacggcctgctactgctgggcacccgcgcggccacgctcggtggcggcggcggtggcctgagggagagccgccggggcaagcagggggcccggatgagcctgctggggaagccgctctcttacacgagtagccagagctgccggcgcaacgtcaagtaccggcgggtgcagaactacctgtacaacgtgctggagagaccccgcggctgggcgttcatctaccacgctttcgtgtgagtacccgcgccccctgctatgcccgctgcaggggaccactgtccctggccccctggggcgtgctccgcgctcgcgcccttgggcccccgcgcgcgtgcacacgtggtggcttttatttcttcgcacgtgttcgtggtcttccttctggagcctctcccctcccccagccccacttctctcatctctacagcttgaaccttttccccgaggacacccaatgaactgcccggtagcttcaggctcccggggcgagagccaggcagacgcgggacttaggctgcgcggataattgggagcaattaggtcccaagatacgtaaacttcaaccgaacggggcgcccgggagctagggaatgcaaagggaggacaggcgcccgtgtgaggcttgagagtatactggagaggttaggaggtgatggcggggtaggacggggagaagtgagggggcatcgagggctaggtcctcagtcctaggggcggagtaggggaagctgctacttggagagagctgctaggttttaagcgcgcccggaaacacgcctcgccaccacccagccaccaccaacggaaaatctgtcagtgcatgtagcccttcctgccacggagaaggtggccaaggtctagaggaggccagcaggccaggcgaagcaacgctcccgcgctgcagggggcggggaggcagcggggaacctggggcgcaggaacgcgggcggaggtgcgatagcagaagcgcaaatgggtcgcctctgacagagatcgggcagtgggttaagtccccgtttgtggcgcggagtcaaagagtgtgtgtgtgtgtgtgtgtgtgtgtgtgtgtgtgtagtaagccttctccatctagcagagaatgcttaatgagaaaatgattggaagcaaatgtttatttttccctt

SEQ ID NO: 11572 - DNA, 931 bp, Artificial sequence
  DNA replication origin
ctccctgaagcgtggtgggtgcaggggcgaggcgagcagagagaggccaggcaggatgaaccaccgggggccaggacctgttgctatggtgacagcgtgaaaacaaactgtacactcacatatacacaagcgtaagcgtcttcattcgtgccaggaaacatgcaaaattaaacgcctcgtttcctcgagcgggagctaccgaagcaaagttgggtgggaggtcaggccttgcagggtccaagtgatcctccgagctggatctgagcgcctcagcgagaaggtccccaaatcctcctgggaggcgttggagaaaggcttgagtgtgcagaaaagggctgaggaagaggaggaaggggaaacaggaaggagtccactgtgtcaggcttaggattcacaatttctggggggcagcggcagctctgcacaggccgcccgggggcgggggcggtgggagctcagggcgcctgtcccggcaccaccacagattcccagaaccaactccccggtgaccagactgaagaactaacagaactgacgatacttccatccttgctgggtggtgtcagaggaagggaaccagcgcacctggcatggagggcggcggcaacggtagtggcagctgggtaggtgaacgcagcatgggtgatggctggggtcagctctgtggtgtacaaaggataagggcccaggcctctgggcatgcaggcatcagagcagcccccatcaggtcataggggtcccgagcgatgaagtaagtgtgctcctaggtggggtgcatgttggtgggatttggagttgccattagcttgctcttggccatcttggtgttggctttggcaaactctagcctcatgatctgtgggttttcgggatctaagcgaatatcgttcagcgcatttttggccgcttctgctcctgccccgctgtcaaa

SEQ ID NO: 11573 - DNA, 926 bp, Artificial sequence
  DNA replication origin
cttccgcagtgtttgtgtacctgggtacttgagattagggagtggtgatgactcttaaccagcatgctgccttcaagcatctgtttaacaaagcacatcttgcaccgcccttaatccatttaaccctgagtggacacagcacatgtttcagagagcaccgggttgggggtaaggtcatagatcaacagcatcccaaggcagaagaatttttcttagtacagaacaaaatggagtctcctatgtctacttctttctacacagacacagcaacaatctgatttctctgtcttttccccacatttgccccttttctattcgacaaaaccgccatcgtcatcatggcccgttctcaatgagctgtttgttgggtacacctctcagacggggtggcggccgggcagaggggctcctcacttcccagaaggggcggccgggcagagacgctcctcacctcccagacagggtcgcggccgggcagaggcgctcctcacatcccagacggggcggcggggcagaggtgctccccacatctcagacgatgggcggccgggcagagacgctcctcacttcctagacgggatggcggcagggaagaggcgctcctcacttcccagactgggcagccgggcagaggggctcctcacatcccagacgatgggcggccaggcagagacgctcctcacctcccagacggggtggcggccgggcagaggctgcaatctcggcactttgggaggccaaggcaggcggctgggaggtggaggttgtagcgagccgagatcacaccactgcactccagcctgggcaacaatgagtactgagtgaacgagactccatctgcaatcccggcaccttgggaggcggaggctggcagatcactcgcggttaccagctcggccaacacagcgaaaccccgtctccaccaa

SEQ ID NO: 11574 - DNA, 1147 bp, Artificial sequence
  DNA replication origin
tcacctcccggacggggcggctggccgggcggggggctgaccaccccacctccctcctggacggggcatctggctgggcggggggctgacccccccccacctccctcccggacggggcggctggccgggcagcagggctcctcacttcccagtaggggcggccgggcagaggctcccctcacctcccggacgggttggctggccgggcggggggctgacccccccacctccctcccggacggggcggctggccaggcggggtgctgacccccccacctccctcccggacggggcggctggccgggcgcggggctgacccccccacctccctcccggacggggcggctgccgggcggagacgctcctcacttcccagacggggtggctgccgggcagaggggctcctcacttctcagacggggcggctgccgggcggaggggctcctcacttctcagacggggcggctgggcagagacgctcctcaccttccagacggggtcggggccaggcagaggcgctcctcacatcccagacggggcggcggggcagaggcgctccccacatctcagacgatgggcggccgggcagagacgctcctcacttcccagatgggatggctgccgggaagaggcgctcctcacttcctagatgggatggcggccgggcagagacgctcctcactttccagactgggcatccaggcagagggtctcctcacttcccagacgatgggcggccaggcagagacgctcctcacttcccagacggggtggcggccgggcctaatgttaatgttaaaatgctacttaactattgaaatgcaagtttttcaccagctgaatataaaatcccattgcaataagacattttatttagacataaaatttcacaagaacacaacctggagcagaatagctgtctattgaaagaagcagccaggcgctgtggctcatacttgaaatcccagcactttgggaggccgaggcaggcagatcacttgaggtcaggagctcgagagcagcctggccaacatggtgagacaccggctctactaaaaatacaaaactagcccagcatgatggtggatgcctgtagtccccgctactcaggaggctaaggcatgcttgaacccgggaggcagaggct

SEQ ID NO: 11575 - DNA, 1068 bp, Artificial sequence
  DNA replication origin
ggccagccgccccgtccgggagggaggtgggggggtcagcaccccgcctggccagccgccccgtccgggagggaggtgggggggtcagccccccgcccggccagccaacccgtccgggaggtgaggggagcctctgcccggccgcccctactgggaagtgaggagccctgctgcccggccagccgccccgtccgggagggaggtgggggggggtcagccccccgcccagccagatgccccgtccaggagggaggtggggtggtcagccccccgcccggccagccgccccgtccgggaggtgaggggcgcctctgcccagccgcccctactgagaagtgaggagcccctctgcccggccagccgctccgtccgggagggaggtgggggggtcagccccctgcccggccagccgccccgtccgggaggtgaggggcgcctctgcccggccgcccctactgggaagtgaggagcccctctgcccggccaccaccccgtctgggaggtgtacccaacagctcattgagaacgggctgggatgacaatggcggttttgtggaatagaaaggggggaaaggtggggaaaagattgagaaatcggatggttgccgtgtctgtgtagaaagaagtagacatgggagacttttcattttgttctgtactaagatacattcttctgccttgggatcctgttgatcggtgaccttacccccaaccctgtgctctctgaaacatgtgctgtgtccactcagggttaaatggattaagggcggtgcaagatgtgctttgttaaacagatgcttgaaggcagcatgctcgttaagaatcatcaccactccctaatctcaagtacccagggacacaaacactgcggaacgccgcagggtcctctgcctaggaaaaccagagacctttgttcacttgtttatctgccgaccttccctccactattgtcctatgaccctgccaaatccccctctgtgagaaacacccaagaatgatcaataaaaaaaataaaaattaacaacaacaacaacaacaaaaaacattaacattagaggaaggctgggc

SEQ ID NO: 11576 - DNA, 934 bp, Artificial sequence
  DNA replication origin
cccgccccgcccggtccagccagctcggcccgggggcttcgggctgtcgggccggcgctcccttctctgccaggtggcgagtacacctgctcacgtaggcgtcatgaggtctccggttcgagacctggcccggaacgatggcgaggagagcacggaccgcacgcctcttctaccgggcgccccacgggccgaagccggtaagcggcggggtcgtccaggggcttcgagtgggcagcggtaccgggggcggcggtctctgggccggcatggcccgggtacccgcaccctgcgccggcgggaccggagctgctcaggcgcgaggggacattaagaggggagcccgttcagagtgccgctcagtcccgcctgcctcggtgcgcagaagcccctcgggaaccccgggggccgcgaccgtgatcgcggagccgagccggggcctcggcaggtgcagccccaccgggcgggggcgggggcgggggcgggggcgggggagcggcggtgcagccggcgctgagctggtggttattttgggtagtgctgagcaagggacccagtggaagaacgaactgggagagaatcatcaaatgaatgggctaaggtccgagcggaggaccccggtgtaagagcaaactggaggagaaacctgcagatcagtaggcagagggctgtccttccctgtcaccgctaggtttccgccactgcgtatccgccagcatgtgacctggtagcttcttaggcggggagggaagacaaaaaaggactggagttaacatttgtgagtatgcagagggcaactattgtataacccagctgatatcttgacattgtgcagtaagagactaaaaacatcgaggacattttttttccgtctggcagtctatgatttaagttaggaaaaggttcagttatcctcaagatacctatggagttctaa

SEQ ID NO: 11577 - DNA, 1046 bp, Artificial sequence
  DNA replication origin
cctccgggagggaggtggggggggtcagccccccgcccggccagccgccccgtccgggagggaggtgggggggtcagccccccgcccagccagccgcccggtctgggagggaggtgggggagtcagccccccgcccggccagctgccccatccgggaggtgaggggcgcctctgcccagccgcccctactgggaagtgaggagcccctctgcccggccagccgcctcgtccgggagggaggtgggggggtcagccccccggccggccagccgccccgtccgggagggaggtgggggggtcagccccccgcccggccagccgccccgtccgggagggaggtgggggggtcagccccccgcccggccagctgccccatccgggaggtgagggtcgcctctgcccagccgcccctactgggaagtgaggagcccctctgcccggccaccaccccgtctgggaggtatgcccaacagctcattaagaacgggccatgatgacaatggcggttttgtggaatagaaaggggggaaaggtggggaaaagattgagaaatcggatggttgccgtgtctgtgtagaaagaagtagacatgggagacttttcattttgttctatactaagaaaaattcttctgccttgggatcctgttgatcggtgaccttacccccaaccctgtgctctctgaaacatgtgctgtgtccactcagggttaaatggattaagggcggtgcaagatgtgctttgttaaacagatgcttgaaggcagcatgctcgttaagagtcgtcaccactccctaatctcaagtacccagggacacaaacactgcggaaggccgcagggtactctgcctaggaaaaccagagacctttgttcacttgtttatctgctgaccttccctccactattgtcctatgaccctgccaaatccccctctgtgagaaacacccaagaatgatcaataaaaaataaataaataaataaataaataaataaataaataaataaaacaaaataaaataaaaatggtaatggcggccaagcgcgg

SEQ ID NO: 11578 - DNA, 1370 bp, Artificial sequence
  DNA replication origin
tacctcccagacggggtggtggccgggcagaggggctcctcacttcccagtaggggcggctgggcagaggcgaccctcacctcccggatggggcagctggccgggcggggggctgacccccccacctccctcccggacggggcggctggccgggcggggggctgacccccccacctccctcccggacggggcggctggccggccggggggctgacccccccacctccctcccggacgaggcggctggccgggcagaggggctcctcacttcccagtaggggcggctgggcagaggcgcccctcacctcccggatggggcagctggccgggcggggggctgactcccccacctccctcccagaccgggcggctggctgggcggggggctgacccccccacctccctcccggacggggcggctggccgggcggggggctgaccccccccacctccctcccggagggggtggctgccgggcggagatgctcctcacttcccagacggggtggctgccgggcggagaggctcctcacttctcagacggggcggctgctgggcggaggggctcctcacttctcagacggggcggttgccaggcagagggtctcctcacttctcagacggggtggctgggcagagacgctcctcacctcccagacggggtcgcggccgggcagaggtgctcctcacatcccagacggggcggcggggcagaggcgctccccacatctcagacgatgggcggccgggcagagacgctcctcacttcccagatgggatggctgccaggaagaggcgctcctcacttcctagatgggatagcggccggacggagacgctcctcacttcccagactgggtagccaggcagaggggctcctcacttcccagacgatgggcggccaggcagagacgctcctcacttcccagacggggtggcggccgggcagaggatgcaatctcggcactttgggaggccaaggcaggcggctgggaggtggaggttgtagcgagccgagatcacgccaccgcactccagccggggcaccattgagcactgagtgaacgagactccgtctgcaatcccggcacctcgggaggcccaggctggcggatccctcgcggttaggagctggagaccggccaggccaacacagcgaaaccccgtctccaccaaaaaaaatacgaaaaccagtcaggcgtggcagcgcgtgcctgcaatcgcaggcactcggcaggctgaggcaggagaatcaggcagggaggttgcagtgagccgagatggcagcagtacagtccagcttcggctcggcatgagagggagaccgtggaaacagagggagagggagaccgtggggagacgggagaggg

SEQ ID NO: 11579 - DNA, 839 bp, Artificial sequence
  DNA replication origin
agatgtggggggcgcctctgccccgtctgggatgtgaggagcacctctgcccggccacgaccccatctgggaggtgaggagcatctctgcccggccgccccgtctgagaagtgaggagtccctccgcccggcagccgccccgtctgagaagtgaggagcccctccacccggcagccaccccatctgggaagtgagaagcgtctccgcccggcagccaccccatccgggagagaggtggggggtcagcccctgccaggccagctgccccatccgggagggaggtgggggtcagcccccgcccggccagccgccccgtctgggagggaggtggggggtcagcccccgcccggccagccgccccatccgggaggtgaggggcgcctctgcccggccgcccctactgggaagtgaggagcccctctgcccagccaccaccccatctgggaggtgtacccaacagctcattgagaacgggccatgatgacaatggcggttttgtggaatagaaaagggggaaaggtggggaaaagattgagaaatcggatggttgctgtgtctgtgtagaaagaagtagacataggagacttttcattttgttctgtactaagaaaacttcttctgccttgggatcctgttaatctatgaccttacccccaaccctgtgctctctgaaacatgtgctgtgtccactcagggttaaatggattgagggcggtgcaagatgtgctttgttaaacagatgcttgaaggcaacatgctccttaagagtcatcaccactccctaatctcaagtacccagggacacaaacactgcggaaggccgcagggtcctctgccta

SEQ ID NO: 11580 - DNA, 1197 bp, Artificial sequence
  DNA replication origin
ggatcccaaggcagaagaagttttcttagtacagaacaaaatgaaaagtctcctatgtctacttctttctacacagacacagcaaccatccgatttctcaatcttttccccacctttcccccttttctattccacaaaaccgccattgtcatcatggcccgttctcaatgagctgttgggtacacctcccagatggggtggtggctgggcagaggggctcctcacttcccagtaggggcggccgggcagaggcgcccctcacctcccggatggggcggctggccgggcgggggctgaccccccacctccctcccagacggggcggctggccgggcgggggctgacccccacctccctcccggatggggcagctggcctggcaggggctgaccccccacctctctcccggatggggtggctgccgggcggagacgcttctcacttcccagatggggtggctgccgggtggaggggctcctcacttctcagacggggcggctgccgggcggagggactcctcacttctcagacggggcggccgggcagagatgctcctcacctcccagatggggtcgtggccgggcagaggtgctcctcacatcccagacggggcagaggcgccccccacatctcagatgatgggcggccgggcagtgacgctcctcacttcctagatgggatggtggccgggcagagacgctcctcactttccagactgggcagccaggcacaggggctcctcacatcccagatgatgggcggccaggcagagacgctcctcacttcccagaagggaagagaggctgcaatctcggcactttgggaggccaaggcaggcggctgggaggtggaggttgtagcgagccgagatcacgccactgcactccagcctgggcaccattgagcactgagtgaacgagactctgtctgcaatcccggcacctcgggaggccgaggctggcggatcactcgcggttaggagctggagaccagcccggccaacacagcaaaaccctgtctccaccaaaaaaatacgaaaaccagtcaggcgtggtggcgcgcgcctgcaatcgcaggcactgggcaggctgaggcaggagaatcaggcagggaggttgcagtgagccgagatggcagcagtacagtccagcttcagcttggcctcagagggagaccgtggaaagagagggagaggga

SEQ ID NO: 11581 - DNA, 1448 bp, Artificial sequence
  DNA replication origin
cgcgtaggaccctcctcccgagcaacgccaactcccaccacagctccctcccctcacctcgatctcgcggatgttgttggaggtgacaaaaatgccaatgccgatgggaatgaagatgagaccgatgatgaagaaaataggtagcaccgtgccagccgtaaggatgggctgccaagctggcagccgttgctgtttgaaggccgtgttatccggtctccgagtcttcgcggtgccccccggagcacacgggggcccaccgtccacttcatccttcgcgttatagttcatcgccatcgatccctggggcgccgctccgcgatttgcaggtggaccacccagggggcccgccggctgaccctgacaggaaccgctcgagcgccgctgccgccgccgccgccgcagccaccagcgccaccgccacagccacctccgctgtagagcggaagaggcgggacactcttccgccaaaggctgctgacgggaagcgaaagtcggctggagacgccagagggagggagagagggaggagggagaagaaggagggacatggggaggggaaaggggaggaggatagaagcgggaacgaaaaggcggacgcaccctgatcatctgtcctgtgacgggctcagccattggatcgcgaatctgcgttcgcgcatgcgtggtcctagagctacggtgacacttcgcgtgcggtgtaggcgcatcttcgctctgttggccgtggctttagtaagcacacacctgcctgctactctggttatcgtggcgacggcaggtctggattgccagacaggtttttctttttacctcgaggctttctctgaagggagtcggagcatttaaaaggcggcctcaaggtggattgagtcgggggaggattagcagtatttgcttaggttgtaaaaccgcgactttatctaataaatcgccattcaaggtgcaaatacaaacttggaacagaggtgcgtgacatgtaccccttttgtcctaaagtcaagaatcaataatgtgacttagccctattatcttgcctctaattaagcgattctcacttattctttctctattgctaattctcacgttacatttccccttttctgtgtccacctttctcttttgcgcattgatataggaagtgttttgtaataggctgtagctttttctcttactgttataaaaaccaggacatatagcattactacaaaatgagatactccgtaaacactttaaaagtgccagctatttaatgacccaagaaaatactcgtgatataaaagttgactaagtcaggatattagagtagtgtagcgactatagaagtacaatatagagcgcaactaaaaagtgaaaatggtaactctgctgaccggatgaaggatttttttttctgtttctttgcacttttctgtattttccaaaatttctataataggcgttatgttatt

SEQ ID NO: 11582 - DNA, 838 bp, Artificial sequence
  DNA replication origin
ccccgcagccaccccgtccgggagggaggtgggggtcagccccccgcccggccagccgccccgtccgggagggaggtgggggggtctaccccccgcccggccagctgccccgtccgggagggaggtgggggggccagccccccgcccggccagccgccccgtccgggaggtgaggggcacctctgcccggctgcccctactgggaagtgaggagcccctctgcccggccagccgccccgtccgggagggaggtgggggggtcagtcccccgcccggccagccgccccgtcagggagggaggtgggggcgtcagccccccgcccggccagccgccccgtccgggagggaggtcgggggggtcagccccctgcccggccagccgccccgtccgggaggagaggggcgcctctgcccggccgcccctactgggaagtgaggagcccctctacccggccaccaccccgtctgggaggtgtacccaacagctcattgagaacgggccatgatgacaatggcggttttgtggaatagaagggggggaaaggtggggaaaagattgagaaatcggatggttgccgtgtctgtgtagaaagaagtagacatgggagacttcattttgttctgtactaagaaaaattcttttgccttgggatcctgttgatctgtgaccttatccccaaccctgtgctctctgaaacatgtgctgtgtccactcagggttaaatggattaagggcggtgcaagatgtgctttgttaaacagatgcttgaaggcagcatgctcgttaagagtcatcaccactccctaatctcaagtacccagggacacaaacaccgcg

SEQ ID NO: 11583 - DNA, 1172 bp, Artificial sequence
  DNA replication origin
agtaggggcggccgggcagaggcgcccctctcctcccggacggggcggctggccgggcagggggctgacccccccgacctccctcccggacggggcggctggccgggcggggggctgacgcccccacctccctccctgacggggcggctggccgggcgggggactgacccccccacctccctcccggacggggcggctggccgggcagaggggctcctcacttcccagtaggggcagccgggcagaggtgcccctcacctcccggacggggcggctggccgggcggggggctggcccccccacctccctcccggacggggcagctggccgggcggggggtagacccccccacctccctcccggacggggcggctggccgggcggggggctgacccccacctccctcccggacggggtggctgcggggcggagacgctcctcacttcccagacggggtggctgctgggcggaggggctcctcacttctgggacggggcggctgccgggtggaggggctcctcacttctcagacggggcggccgggcagagacgctcctcacctcccagatggggcggcggagcagaggcgctccccacagctcagacaatgggtggccgggcagagacgctcctcacttcctagatgggatggcggccgggaagaggcgctcctcacttcctagatgggatggtggccgggcagagacgctcctcactttccagactgggcagccaggcagaggggctcctcacgtcccagacgatggatggccaggcagagacgctcctcacttcccagacggggtggcggcctggcagaggctgcactctcggcactttgggaggccaaggcaggcggctgggaggtggaggttgtagcgagccaagatcacgccactgcactccagcctgggcaccattgagcactgagtgaaccagactccgtctgcaatcccggcacctcgggaggccgaggctggcggatccctcgcggttaggagctggagaccagcccggccaacacagcgaaaccccgtctccaccaaaaaaatacgaaaaccagtcaggtgtggcagcgcgcgcctgcaatcgcaggcactcggcaggctgaggcaggagaatcaggcagggaggttgcagtgagccgagatggcagcagtacagtccagcct

SEQ ID NO: 11584 - DNA, 1079 bp, Artificial sequence
  DNA replication origin
gatgcattcacgcctgggcggggtgggcggacggccgtagcggcggcggctgcagaacgagctaggggcctgggggcgcctgacggtcgcagagacctcgccgctccggcgcggcgggtgcggccattttacggcctgggacgaagggaggcgtgtttgtgtgctcgctttcattctcctttcttgggaacccacggctgggggaagtttctcaggcagcctgggtgggcggtggatggggagtcgtgggccgagaggaaccgggcccgggaagcgccgtcgtcgtcgtcgccggtcgcgttcccccggagaggcctgagaagctcgggccgcgggcctcgctgcccgccagcccgcggacaggcccgggcgcgcctggcctgcctttgtataggcccgtctgaacgtgggagcgcagcccgcctgacggctgagcccgaggcccgcaaccctgcggcgtctaccctcctccggcgcggcccctcatcccggcgagcacggcggcggtgtgggccatggattaagaaggaggcggcgtgggaggaggaagatggcggccggcaagagcggcggtagcgcaggggagattacttttctggaaggtacgtctgtttctgcccttgacggggagaagggagggtatactggaaaacgtggcccccagaaccccggatattcagttatctgcgctgggtgggtttcgggggcggtgaagtacgagggatgagcgatgacggggagggagtgtgctgcgagcgcacctggttcgagtccgcctaggcgaggggctcggctgcgagccggttcggcccagggggcgcgggtggattgagctacgagccagagttggtgggcgtcctttgagagtgcgcgctgaagtctttgacatttaaaaaattttggggtggtggcctaaggatgagagcagccagcattcacatcttgtctggtgttcatgaaaagtttcaaattgctaaggttgggtgcaactggggaccaatctaagtagggaggggacagacagtttcattgaggtgtgttttataccctctggtctgtttctcagagtttcaggcttg

SEQ ID NO: 11585 - DNA, 1061 bp, Artificial sequence
  DNA replication origin
agctgctcgaggaggcccgggagcaaggccgggccagggaacgcgagaccccggcgccgacgccccgcagtgggtctctgggacactcaccggtgcgggagcgaaggcaggtgcgcggcggcggggctacctgtacgggtgaagctggagggcgcggtgagaagtgatgagggccagtgaagagggcgacgacgcggacgggcaccaggacagggcggcgacagcggccgggctgaggctggcttcctgctcggacagatcccgagtcggtctccgcccgccggccggcgccccgccgagtccccggcactgcggcgtgcacgtcacggctacggagcgcccgaaggggcgggggcgccggggccgcggcaggccgtcgggcgcgcgctccgggagggagggcgcgctccgggagagggcgcgcgacccccggggtcgccccgcccgcggcgcagagcctctggggcgagggtaggcgccctgcagcgcagagaggggctgcccctggacaagccgggagttcttgttcttcccatggcgaaacggcctcttttgccgcggtagttgtttccagtcccggcaaagcaggtcctgtccggctggatactgtgactgtgcagtctaccaacagcgagaatcagttcaagcagggagaaagttgttcggagaaggggcgaggagtccggggctccgcgcgggggacccaggaaccaggtgtccgcgcttgggcggcagcgaggctgcgtggcggttgcggcaagaaccactgctcactcggccccggatcgggccggcttggactgggctgccctgcataggggggaaccttcccgcacaactaagttgccattcggtctttggaggagggggcttgggatgggaatttcgcacccctttgcctcttcccgctcctaccctcgccgacgcatttactttatttagagcccctaccttctcagtcgtttaaatgttactgtttttattagtgacatacctgtgagtcaccttttaaaatatgaagtacctatgcaaatttgaattatatggtaaaaacacatcac

SEQ ID NO: 11586 - DNA, 1263 bp, Artificial sequence
  DNA replication origin
tgggcacacctcccagatggggtggtggctgggcagaggggctcctcacttcccagtaggggaggccgggcagaggcgcccctcacctcccgggtggggcggctggccaggcagggggctgacccccccacctccctcccgggcggggcggctggccgggcggggggctgacccccccacctccctcccggagggggcggctggccgggcagaggggctcctcacttcccagtaggggcagccgggcagaggggctcctcacttcccagtaggggtggccgggtagaggcacccctcacctcccggacggggcggctggccggatggggggctgacccccccacctccctcccggacggggcggctggccgggcggggggctgatgcccccacctccctcccggacagggcggctggcggggcagggggctgacccccccacctccctcccagatggggcggctgccaggcggagatgctcctcacttcccagactgggtggctgccgggcggagaggctcctcacttctcagacagggcggctgccgggcggaggggctccttacttctcagacggggcggttgccgggcagagggtctcctaacttctcagacggggcggccgggcagagatgctcctcacctcccagacggggtcgcagccgggcagaggtgctcctcacatcccagacggggcggcagggcagagtcactccccatatctcagacgatgggcggccgggcagagatgctcctcacttcctagatgtgatggcggccgggaagaggtgctcctcacttcctaggtgggatggcggccgggcggagacactcctcactttccagactgggcagccaggcagaggggctcctcacatcccagacgatgggcggccaggcagagacgctcctcacttcccagacggggtggcagccgggcagaggctgctatctcagcactgtgggaggccaaggcaggcggctgggaggtggaggttgtagcgagccgagatcacaccactgcactccagcctgggcaccattgagcactgagtgaacgagactccatctgcaatcccggcacctcgggaggccgaggctggcggatcacttgcggttaggggctggagaccggcctggccaacacagcgaaaccctgtctccaccaaaaccagtcaggcatggcggcgcgagcctgcaatcgcaggcactcggcaggctgagtcaggagaatcaggcagggaggctgcagtgagccgagat

SEQ ID NO: 11587 - DNA, 929 bp, Artificial sequence
  DNA replication origin
tgggaagtgaggagcatctccgcctggcagccgccccatctgggagggaggtgggggggtcagccccctgccccgccagccgccctgtccgggagggaggtgggggcatcagccccccgcccggccagccgccccgtccgggagggaggtgggggggtcagccccccatccggccagccgccccgtccgggaggtgaggggtgcctctacccggccacccctactgggaagtgaggagcccctctgcccggctgcccctactgggaagtgaggagcccctctgcccggccagccgccccctccgggagggaggtgggggggtcagccccccgcccggccagccgccccgcccgggagggaggtgggggggtcagccccctgcctggccagccgccccacccgggaggtgaggggcgcctctgcccggcctcccctactgggaagtgaggagcccctctgcccagccaccaccccatctgggaggtgtgcccaacagctcattgagaactggccaggatgacaatggcggctttgtggaatagaaaggtgggaaaggtggggaaaagattgagaaatcggatggttgccgtgtctgtgtagaaagaagtagacatgggagacttttcattttgttctgtactaagaaaacttcttctgccatgggatcctgttgatctgtgaccttacccccaaccctgtgctctctgaaacatgtgctgtgtccactcagggttaaatggattaagggcggtgcaagatgtgctttgttaaacagatgcttgaaggcagcatgctccttaagagtcatcaccactccctaatctcaagtacccagggacacaaacactgcagaaggccgcagggtcctctgcctaggaaaaccagagacctttgttcacttgtttatctgctgaccttccctccactat

SEQ ID NO: 11588 - DNA, 1070 bp, Artificial sequence
  DNA replication origin
agggttgctgccaaacaagtcatgaagtgggctggatttttatatttgatgaaaaagagcctaaacgctatctgatttgggataaagaaaaagcattaaccttgactatgcctttggctccagccacctttttaagagtaaattgctgggcaggtgggggagggctagtcacggaacgaaactgtaagccccaccaggtgtgaggaggggaggcgataaaaagattatagggtggaggagtggaggctgaggaagaattgggacctagctcggcctggtgaggaggggagaggtcagatgggtctgtagaaaggaagattagaaagactcagcgacgcttggggttgggactgaggggacaggcaggagggaaagaaggaagatttgggatgagttgcactgggcacagagactaggaagggactgatgtgttaaagaatgcctggacatcaggcacctcagaccgtttgccttttctaagacaagaattatttagatcttgcaggatggaaaaattcaaagtgccattttctgactttggaactactgtcgagtttgtattggggtcaagcggcattgcagaagaaaataaggcatttaggttttaggtcaggtgtgagttgaagaggttttaagtttttgagaacacaggccaagggagtagaaggaggaatggagggtggaaggttgcctgtagtgaaggaagcaagcctagagaagagagagtagagaaatggagggaaggggttcgggggttcttacctgccagaaaagtgggaaaaggggttggggcgcagagataagaggtcggggcatggaaataagggatggggtgcagaaataaggagtcgaggcacggaaaggggtcgaggcatggaaataaggggtcgggacatggaaataagggattggggcacagagatatgaggtaggggtgcggaaataagggattgggggttcttgccccctagaaaagtgggacttgccactaagggtgaaagataaggggttgaggggtacttgcccctcccccagaaaagcgggacttgccgctaagggtgaaggagaag

SEQ ID NO: 11589 - DNA, 1106 bp, Artificial sequence
  DNA replication origin
gaggaagtagagctctgcgcgggagagagggacggggagacacacaggctgagcggtcgggcggcggggggcgggggaccgcgggcggaatcgcccggtgccagcggccccggcagccccccgacttacccgatcgcagctccgagaggcctttcctctcacaagacatgtttatgggtcacttcagggccgccgacgggacaccccgccgccgaggggaagcggggacggtgccgccgcctgccctatagctgtcagtgtgtgttcacgagccgagcttcggctccaccattcaagcaacggcggcggaggcggaggaggaggaggaggaaacaacaactctcaggcagcgactacggccgtggccgcctccgccgcggatccctccgccgcagaaaggagtccgccgccttcgcggcccagggctcggccccggctctggcccgcgcccccgccccccggcgctaaaaaaggagtgcctccgacccctcgtccccagcgctccgcacgcggcacagtgagacccccacccgctcctccccgcagggcgtgcgatttatttatttatttccagtcggagaagatgtcggagcccaagccgccggttggctggaaggcgctttctctgtggaggccgatagtggcagggagggggccggggacggttccgcggagggatctgacgcacacggagccgcagcacaggctctattcagcggcgctggctggagctgagatggaagttagtttctatgtagcagaaatatgaaacaaatgaagcaaaactgcccagagaggggaaatgccccaaggatgggtctcactcacgcgcgtacacagacacacacgcagagagcactctcacgctgggcaagctcgggatcgcgctacccttcccgagttgaatgatagtgtttggtttctgtctcttgccatgtgcatgtgtataaatgctgcggattggcatctgtgtaagtcttgtcctgcgttatttctgcagcctatgcaagtgttgtgtaatttattggagtgctgtatattgcaatagaggtttgggctgctttttgttaagcacttgcgttttgcaaacccgttatttgctgaag

SEQ ID NO: 11590 - DNA, 816 bp, Artificial sequence
  DNA replication origin
cggtcggccaatggagaccttctcccgcactcgccgtcccgccttccagttccactgaagccaataaaaagggccgtctggagacagaagccaatgggagctcgggtagagtcatcatgattggctgcggtctcttcgtagtgcagtctaggcctccgcctccgttaccctggagcccaggttaccgccgctgccacccaggagccccgatcctcgcctctgtcccatccttgtgttcaaacctcccgcatctcggcaacctcggcacccgcccggcagcctccgcaggaaccaggcacccgctctttggcggtcagacgccgaggccccagctgggagtttggtcctaagagggaaggcaaggaggcgggacgccgcatcggctctgctgaagagcctgcgggttggaggtgggctttgaagtgggcgtggagacggcgggggaggtggaggtgcgaggtgaggctgggttgaagcgtctggtagctagtgaaggggcgttcgtggatgggggcctgcgggtggttcttaaagcagggaagatgaagggattagggatgggggaggatgtagggaccgcgaggagaaggaagacctaggaaaatgagtaaagagctcggcttctgagagggtcccgaggaagggaggttgaccggcactggggggactgggaagttaggaggagaggagctgggaaagggtatttacttcctgggaccgagaagagaagaaagggagcaagcggatctagagaagtggttgttattaaaacaaacaaaacaaaaaccccggaggcccgtggagactcaagactag

SEQ ID NO: 11591 - DNA, 1768 bp, Artificial sequence
  DNA replication origin
ttcctctcactgggtaggtttgctcgggagtggctacctcccaggcaaaaattcggcctggttaaactggaaagaccaggaaagcccgcccacgggcgtccggggaacgcctgcaaagtgccagcaccctaccaacccaggcgccgcacgggtggggtcgcggccgcaggctcttccggggcgggcctagcctgacgcaggaggaggggcggcccccgtcgcacaagaaccaatcacgactgtcgcttctacgtggctagcattgaccaataggagaccgtagtgatagcgacggggaaattcaaacgtgtttgcggaaaggagtttgggttccatcttttcatttccccagcgcagctttctgtaggtaagttctgtcttaccggtgcaccggcgcactgaggaacagccgcagccggtgtaggggctcattgttagcgctggtcggtgaggggtggggcgaggtgggggcagctcggagccaggtatgcgacgcggctaaacgagctggagggggaggggatgtctcactgcctcagcgggtctggccggtggggtgatgcaggaggttttgttgaggaagtaagaagtgggtgtggcccacgctggaaagaaggggtggtggggtacctgcgcacaagatcgttttccaaaggacagtctctcttgttttgggggttagaactgggaaagaagcgggtggccgtgatctgacagttatctttcaaacctgacttaagaggtggagtgataccttgctgcaactttatgactttttttcattgttaaacctgaagacggggcagcattgttatcagtgacactgagttggtgtttgagagtcacaaagatacgattaacaataagactgcagacactttattgaacaaacaccaccaccatgcagataagcaagtgctcagtaccagtacaatagtttcttagtgttagattaaggtagcaaatcgtgattctgctagatatgcacaagaataaatctgcggatttcctaattatcagtaaagccccatcatgtttatattctgctttgaaagcacttgcactggaagatttactcaagtaaagcaggcgaataaaggaattgttattcccattgccaaacgaattctttatgtctatgtcactaccagaatccaagcaatctttatgtgtatgtcgctaccaaaatccaagcaaacactctatcatattttttttaagtgacactaaatttgcagatttctacagtgtgacgtcattgatgttatattgggggaaaaagtatacttggcctatgaaaccttggtgaataaattacaaagatgtgtaccttgttgttgtgcacttacctccattaatactagcctaataatagctgcatttagatgtgttcacaaaacgaatgctttagtcgtctgggttctaaaaagctagtgcatttttttctttgatgctagttaaagtaggagttatgactgttcagtttttttcttagaaatggaatccgaggatttaagtggcagagaattgacaattgattccataatgaacaaagtgagagacattaaaaataagtttaaaaatgaagaccttactgatgaactaagcttgaataaaatttctgctgatactacaggtgagtttttcttttcttttaagttagtaactgtttgttgggtatcctctaaggtaaagatatagtactaatcactttatttataatttactcatgtgtttattgtctttctcctccattagaatgcaggct

SEQ ID NO: 11592 - DNA, 1085 bp, Artificial sequence
  DNA replication origin
aatcccagcactttgggaggccagggtgggaggatcacttgaggccaagagttcaacaccatcctgggcaacataatgataatgagaacccatatctacaaaaactacaaaaattagcccagtgtggtggcacatacctgtcatcccagttactctggtggctgaggcaggaggataacttaaaccaggagtccaaggctacaatgaactgtgatcgcagcactgcactccctgggtgacagaatgagaccctttctcaaaaagaaaagaagagagaaagaaagaaagagcgagagagaggggagagggaagaagggagaggggagagaggagaggagagaggaagggaaagacaagaccctgtctcaaaaagaaagaagggaagggagggagggagggaaggaagaaaaggaagagagggagggagggagggagggagggagtgatgggatcctgtctcaagaaagaaaggaaaggagggagggaaaagctcattgtgctatgggaaaggaaggaaggaagggagggagggaggaaggaaggaagggaaagactcattgtgccatgggaaaggaaggaagaaaggaaggaaggagggagggagggagggagggacgagaccctgtcttaagaaagaaaggaagggagggaaagacttattgtgctatgggaaagaaaggcaggcaggcaggaaggaaggaaggaagagggggagggaggcagggagggagggaaagactcattgtgccttgggaagggaaggaaggaagggagggagggaggaagaacggaaggagattggaagggaaggactcattgtgccatgccccgtctttctttctgaccctcagattgttaatgaagctgccaagtatcgctatcgctctggggatctttttaactgtggaagcctcactatccggtccccttggggctgtgttggtcatggggctctctatcattctcagagtcctgaagcattttttgcccattgcccaggaatcaaggtatgttcatttatgtactttatttgatttctatttgatgtttccattttgattcattctatttaatatctatgctta

SEQ ID NO: 11593 - DNA, 1137 bp, Artificial sequence
  DNA replication origin
accttgaaggcgaggttaattaaatactgttgtggggtttgagggccggaatttaatttttggagttttatttaatgtcgggagcagattgggtaataaaatgtatattgagaaaaagatggccttttgaccttttagggtctagggctgtaaagtgtctcagggttgctgctgaacgagccatgaactgggctgggtttttatatttgatgaaaaagagcctaaatgctatctgatttgggataaagaaaaaggagcattaaccctgactatgtctttggctccagccacctttttaagagtaaattgctgggcaggtgggggagggctagtcagagaatgaaactgtaagtcccaccaggtgtgaggaggggaggggataaaaagattatagggtggaggagcggaggctgaggaagaattgggacctagctcggcctggcaaggaggggagaggtcagatgggtctgtagaaaaggaagattagaaagactcagcgacgcttggggttgggactgaggggacaggcgggagggaaagaaggaagatttgggatgagttgcactgggcacagagactaggaagggactgatgtgtaaaagaatgcctggatgtcaggcacctcagatcatttgcccattttatgacaagaattatttagatcttgtaggatggaaaaattgcaagtgccattttccggctatttggaactactgtcgagtttgtactggggtcaagcggcattgaagaaaataaggcatttaggttttaggtcaggtgtgagttgaagaggttttaagtttttgagaacacaggctaagggagaagaaggaggaatggaaggtggaatcttacccatagtgaaggaggcaagcccagagaaaagagtagagacatggagaaggagttgggggttcttgccctccagaaaagcagagaaggggttggggcatggaaataagggattggggcacagagataagaggtcagggtgtggaaataagggattggggtgcagagataagaggttggggtgtggaaataagcgattggggggttcttgccccctagggaagcgggacttgccgctaagggtgaaggagaaggggttgaggggtacttgcccctgccccagga

SEQ ID NO: 11594 - DNA, 1340 bp, Artificial sequence
  DNA replication origin
tctcagggttgctgccaaatgagccatgaactgggctggatttttatatttgatgaaaaagagcctaaacgcttctgatttgggataaagaaaaaggagcattaaccctgactatgcctttggctccagccacctttttaagagtaaattgctgggcaggtgggggagggctagtcacggaacgaaactgtaagccagaccagttgtgaggaggggaggtgataaaaagattatagggtggaagaattgggacctagctcagcctggcgaggaggggagaggtcagataggtttgtagaaaaggaatattagaaagactcagtgacgcttggggttgggactgaggggacaggcaggggggaaagaaggaagatttgggatgagttgcactgggcacagagactaggaagggactgatgtgtaaaagaatgcctggacatcaggcatctcagaccatttgcctattttacaagaattattcagatcttgtaggatggaaaaattgaaattgctgttttctggctatttggaactactgtcgagtttgtattggggtcaagcggcattgcagaagaaaataaggcatttaggttttaggtcaggtgtgagttgaacaggttttaagtttttgagaacacaggctaagggagaagaaggaggaatggaaggtggaagcttacccatagtgaaggaggcaagcccagagaaaagagtagagacacagagaaggggtggggggttcttgccctccagaaaagcacagaaggggttggggcatggaaataagggattggggcacagagataagaggtcagtgtgcggaaataagggattggggtgcagagatacgaggttggggcacagaaataagcgattggggcacagagataagaggatggggtgcagaaataagggattggggcacggaaataaggggtcggggcatggaaataaggggtcagggcacagaaataagggattggggtgcagagataagaggttggggcatggaaataagggattgtagtgcagagatataagaggttggggtgcagaagtaagggattggggcacagagatacgaggttggggtgcagaaataagggatggggaacagagataagaggtcggggtgcagaaattagggattggggcacagagataagaggttggggcacagaaataagggattgtggtgcagagataagaggttggggcatggaaataagggattgggggttcttgccccatagaaaagtgggacttgccgctaagggtgaaggagagggggttgaggggtacttgcccctctcccagaaaagcagagaaggagtagagac

SEQ ID NO: 11595 - DNA, 1193 bp, Artificial sequence
  DNA replication origin
gccgccgcgcgtcctcaccgcgctcctttccctttctttttaggactgaccagggccaagtggcgctcggcgggcactacatggcggagggtgaagggtacttcgccatgtctgaggacgagctggcctgcagcccctacatccccctaggcggcgacttcggcggcggcgacttcggcggcggcgacttcggcggcggcgacttcggcggtggcggcagcttcggtgggcattgcttggactattgcgaaagccctacggcgcactgcaatgtgctgaactgggagcaagtgcagcggctggacggcatcctgagcgagaccattccgattcacgggcgcggcaacttccccacgctcgagctgcagccgagcctgatcgtgaaggtggtgcggcggcgcctggccgagaagcgcattggcgtccgcgacgtgcgcctcaacggctcggcagccagccatgtcctgcaccaggacagcggcctgggctacaaggacctggacctcatcttctgcgccgacctgcgcggggaaggggagtttcagactgtgaaggacgtcgtgctggactgcctgttggacttcttacccgagggggtgaacaaagagaagatcacaccactcacgctcaaggtaacaccacccgagatgcacttgggtcctgacccagtctgggccgggtgtgacggggagcgggcagaggggcatcggttaaatgccatgaatctgtggccatcacgagtttgggcgcgcgttatttctttgatttttgattttttaaaccagtaaactgacgtgcgtggacggtgttgagtgtttcagtttacttgatgctttggcgctacaactcttctcccaggtcctcctctgccctctcttctcttctttctccttatgttttaactcttggctttccctgttggagtcttgtccagagtagattctgatacttggcagaatgaaatgatgtaaataatttttgagtcattatatttgagtctagcctttgggaaaataacagcctgaagcagaagtgagtcaatgagttttttattgtactggaaaaggtgaatagatttcacagcggcattcagctgactacgtgttaaaggtctatctggtggttcttcgtgctggttcatatgttaagggtatagtggcaccccctccccaccctccactttagttcaagac

SEQ ID NO: 11596 - DNA, 1370 bp, Artificial sequence
  DNA replication origin
ctgaagcttccatacaacctgccgtgcctttgctgctgccgcagtagattttcagctcatttctttctgctgctgcttcgcgctgctctgtcatgcctaaatctatctcgtcactgccaaaggtgcctgaatcagggtgaattccacgagattcaccagcggttttgctccagtccaaggtaaatacagtatgcaaaatgaggaaccacccaaggatgtcggggaggggggagagaaagggattccctcaccttttccggcacattcctcgttaatttccaccaggaggaggcgcgcagcccagctcccctagtctctcttcttaaatccccctacctacggctgccgaggttggccgcgcgtcgggaatctccccgacagtcctggccctcccccgccccccgggttggtttttcccagctgcggaggttgggaggttgggccaggggctggggtgcgaagagagtcggcgcccgcaacgcggagccgggaagtcgtcgctactctggtggaactcagagttggttctggaggcggcggacgcggaggtgagcagtgggagcccgcggcctgggagagacccgggaggcgtcgttggggcccctccccatcctcgggtggagagtagggttggttcgggttgccactgtaccccgagtcccactgctgctttgttcccagactctcccctcctctttggagatgacttgaacccctttgagatccgaggggctggcggggcgcgggctggggggcgacagttgtagctccacttcctgctaatgcgagaaggtacaaaaagagatcaaaaagtcctgtaacctgaaacttccctcgcatcctaaccgggacctggtggagaggtctgggcgggggcggagacacccggaggccgaccttccgccgaggcggtgcaggaaggaacgggagagggagaagtttggtagggaaggaattggggattaagcggtaagttagacgcgggagacgagtctcctcgggaaaggcggagggcgggaggccggtcgggtttatttagtgtgggccagggaagaaggaagactttgcggtctgggtgtcggatgcgcgtccccctccggagtaaaagtgaccggaggggttggggaggcgaggccggggcgggcttttggaaggaggtctctgggacagactggagacgactagactcgaaaaggccggtttttgcactccggaagccgcggcagccaccgctgttcacgcctctctcctgcttgtcccaggtccctcagaggatccagcgaggggcgccaacaagaggcgaagaggtggcaccagggcggcggcaggaagaggagcgggagcaggagcgcggagcggagcgtcccgac

SEQ ID NO: 11597 - DNA, 1042 bp, Artificial sequence
  DNA replication origin
gggatgccgaggtgcagaggcaccagcactgccctgccatcactctagtggatacggacccgattaggcgtccttcttccttctgcccacaccaaggccccccaggccgcggccgctcaccgggaaccttcccaggggagcggcggaggggcgaggccatggtgcggggacctgcaagagggccctgaccctgatagagaggggccgatgggcggccaggtgggcctgcgggtttaccttgttgaggtgagggttccgtgtcagcaggtagccgcgctgatgggtgtggcggcgacggggggcttcgggctccatggctggcgccgggttcggcggcggggtcaggccggggcgggccgcacgcgcggtgcaggcggcggatgctgctggggtgacggtgctgactgcagctgtggcggcggcggccgcactgggaaaggcccagcggctgggggcgggcgtgggtggcgagagggggtggacgcgtcgggaggggcccgagcgaagccggtgtccccagcagggcagcctgcgagaagcgctgagtcatggcaggagatcatccgagccggcgtgtgaggaggaggaggaagagcgagtcctggcagcgctgctggtggcggagcgggggtggcggccggagcccttggctccatagggcctctgcccaccatgggcttatgatcaccgctgtggtcgcctctctccatgtgggcatgcctaaacgcagtgcactgggtggctctgctgaccccagagacccagggcgggggcagggagcggggagcgtcaggccaggatccccctgcccgggaaggctggagaaagtgcgagaagatgccagaaggtgcgaacctgagcggttcaggcagagccggcggtcgctcagacacctagggggattacaggacggaaggactcgtgaggggtccccagaactgttgacagaacacctcgacaggctgaggagaatcagactcgtctctcctgtcttgttagcgtcttggaagccctctttctacagatccacaaccttcgccgt

SEQ ID NO: 11598 - DNA, 1634 bp, Artificial sequence
  DNA replication origin
cggcgctggcagaagaggcggcggcgggcgggtactggcttctggggccaggggccaggggcggtgggcgccgggaccgcggagctgaggagcggggcccggccagggctggagactttgcgcccgggggcaccggggctacgcgcggtcgcacacatccaccggcgcggcttccctcggcggcccgggctccgctcatcctgcggcgggcggcgccgctcaggggcggggtgagtacccgcggccgtactcggccccctccccgcgccagggtctcgcggggatccgcagaggataatcccagggtgcggagaagggcagcggccgagtgacagctccgcggagcgctccagggcgggcgggggactgggcttcgctgtcagcccggctcctctccaaagccaggaagggtgaggcgccccaagactccggcgcctccgcagagctcccgggcggcccctgcggcagggatttggaaccggggggaaggggcccgggcgatgggcctcggcgaggctttggagccggcggcgaggaaggaaggggaggcgagggcataacatggcgcaacgctaggataatctccttcgcgactgagggaggacgagccctttgctgcagcagcgcgaggaggaggagggaggcagccagggcttgggtatccgatgcattccccgaagcctgcgggctgctaggaggaaagtctgctgaggtgggagatgggcaccggtgggtgcggcgcccagggaataaccccaacgcacgttgtggctagtccagcacccgcgggtcaggttgcggggaaagtgctgattgacaggggggtccccagggggtgagtctggccctatgtgggggccgggggagaatggggacggtgtcacgatgctgcgactggagcccacgctggggttccgtgacggccctactcacggccaagactccctggaccgcatcgcaggagcggggcttggcgcgttgctggctccgagaggtggtgccagggtggggatggaggaggagagagccgccgcgcggctggaggaggcaaggcctgggtgcttggagggtagggtctgcggattaaagccggaccgtctccccttgtttcctgcagaagaggaggcggtagacgcgaccacagaagatgtcgggccaaacgctcacggatcggatcgccgccgctcagtacagcgttacaggctctgctgtagcaagagcggtctgcaaagccactactcatgaagtaatgggccccaagaaaaagcacctggactgtaagcatctctttatataagagggacatgcgcacggcagaggcgcctgggatgctggtggtgcggcctgcgctcttggtccataatgctgtggcctctgatactcccagccaggttgcccctgagctgaaattcttcagctgtgaaggtgttcccttgggttagccatgaaaccttgtcttgtgagccattttttcctcttattgacctccaaggtcttggtggagggggaaaaatacacacacacacacacacacacacgcatatgtatatacacacacacaagagagagattgtacacactgaattagatgtttttcacctttttttctttctccacccaccctcccttctcca

SEQ ID NO: 11599 - DNA, 917 bp, Artificial sequence
  DNA replication origin
aagcaatcctaggcgatctggtacacatgactaaatctctccttacaggattcttcccctatcaatttcatcactttactttgcaggagaaccatcattacaaggagattagagaaggtcactgatttttttttttccctcaggcgggcacggggattctctgccttcttaaaggggagcgtgtgctgtagacctgctgcttaatcgtgtccttcccggagataaagcagttgctcacctgaaaagccttggaaggcaaggcggtggggagggtggcgaggaggtggggagggtggcgaggaggtggggagggtggcgaggaggtggggagggggcgaggcggtggggaggggggcgaggcggtggggaggggggcgaggcggtggggaggcggggcgaggcggtggggaggcggggcgaggcggtgggttcgggggcgaggcggtggggttgggggggggagcactgctctagggaatgaatccgtgtttaaagcaaatattgcagagaccattctcatcaaaagaaagcagagccatcttttaagatctactaaaaccgcagatagtgaacaacttcttttctaagttgggaatgcttctgcccagagatttattgtcctcattatgttttgcttggatttcttaaaaaaaaataaaaataaaaaaaaaataaaaaaggagctcgagttacccaagcagccaccgtttcttgtgaaaaggaagcaacccagctccagaaaatgctctcaggcacagagaaaaacaaacctggcaaaacatgaaccacagacagcagctgcagcgtctcttgggagatattttagtttcatggaaagcctaattgaggcctaactcattcacatcccgagatgatgtccatttgaggtgggccattcttgataccacttaaaaaaa

SEQ ID NO: 11600 - DNA, 1215 bp, Artificial sequence
  DNA replication origin
ggggtccacactcttcccgtgggcgtcctcacaccccaattctcctcctcccaccccattctctagcccctctaaactaaagactgcccccaaacccaagcaagccctgccttgaccaaagctgcacgcgccccgcacccagcgcccgggctttgctccgccctgggcgccctgtcccgcccgtggttaccggctggctagccccggcccgcgggctcggccctggttccggctcctggctcctccgaggtgcgcgagcgccgccgccgccgccgcctcccaccgcccagggccgggcgagtagctcctagatccgaggtgcggcggagacgcgcgctcccgacccgcagcggaggcggcgcggggcgccggagcagggctgcagcgcgggagccgcctccccagcgcgagagccgcctccccagcgcgaggccgccttggccaagaggaggtgagctttgcagatccctttcctgctcactttgcccctccgagtccgggtcagagcctgagtcagagaattctttgccatcccgggctctgcagtgggtccctcgggtcaactttgggtaacaggaggagctcattagctgagcaagagggagtggggtatcatgaatcaaggcttatgaaaaatcggcagcattgagttcaagttcagtaaggccagagcccccccataatgtgctgcttaaattactacctcgattttagtttctcttcctgcccactggtccaggtgtcaaagggcagtcagacgttcaaacggggtcccaaagggctagcactgggccgggagtagtttcagcatagcagggctggctcatctcttcctcccttgagtccttattgcatgccaggcattgatctgggaatacaggtgcttggtgcttgcattctactaaagagacaggcataaacataacaaataactaaaatacatagtatgtgagatagtgatgaagtgcggtggacaaaaaagaagggaggaaatgggataatgtttggaggtagggggtgcatttttaaatgggatggtcaaagatggcttcacagtggagtaaagatctaaaggagatgagacagaaagaagtcacgctggtatctggagagaaagcacttgctgtgtggcaggcactgagatgttctttactgcactagtcatttcttttactactctccatatgccatattagacaggtattgccaccattt

SEQ ID NO: 11601 - DNA, 958 bp, Artificial sequence
  DNA replication origin
gaagtgaggagcccctctgccccgccagctgccccgtccgggagggaggggggggagtcagcccccggccggccagccgccccgtctgggagggaggtgggggggtcagccccccgccaggcgagacgccccatccgggagggaggtggggggtcagccccctgcccggccagccgccccgtccgggaggtgagtggcgcctctgcccggccacccttactgggaagtgaggagcccctctgcccggccagccgccccatccgggagggaggtgggggagtcagccccccgcccggccagccgccccgtccgggagggaggtgggggggtcagccccccgcccggccagccaccccgtccaggagggaggtgggagggtcagccccccgccggccagccgccccgtccgggaggtgaggggcgcctctgcccggccgcccctactgggaactgaggagcccctctgcccggccaccaccccgtctgggaggtgtacccaacagctcattgagaaggggccatgatgacattggcggttttgtggaatagaaaagggggaaaggtggggaaaagattgagaaatcggatggttgctgtgtctgtgtagaaagaagtagacatgggagacttttcattttgttctgtactaagaaaaattcttctgccttgggatcctgttgatctatgaccttacccccaaccctgtgctctctgaaacatgtgctgtgtccactcagggttaaatggattaagggcggtgcaagatgtgctttgttaaacagatgcttgaaggcagcatgctcgttaagagtcatcaccattccctaatctcaagtacccagggacacacacactctgcctaggaaaaccagagacctttgttcacttgtttatctgctgaccttccctccactattgtcctatgaccctgccaaatccccctctgcgagaaacaccc

SEQ ID NO: 11602 - DNA, 1299 bp, Artificial sequence
  DNA replication origin
gaccctcccacctccctcctggacggggtggctggccgggcggggggctgacccccccacctccctcccggacggggcggctggccgggcggggggctgactcccccacctccctcccggatggggcggctggccgggcagaggggctcctcacttcccagtaagggtggccgggcagaggcgccactcacctcccggacggggcggctggccgggcagggggctgaccccccacctccctcccggatggggcgtctcgcctggcggggggctgacccccccacctccctcccagacggggcggctggccggccgggggctgactcccccccctccctcccggacggggcagctggcggggcagaggggctcctcacttcccagtaggggcggccgggcagaggcgcccctcacctccctgacggggtggctggccgggtggggggctgaccccccacctcccttccggacggggtggctgccgggcggagacgctcctcagttcccagacggggtggcagctgggcggaggggctcctcacttctcagatggggcggttgccaggcggagggtctcctcacttctcagacggggcagccgggcagagacgctcctcacctcccagacggggcggcggggcagaggcgctccccacatctcagacgatgggcggctgggcagagacgctcctcacttcctaggtgggatggcggccgggcagagacgctcctcactttccagactgggcagccaggcagaggggctcctcacatcccagacgatgggcggccagacagagacgcacctcacttcccagacggggtagcggccgggcagaggctgcaatctcggcactttggggggccaaggcaggcggctgggaggtggaggttgtagccgagatcacgccactgcactccagcctgggcaccattgagcactgagttaacgagactccgtctgcaatcccggcacctcgggaggccgaggctggcggatcactcgcggttaggagctggagaccagcccggccaacacagcgaaaccccgtctccaccaaaaaaatacgaaaacccgtcaggcgtggcggcgcgcgcctgcaatcgcaggcactcggcaggctgaggcaggagaatcaggcagggaggttgcagtgagccgagatggcagcaggacagttcagagggagaccgtggaaagagggacagggacagggacagggagagggagagggcaagtattctattttttaaaaaaggaaagaaactaagttaaatgaaaacgtagaagtgccttgc

SEQ ID NO: 11603 - DNA, 1154 bp, Artificial sequence
  DNA replication origin
ttgggctgtcgatgggactgggtgccctggagcagggggcggcattcgtcagggaggctccggctgcacaggaacccacggagctgggggaaggctcaggcatggcgggctgcagtcctgaggcctgccccgtgggaaggcagctaaggccgggcgataaatcgagcacagcgccggtggcctagcactgctgggggacccagtacaccctccgcagccgctggcccgggtgctaggcccctcactgcctgggccggccggccgctccgagtgcagggcccgccaagcccacgcccacccggaactccagctagcccgcaagcgctgcgcgcagccccggttcccgctggcgcctctccctccacacctccctgcaagctgagggagccggctctggccttggccagcccagaaaggggctctcacagtgcagcagcgggccgaagggctcctcaagtgccgccaaagtgggaacccaggcagaggaggcgccgagagcaagcgagggctctgaggactgccagcacgctgtcacctctcaccatgaaagggtatggagccatgccaagaaggcaagtgggccaggtttgctggaggggcaagtttgggctgggggtaaggagcttttggaaatgagattacaaaggtgaactgggacaaggtcatggaggacccggtatgagggttaattgcaatatttaggcagtggtgggatagtgaagtttaaaaatagaagagaccatttttttctagagtgctgtgacgtggtgtgggatggaggtaaaaaggggaggagatctggagcctcgagagcagctccatgtggtgggtgctgccataccgagagaggggatgaaggggcagcgcttgtacagaagccaaagagagccggatgagaagtaggattggagaatgctgtcaaatggtagaattgacaggattctacccatctgggacatatgttaaactagataaaaaagcgttattggttgagtacctctttaattttgctaagaggaagctgcgtggagcaatgctttccagctttatttctggggactgactgggctcaaactgtggcttggtcacttgtagctgagtgacctcaggaaagtttcgtatcctcttagtgcctcaatttcttcatttgcaac

SEQ ID NO: 11604 - DNA, 1488 bp, Artificial sequence
  DNA replication origin
tgtgcacgtcgttggtgtgcaaaatcgtaagctcccaggcgccagccgcaggccacagcaccgcgcccagggcgaggagtagcgtcgcgggcgcccgcgcggctcggggacacatagctgtggcgcgtgaactgggtgcgaaagcgggcgagccgggcgagtgccggcgagtaggggcgagcagctagggccggggctcggtgccccggctggaggggcggggcccgggtcaaggccggggcgggtccttcttcagcctggaggccggcttggcggccaggcgcaagttcgcgacgtcacccgatccgaccctggtacccggagcggccctggcgcggctgtcggctggcaccagctccctgcaggaagagtggagaggttgttcccggcggggagcgggtaccggccgcatcccggccggaccagggagcctgggcgccggcagttcggctgctggtgcgccgctctttcgggggcgcgaggaaggaattggaggggtccgccccgcgcctgggtcctctctgagtctcgcctcattcgaggcacgggtttttctacaaaaggaatgtatggtttgtggttgcgctagctcatcacttcaaagaaccaaagaaggaaaagagagggggcgggaagaaagatgagcgagctgaggggcagagaggaggagtaaagagaggccgggcagaggagctccttgcagtttcgggctgtgagagccgaagctcactgagatgtgacgcttcctgttgggttgagaacgcacgaagtctacgatgcttagacaaaaaaatctcagaaactaagaaatcattcgaatccagttccttgtttattcacaattaaaaccttagtgataaaacagaggcgacgcgcggacagctcctggaagcagaaacacgattggggtaaaatccggcagctatcaggacgggaagggatgctgcccttctttgcttttctggtcttattttattttattttatttttattttgtcgcgtgtgctttcggtgtcgcagtgaagtcatagccaaatacaatgttaggaagattttcctctatgttttctcctaagagttttataatttaaactcttagacctttaatccattttgagttaattttcatatgtggtatgagtccacatttactctttttcatgtggatatccagttttcttagtaccatttgttgaaaagacattctgtgcccgtttttaagacattgacctgaggttcggagattgtaaatcatttgccaagaaaggccatgcagtttgggagcagcagtgcctggggctacagaagacccttgcttctgggacaccctctaatgtcatgctttgcaaggttttgctctgtccctctttgagcacctgctagaagcaggtaaaagaactggtagttttgctgttttaacttaaaaaaagaatgattttagacttacagaaaagttgcaaaggtaataaagggagttcccacataccc

SEQ ID NO: 11605 - DNA, 1248 bp, Artificial sequence
  DNA replication origin
gcttttctggaaaatggattccaatggggagaagagcacgttgactggggctgcctgggagtaggccgcggcccgcgccgccacttcctcctttccatgtgctgctgcggttcgggctttgtctgcggcgctttgggaggaggcgcctccacggtcccgtggcccgcacggaccgcgagcggcttcagagttggtgctgtcgtggcggtcgccgcggcgcgggagtgggcggagaggagtgggtcttgtcctgcagccgtgcggcgagcttgggcggtgctcacggtcccgcgggcgttgagccgtccgctgaacgccctcacgctgctgggttgccgggcaggcgtcgcagtcactgcacggaagggtaaggggtggggacctgcacagcgcgccacgggtcacgtctcggccgggcgggcggccgggggtcgtcggcgcccggggagcgccaggggcggagagccatgtgtcacggcggagacggcggcgctggggggcggggagagcctgtggcctggcgccgccggtgcctcggtgttcaggggagagattgtgctgctgcagctttctgggggctccgaccgcggcttcgggttgatgttgggaaccagtgatggtcgtcttggtttgggattcgttgggttgccgttgaaggaagttgtaggacattggaaggcgcagagcacgtgtttctaatgggctcctggcggccgcagtggtgagactgccgctctgggtgcggagtcaggggcgggctttggggtgcggggttaaagggtggagaaattgggtggtgggaaggtggcttgtatgagcgctttgttcttcgctggctgttgttaccgatctataagcggcaggcgggaaaagcgcgcactttgggggtttatctttgagagagaggagcccagttttgctttctccacacacacctcattttccgaacgggcacagctgcatgtggcacgctggctcgtacccgtgctgattgggctctatttgtaatatggtttttcctagggagtgttagcaggtgagtcaggggtggtgctgaggaagaatatggtgaatcggtccttctgtgccctgtgctccaaatctggcttgtcaggcgatagtgactgtaaggcttttttaaagggaggtataggctagctggtgtagtaaatggtagagaaagtaaagatggggctctcatattgtcttgtattctttttgaagatcctagtttaattttgcttattg

SEQ ID NO: 11606 - DNA, 1243 bp, Artificial sequence
  DNA replication origin
ccgaggaggagagcgcggggcggtggcagcggcgtggacaccgcctggaacggctacgcggccgcggagccgggggcgggggccgggcgcgcacagaccggtgggtgccctccgggaagcggcagtcgcactcagcgcccacagcactctgccccgccagccccggaccgggcagggatggggcgggcgggagctcggtgggggtggcgtgcgcatggtgtcgcggggagggggtggggtggggcggggtggggagatgccagtctcctgacaaaggaaaacgagtgggacacgctgagccggcccgccccgcctggaggggagagggagggggagtgtcgggaggggaaggggcgggcctttcattcagtctcggcccctcggccgccaccgtcggagcggaagggcggggtcttgtgcctcccccacccccaacccaaggggtgaggagcggggaaggcggcgcggcgtgggggcggagcccgcgggcgcgcgtcccgaggcgtaggctacgttgtcacgtcagcgcgggagagagaaagagaggagccgactcggcagggactgggggaccgggccgagagtgcgagcgagcgagggagggagtgagggagcgtgcgagccagaaggggaaaggcggccactcgtgcctgagcgaccgcagaggggagtgggagcagtggggtaaaggagcggggggcgggaataagaaaggccgagagaaggcggacagaggctagtggtggtggtggtggtagggggagaaggaggagctggaggagggcaggggctgagggagtgagtgaagcggacgcgcgagggaggggagggaagggaagggaagggaagggggggtcacgcgggggcgcgcgcgcgcaccgggagcgcgctcggaggcgagtggaactggatcgggtttgctgccagcggcgtgagcttcggccgccattttacaacagctccactcgcgccggacacagggagcagcgagcacgcgtttcccgcaacccgataccatcggacaggatttctccgcctcagcccaacggggaggtaacgactgccagaacctgggtgtgggaggggagctccatgacattgtggagtgagctgggggagggtggcgcgggtagaaaccggcttttctggaaaatggattccaatggggagaagagcacgttgactggggctgcctgggagtaggccgcggcccgcgccgccacttcctcctttccatgtgctg

SEQ ID NO: 11607 - DNA, 1240 bp, Artificial sequence
  DNA replication origin
aaccgccattgtcatcatggcccgttctcaatgagctgttgggtacacctcccagacggggtggtggcagggcagaggggctcctcacttcccagtaggggcggctgggcagaggtgcccctcacctcccagatggggtggctggccgggcggggggctgacccccccacctccctcccagacggggcggctggccggacggggggctgacccccccacctccctcccggacggagcagctggccgggcgggggactgaccccccacctccctcccagatggggcggcttgccggggggggggtattgaccccccatctccctcccggatggggtggctggctgggtggggggctgaccctcccacctccctcccagacggggcagctggccaggtgggggctgacccccacctccctcccagacggggtggctgccgggcggagacgctcctcacttcccaaatggggtggctgccaggcggaggggctcctcacttctcagatggggtggctgccgggcggaggggctcctcacttctcagatggggtggttgccaggcggagggtctcctcacttctcagacggggcagccgggcagagacgctcctcatctcacagacggggtcgcggccgggcagaggtgctcctcacatcccagatggggcggggggcagaggcactccccacatctcagacaatgggcggtggggcggagacgctcctcacttcctacatgggatggcagccgggaagaggtgctcctcacttcctagatgggatggcggctgggcagagatgctcctcactttccagactgggcagccaggcagaggggctcctcacatcccagacggggtggtggccgggcagaggctgcaatctcggcactttgggaggccaaggcaggcggctgggaggtggaggttgtagcgagccgagatcacgccactgcactccagcctgggcacaattgagcactgagtgaacaagactccatctgcaatcccggcacctcaggaggctgaggctggcggatcactcacggttaggagctggagaccagcccagccaacccagcgaaaccctgtctccaccaaaaaaatacaaaaaccagtcagtcgtggtggcgcgcgcctgcaatcgcaggcactcggcagactgaggcaggagaatcaggcagggaggttgcagtgagccgagacggcagcagtacagtccagcttccgctcggcatcaga

SEQ ID NO: 11608 - DNA, 933 bp, Artificial sequence
  DNA replication origin
ctgagaagtgaggagcccctccgcccggcagccaccccatctgagaagtgaggagcccctccgcctggcagccaccccatttgggaagtgaggagcgtctccgcccggcagccaccccgtctgggagggaggtgggggtcagcccccacctggccagctgccccgtctgggagggaggtgggagggtcagccccccacccagccagccaccccatccgggagggagatggggggtcaataccccccccccggcaagccgccccatctgggagggaggtggggggtcagtcccccgcccggccagctgctccgtccgggagggaggtgggggggtcagccccccgtccggccagccgccccgtctgggagggaggtgggggggtcagccccccgcccggccagccaccccatctgggaggtgaggggcacctctgcccagccgcccctactgggaagtgaggagcccctctgccctgccaccaccccgtctgggaggtgtacccaacagctcattgagaacgggccatgatgacaatggcggttttgtggaatagaaaagggggaaaggtgcagaaaagattgagaaatcggatggttgctgtgtctgtgtagaaagaagtagacatgggagacttttcattttgttctgtactaagaaaaattcgtctgccttgggatcctgttgatctatgaccttacccccaaccctgtgctctctgaaacatgtgctgtgtccactcagggttaaatggattaagggcggtgcaagatgtgctttgttaaacagatgcttgaaggcagcatgctcgttaagagtcatcaccactccctaatctcaagtacccagggacacaaacactgcggtaggccgcagggtcctctgcctaggaaaaccagagacctttgttcacttgtttatctgctgatcttccc

SEQ ID NO: 11609 - DNA, 1615 bp, Artificial sequence
  DNA replication origin
tgtttgaacaagaaatgctctctgtactataatccagggtgcaggcacggtgcccgggcgaccctcagtctccctccgacaccccgcatcccaactcccgccgcctttgcgcctcaaagctggcaaacatccccaagccagagctggagtacctggagtgggtgggggtaagaagggaagccaaggtcgtcccggaaggtgtgcgcccctcaccttgtggacggtgcgtgcagccgcgccgcactgggcaaaccggcacgtccagctggctccagaagtctcactcggaacccgctcctttttctcctgagctggatcagagcactgcttctctcaacattcgattctggagtacgttgagcccagggcgttctccccgccagcgtccttgcccgcgccagtgcccgccggggtgcggcgagacagaacctgggagcgcggcgcgccgggcagcccgaggcaccgctggtggcaggcgctgcgcttcgccgagtctgggcgcctggactggaagaggaggcgagagggagagagcggggaagaggaggaggaggagcaggagcaggagcatgggcaggggcagtctgctaaatcatctacgcaggtcgcagcctcccgggacaccgtgaacggagaggggggtggtgggtgtgggatgaaaagatgagcccgggtgtgaggcaggtggtattgtgaactggaggtcgcagctccgaggtactccaggtcttgcttaggttataaaagagaaattctggagctgatggcgccttagggctcccggttgcagacactagagggcagggctgtccatgttataaaccgggccagcggggttggaggtgtgggcaagggactcacctcctgagccccttgccggccacagccctggcggagaaggggaaaatagatacaacaagggggcagaccctactcccttcttctgtagcgagcctgggttgaggagggagaggaacggcgggagcagttgacgggtttgcacgctttctctacgcggttccaatggcaaacagaccctctggaggtgcatttcttagccctcctccaggggagattacagtcaacatccacaggatgcctcaaggagagagattacaaggaaggggtgagggagaagtggacgaaaattggggtgggtcaaagtggaaggggggaagagaggtggggaaagcagtgaagaaaaggagacggagagtggagtggttggggctgaaagacctgctgaagcagccttgccattttttttttttttgagggaagtctacctgggcgccatctcaggttgtcagagggctttgtgctcttctgagggtgccaggggctgttctttttgttgttctgctgccgcaaggtcagaaaagttaagctgggagggactttgcagaatcctggcattgctaaaagaagcttccttacggctggttggttattctctgtggagaacttgggtgactcaacattgaagcctaacatggattgagcccctgccattgtaaaaaagaaaatcagattgttcaaactagccataaaatgaactagacaatcttatggagacagtatgatctgtagacagcctgatacacaaaccttagag

SEQ ID NO: 11610 - DNA, 904 bp, Artificial sequence
  DNA replication origin
gaggtgggggggtcagccccccgcctggccagccaccccgtccgggagggaggtgggggggtcagccctccgcccggccagccaccccgtctgggaggtgaggggcgcctctgcccggccgcccctactgggaagtgaggagcccctctgcccggccagccgccccgtccgggagggaggtggggaggtcggccccccgcccggccagccgccccgtccgggagggaggtgggggggggtcagtccccccgcccggccagccgccccgtccgggagggaggtgggggaggtcagcccccctgcccggccagccgcccctactgggaagtgaggagcccctctgcccggccagccgccctgtccgggagggaggttggggggtcggccccccgcccggccagccgccccgtccgggaggtgaggggcgcctctgcccggccgcccctactgggaagtgaggagcccctctgcccggccaccaccccgtctgggaggtgtgcccaacagctcattgagaacgggccaggatgacaatggcggctttgtggaatagaaaggcgggaaaggtggggaaaagattgagaaatcggatggttgccgtgtctgtgtggagagaagtagacatgggagacttttcattttgttctgcactaagaaaaattcctctgccgtgggatcctgttgatctgtgaccttgcccccaaccctgtgctctctgaaacatgtgctgtgtccactcagggttaaacggattaagggcggtgcaagatgtgctttgttaaacagatgcttgaaggcagcatgctcgttaagagtcatcaccaatccctaatctcaagtaatcagggacacaaacactgcggaaggccgcagggtcctctgcctaggaaaaccagagaccttt

SEQ ID NO: 11611 - DNA, 1921 bp, Artificial sequence
  DNA replication origin
cctcacctcccagacggggtctcggccgggcagaggcgctcctcacatcccagatggggcggcggggcagaggcgctccccacatctcagacgatgggcggccgggcagagacgctcctcacttcctagatgtgatggcggctgggaagaggcgctcctcacttcctagatgggatggcggccgggcggagacgctcctcactttccagactgggcagccaggcagaggggctcctcacatcccagacgatgggcggccaggcagagacactcctcacttcccagacggggtggcggccgggcagaggctgcaatctcggcactttgggaggccaaggcaggcggctgctccttgccctcgggccccgcggggcccgtccgctcctccagccgctgcctcccgggcggcgctcgccggcctatacgccacacttcttatcgccctccttgtctgcaatttatttaagaaactgggtgatttaacccgtgaatttttttacagtttggattccaatgattgcataatcaaaaggtagtttaacatgtttcttgattctctgtggtttctttaaagtagttattggtctaagatgcttaaacttttaatacattgactttagacagcttcaactccatttgcaatagctactatgtgacctctgaatttttggtaggcaagaggtaaagcaattgcagcccagaacatcatgtggagccaggaaatgctgctaggagagagggtggctaagctgacagagttgagggcagttttcctggatcagtttagaggccatgtgcaaaacagaaaccttgcagcaggagggaatgacttatcaaagggaagtggtatctggaagtgtctaggaatggacagaagtcagtacttaacacaggttgactgggaaaatgctgggaagtaaatagagaaaggcaagtataccctgggttccttcaaagcagttcaggaaaatattctctaaatgatggtggttacatgcaacgtaaatgagttgatcaggaatgctccaggtccaccagcatgttaaacttttaatggttgagacgttatataatattttctggtaattcaaagtcttagcaaaactttgtggtaaggatatttgtcccatatttcagataactctaagaatgctaggaaaggggaatatgtcaacaagaaatgttacatgtatggctggatgctattttctattttttccctttccttcagtcaagcatgtggcctggtttatgcttccttacctcacagatatttcagaaagcggaagtatcagacagtaatccctatttatgttctcaaaagccaagcccataggagatttattaataaaagatttgtaaataagtaaaaaaggaaaagagagcttttaataggtggctgaaagggttagaaaaaaaaatgaaggaagaaaggaatttctccaatggtctacatacctttcccgcgcaaaatggaggaacagaaaagatcctgggggtctaagacttgggccagaagttctggaagtgccttgaagagtctataatattttaaaaagggatacatgcatggtgtggctagggacttaggggctaggcatggggttcccaaccttaggacatttcctaagcgtgttacggaagcagtctggggatctgaaagaactgtaggagtgggggacagtaaatatcttaccagggactttctctgtgcatgcaacatctgaaacccctctccccaaccaaacctcaatgccttggccctaaataatcctccagagacttgggggtgtggttggggttagagaaagtctcaagcatgagaagtgagaagcttagaagcagcaattaggttgacacatgttctcacttataaccgggagctaaatattgaataacacatgaacacaaagaagggagc

SEQ ID NO: 11612 - DNA, 1099 bp, Artificial sequence
  DNA replication origin
agggtaggtggggggaggggaggcgggggaggctcgagcatgggggagctgcaggtcccgagccctgccccatgaggaggcagctgaggccccgtgagaattcgggcacaccctccacagctgctggtctgggtgctaagcccctcactgcccagggctggccacagtggccagccgctcggagtgcagggcgcaccaatcccatgcccacccagaactggcgctggaccacgagcactgtgcacagccccggttgctgcccttgcctctccctccacacctccctgcaagcagagggagccggctccggcctcggccagccccaagaggggctcccacagtgcagcggcaggctggagggctgctcaagcacagccagagtgggcgctgaggccaaggaggcaccgagagccagcgagggctgcgagggctgccagcaggctgtcacctctcaatagcgcaagaggctacgttttccattccaaccaaaagttgctttcagtgaagaaagaaggcaatggtgttctaagaaacatcactgatcaagaatatctatgatatcctttctgaaaacaatgacttagagaaaaagcagggcagaggaggagtaactcataattctttcttatttcaattcttccttaactcatcactaaataaaaggtaggagtgttggtagaacatgcatgtgttaaaaactggaaaaaggccgggcgcagtggctcacatctgtaatcccagcactttgggaggccgaggtgggcagatcacctgaggtcaggagttcaggaccagcctggccaacatgacgaaaccccgtctctactaaaactataaaaattagccaggcatggtggcacgcacttgtagtcccagctacttgggaggctgaggcaggagaattgcttgaacccaggaggcagagaatgcagtgagccgagatctgacctgtgcactccagcctgggtgtcagagcgagactctgtctcgaaaaaaaaataaatatctggagaaaaaaaccagttgaggcagttgaggtagttgcatgaagcgtctccactccgttgaagagaaccaaagacatatacatacatgtacg

SEQ ID NO: 11613 - DNA, 1444 bp, Artificial sequence
  DNA replication origin
gccttgaccgcaactcccttcccccagccaggagctgcagacgacaacaaccgccacaactgcagccacacaaaggcgccttccttctactcccgctcccacccaggcggaggcgccgatgatgccaaggaagcggcgaccacctctcggccgcctagcgctcgctcgccctcttccccctctagctggggaaagggggaggggaccaccgggcgccctcacctggcacagctgctgacagtagtcggtggccgcttccacggccggtacccggctctcccgcagctgtagctccagctcctggagccgctcgcccaggcgctgcagctccgcgacgcagccgccttcgccgcaactcaacctctcctgctcggcctcttcgtccgccatcttcacaccccgctccgtcgcgtacgcacctgggtcacgtgataacacaatgccacgttcggcggggtcacgtgccgggcgcgcttgcacggcgccgagcacgtacaaagggcccgatggggaagatatgggggtggggagagtggcgcgagagagcccgagggaggtgaaggcaaggggaaaggagaagggcggggttggggcggtgcggaaaacggcggtttacttaccccgagcgggaagtgggcagcagcggccgaaaggggcgggctggtgaaggcctgctctcggtcacgtgggcgccgcgacgggaaaaagcctagggaggggcgaccctctccggcgtcccgatcccggcgtggctttccccagtccacgaagtcttctacggacatatcctcctgttccccaagaggatggcacagggagagttctgagtggtctcgggcaatggctgcatttgctgttggcctgtaagcaggccagaagcagaggaagagagagaaggtaaaacccgcccatggaccgcaagcgtgagagccaaggcaggactatgaactgtcaaaattgtctctgacttctcaccaggccggagaggagggatctagtgcgtgaggtaccagatctcgtctcacttgactctcctcctcttcagcaccaagaacgcctgtcccctggaaacacattctctagggggtggaggcaacaaaggaaaagaacaattgggtcagagcagaatgaggttcaatcctcagtctggagaacggagcaaattcatgaaaagcatagtttaaaagaagtcagaatatgaacagaccagatgacttttaaaccacgaaaacatttctagaataagtgataactaactactctgtttcaccgtgatttagactctactacactctacagaaatcaccaacaatgacaacaggctatatatgaaagctattgaaaagaaagtaggtcaaggaaaaaaaaaacaccaataaggactccattaaaaatcataacggaggagaggaaattgatgctaaaataaaacaatattgtcgag

SEQ ID NO: 11614 - DNA, 872 bp, Artificial sequence
  DNA replication origin
cagccgccccgtctgagaagtgaggagcccctccgtccagcagccgccccgtctgggaagtgaggagcgtctccgcccggcagccgccctgtccgggaggtggggggcagcccccgcccggccagccgccccatcagggagggaggtggggggcagcccccgcccggccagccgccccatccgggaggtaggtggggggcagcccccgcccggccagccaccccgtctgggagggaggtgggggccagcccccggcccgccagccgccccgtcagggagggaggtggggggcagcccccgcctggccagccgccccgtccaggaggtgggggggcgcctctgcccagctggcgccccgtccgggaggtgaggggtgcctttgcccggccgccccttctgggaattgaggagcccctctgcccggccgccaccccgtctgggaggtgtacccaacagctcattgagaacgggccatgatgacgatggcggttttgtcgaatagaaaagggggaaatgtggggaaaagatagagaaatcagattgttgctgtgtctgtgtagaaagaagtagacataggagactctattttgttccgtactaagaaaaattcttctgccttgggatgctgttgatctatgaccttacccccaacctggtgctctctgaaacatgtgctgtgtccactcagggttaaatggattaagggcggtgcaagatgtgctttgttaaacagatgcttgaaggcagcatgctcgttaagagtcatcaccactccctaatctcaagtatccagggacacaaacactgcggaaggccccagggtcctctgcctaggaaaaccagagacctttgttcacttgtttatctgctga

SEQ ID NO: 11615 - DNA, 1109 bp, Artificial sequence
  DNA replication origin
ccctcacctcccggacggggcgccagctgggcagaggcgcccccccacctcctggacggggcggctggccaggcgggggctgccccccacctccctccctgacggggcggctggcgggccgggggctggcccccacctccctcccagacggggtggctggccgggcgggggctgccccccacctacctcccggatggggcggctggccgggcgggggctgccccccacctccctccctgatggggcggctggccgggcgggggctgccccccacctcccggacagggcggctgccgggcggagacgctcctcacttcccagacggggcggctgctggacggaggggctcctcacttctcagacggggcggctgccgggcggaggggctcctcacttctcagacggggcggctgccgggcggaggggctcctcacctcccagacggggtcgcggctgggcagaggcgctcctcacatcccagatggggcggtggggcagaggcgctccccacatctcagacaatgggcagccgagcagagacgctcctcacttcctagacgggatggcggccgggaagaggcgctcctcacttcccagactgggcagccgggcagagaggctcctcacatcccagacgatgggtggccaggcagagacgctcctcacttcccagacggggtggcggccgggcagaggctgcagtctcagcactttgggaggccaaggcaggcggctgggaggtggaggttgtagcgagccgagatcagaccactgcactccagcctgggcaacattgagcactgagtgaacgagactccatctgcaatcccggcacctcgggaggccaaggctggcagatcactcgcggttaggagctggagaccagcccggccaacacagcgaaaccccgtctccaccaaaaaaatatgaaaaccagtcaggcgtggcggcatgcgcctgcaatctcaggcactcagcaggctgaggcaggagaatcaggcagggaggttgcagtgagcagagatggtggcagtacagtccagcttcagctcggcatcagagggagaccgtggaaagagagggagagggagacccgtggcggtgggtgg

SEQ ID NO: 11616 - DNA, 1010 bp, Artificial sequence
  DNA replication origin
cgtaatggcagagtattaactctacacttaaatgactgttcccctaaagtaggggtaggaagaaatcagatctagctttctttcccaaatcagaatgctttccactttcatgaaataaacatacttctaggagatgtctccttttatttatacaaacatacacaccgaactggaacgtaatttgaagttgggaggtggaaaactaaaggtcaaaaagggaagaaagcaaaaacgtcccttgcacacttcagcccgcagaccccaaggaggggcgcgaggtcctcagaaccggaaaggctagcactggatgggtccccgcagccccgcgccgctgcgccgcagcctccggaagacaggggacgctgtggcgccgggcggggcgccctccgccgctctctctagcaggcggggcggcgaagcggggcggggcgtctcgggcgaggagaggaggtgaccccgcgaaaggtaagcggcggcttcggtggtgttgagtggctgggcgccggcctggaggggccagggcggccgcaccatcacgctcccgtctctgcccttcccagctgccctgccggtctccctcccagggagggagcgtcctctcggatagcccaaatctttgcctctccgtggactccctgtacccgcaccccaagtcggtgaagctctctggccccacagagcccatttcccgtactcaccttgcgggctccagtttgttcggtgcttcatccatggacacccccaccccgagaactctctcgtttcctgcagtttcttagtgtcttggctcaccagactcataggggaacatggtggtgttttgaggagacgccgcttttcttttgtcatagtgcggacactcgtgctttttcagccctgcaacacaatgtgtagaacttaacggaatgaagttttcttttggaggcttccaatgcgtctgtctttgagtaagccttcggcaccgaacagtagtccatgacattgggggaagccagatgagactcagattg

SEQ ID NO: 11617 - DNA, 893 bp, Artificial sequence
  DNA replication origin
agcgcctcttcccggctgccatcccatctaggaagtgaggagcgtctctgccccgccgcccatcgtctgagatgtggggagcgcctctgccctgccgccccatctgggatgtgaggagtgcctctgcccggccgcgaccccatctgggagcgtctctgcccggccgccccgtctgagaagtgaggagcccctccgcccggcagccgccccgtctgagaagtgaggagcccctccgcccagcagctgccctgtctgggaagtgaggagcgtctccgcccggcagccgccccgtccaggaggtggggggcagcccccacccggccagctgccccacccgggagggaggtggggggcagcccccgcccggccagccgccccatccgggaggtggggggcgcctctgcccggccgccccttctgggaagtgaggagcccctctgcccggccgccaccccttctgggaggtgtacccaacagctcattgagaacgggccatgatgatggcggttttgtcaaatagaaaagggggaaatgtggggaaaagatagagaaatcagattgttgctgtgtctgtgtagaaagaagtagacataggagactccattttgttctatactaagaaaaattcttctgccttgggatgctgttgatctatgaccttacccacaaccctgtgctctctgaaacatgtgctgtgtccactcagggttaaatggattaagggcggtgcaagatgtgctttgttaaacagatgcttgaaggcagcatgctcgttaagagtcatcaccagtccctaatctcaagtacccagggacacaaacactgtggtaggccgcagggtcctctgcctaggaaaaccagagacctttgttcacttgtttatctgctgacct

SEQ ID NO: 11618 - DNA, 1031 bp, Artificial sequence
  DNA replication origin
gttgtgggtaaggtcatagatcaacagcatcccaaggcagaagaatttttcttagtatagaacaaaatggagtctcctatgtctacttctttctacacagacacagcaacaatctgatttctctatcttttccccacatttcccccttttctatttgacaaaaccgccatcatcatggcccgttctcaatgagctgttgggtacacctcccagaaggggtggcggccgggcagaggggctcctcacttcccagaaggggcggccgggcagaggcgccccccacctcccggatggggcggctggccgggcgggggctgccccccacctccctcccgggtggggcagctggccgggtgggggctgccccccacctcctggacggggcggctgccgggcggagacgctcctcacttcccagacagggcagctgctgggcggaggggctcctcacttctcagacggggcggctgccgggcggaggggctcctcacttctcagacggggcggccgggcagagacgctcccagatggggtcgcggccgggcagaggcactcctcacatcccagatggggcggcagggcagaggcgctccccacatctcagacgatgggcggcggggcagagacgctcctcacttcctagatgggatggcagccgggaagaggcgctcctcacttcccagactgggcagccgggcagaggggctcctcacatcccagaccatgggcggccaggcagagacgctcctcacttcccagacggggtggtggccgggcagaggctgcaatctcagcactttgggaggccaaggcaggcggctgggaggtggaggttgtagctagccgagatcacaccactgcactccagcctgggcaacattgagcactgagtgaacgagactccgtctgcaatcccggcacctcgggaggccgaggctggcagatgactcgcggttaggagctggagaccagcccagccaacacagcgaaaccccgtctccatcaaaaaaatacgaaaaccagtcaggcgt

SEQ ID NO: 11619 - DNA, 1148 bp, Artificial sequence
  DNA replication origin
ccaaggcaggcggctgggaggtggaggttgtagctagccgagatcacaccactgcactccagcctgggcaacattgagcactgagtgaacgagactccgtctgcaatcccggcacctcgggaggccgaggctggcagatgactcgcggttaggagctggagaccagcccagccaacacagcgaaaccccgtctccatcaaaaaaatacgaaaaccagtcaggcgtggcggcgcgcccctgcaatcacaggcactgggcaggctgaggcaggagaatcaggcagggaggttgcagtgagccgagatggtagcagtacagtccagcttcggcttggcatcagagggagaccacggaaagagagggagagggagaccgtggggagagggagggggaggggggagggggagagggggagggggaggggggagggggagggggagggggggaggggggagggagggggagggggggagggggagagggagagggagagccaatattcttattttacaaatgagaaggctgaggcttagagagtttactagcccaagaacaagtctcaggattttaacctatgcactctgcccctagactccaaattagagatacagataaagctgaatagcttagtgttacaaaacggaaagaggtgttttttggagtagagttgtagacgggttcaaggcagtcagtgaagatgtaaaaagagcccagcaaaatgtcaagaggctacagtccaagttgtcaaaaagaaactaagagagtttaagaacaggacattaaatattcaactgtaagttgtttatattgcaataaacctctattgttctctccatcttctcaaatcttctcaagccttgagtaaagtctgacgcagcagggccttacatttagtgtgtgagtgtaaaccacaaagagactgcctgagcagagtataggaatcagtagaggcaagaaatcagttaaaggtgtcttgtgacagccctcttcaaattcccctcactctcccacctgcccccagcctggaagaatttagagatgtttaggagattattggactttccacagccttggaaagagatttgagcaaaatttatctacgtctttagggacagggagattccacataataggtgacaagtacatgc

SEQ ID NO: 11620 - DNA, 948 bp, Artificial sequence
  DNA replication origin
cctgtctgagaagtgaggagaccctccgcctggcaaccgccccgtctgagaagtgaggagcccctccgccctgctgccaccccgtctgggaagtgaggagcgtctccgcccggcagccaccctgtccgggagggaggtgggggtcagcccccgccaggccagccgccccgtccgggagggaggtggggggtcagccccccacccggccagccgccccgtctgggaggtgaggggcgcctctgcccggccgcccctactgggaagtgaggagcctctctgcctggccagccgccccatccgggagggaggtgggggggtcagccccccgccaggcgagccgccccgtccgggagggaggtgggggggtcagccccctgcccggccagccgccccgtccgggaggtgaggggcgcctctgcccggccgccccttctgggaagtgaggagcccctctgcccggccaccaccccgtctgggaggtgtacccaacagctcattgagaacgggccatgatgacaatggcggttttgtggaatagaaaagggggaaaggtggggaaaagattgagaaatcggatggttgctgtgtctgtgtagaaagaagtagacatgggagacttttcattttgttctgtactaagaaaaattcttctgccttgggatcctgttgatctatgaccttacccccaaccctgtgctctctgaaacatgtgctgtgtccactcagggttaaatggattaagggcggtgcaagatgtgctttgttaaacagatgcttgaaggcagcatgctcgttaagagtcatcaccactccctaatctcaagtacccagggacacaaacactctgcctaggaaaaccagagacctttgttcacttgtttatctgctgaccttccctccactattgtcctatgaccctgccaaatccccctctgcgagaaacaccca

SEQ ID NO: 11621 - DNA, 1268 bp, Artificial sequence
  DNA replication origin
gccattgtcatcatggcccgttctcaatgagctgttgggtacacctcccagacggggtggtggccgggcagaggggctcctcacttcccagaaggggcggccgggcagaggcgcccctcacctcccggacggggcggctggccgggcagggggctgacccccccacctccctcccggacggggcggctcgcctggcggggggctgacccccccacctccctcccggatggggcggctggccaggcagagaggctcctcacttcccagtaggggcggccgggcagaggcgcccctcacctcccagacggggcggctggccgggtggggggctgaccccccacctccctcccggacggggcggctggcctggcgggggctgacccccacctccctcccggacagggtggctgccgggcggagacgctcctcacttcccagacggggtggcagcagggcggaggggctcctcacttctcagacggggcggttgccaggcggagggtctcctcacttctcagacagggcggccgggcagagacgctcctcacctcccggacagggttgcggcccggccgaggctctcctcacatcccagacggggcagcggggcagaggcgctccccacatctcagacgatgggcggccgggcagagacgctcctcacttcctagatgggatggcggccgggaagaggtgctcctcacttcctaggtgtgatggcggccgggcagagacgctcctcactttccagactgggcagccaggcagaggggctcctcacatcccagaccatgggcggccaggcagagacgctcctcacttcccagatggggtagcggctgggcagaggctgcaatctcggcactttggggggccaaggcaggcggctgggaagtggaggttgtagcgagccgagatcacgccactgcactcccgcctgggcaccattgagcactgagttaacgagactccgtctgcaatcccggcacctcgggaggccgaggctggcggatcactcgcggttaggagctggagaccagcccggccatcacagcgaaaccccgtctccaccaaaaaaatacgaaaaccagtcaggcgtggcggcgtgcgcctgcaatcgcaggcactcggcaggctgaggcaggagaatcaggcagggaggttgcagtgagccgagatggcagcagcacagtccagcttcggctgggcatgagagggagaccgtggaaagagagggagagggagaccgtggaaagaggggagaggga

SEQ ID NO: 11622 - DNA, 1312 bp, Artificial sequence
  DNA replication origin
ggtcccccgccccaagcaaagtttggggctacgggcgctgcgctcaggtccctccccgcgcagttccctcggcggggtctgtgccgccgccgctgccagggcaggacaaaggctcattaacacgtgatgggaccgcgcttcataaatgggactggagcgagagggagccagagacagcgcgagcggagggagcggcagggactgcgcgagcgggacgaggcgacgggcgcccgggctggcggagacgggcggccccacgccgggccaggcggggctcgcgggaggacccagtgaagagcctgggaaggggcgaggctcgccggcggtcggagcagcggggcgccagtcccggtcgctgtcgcgggcgggcgctggagaccgggacgccggcgctcggacggactgacttgctgaccgcccgccggaggcacaccccactccaccccaccccgcctcgccagcagcccggcgccggcgccgcctcccgcacgctactccctctgccaccccttccttctccacttcttttccgcctccgcctcttcttgtctcccgcggcgccagcgccttcccttggcccgggcgggggcctcggctccctgcagagctctccgtagtcagtgggggatatttcgttctagcggacaaccagcccctgagctgggcgagaggtgccaagggagcttctgtcccgaggaccaggggatgcgaagggtaagacctggcagagttgcgtttggaaatactttttccgcctcccgccccctcgggtacgaccagtgtggtccccaagtgtccttcgtggagttcttattccgtgtgagcgaatcgtgcgtcggtgtttacttagctgtatggccccagcctgttaactgtgatctgttctacttctggagatttctaccatttactatttattgaatgtgtgtgcacctggctctgtatgcactgatgtctgtttgtagaaaatgggtaattgtgcatgtttgaaaaacgggcgcttgagttggtgctgaatgcctataaaccatgttagcagctaagtcttcccagggaaatacatcgatctctgctgcaagcctagaaactgactaatgtaaaatagtaaatgtcatataaagagatgtatgtcaaataataaacttttgataaaaagctacaggaaccacttctctttgaggaaaaacaaatgtccatgtaactaatacctaaaattgaatgttgatggaaccgtttaactcagaactagctgttagatgactaaagttaatgttgcatttttaaaagacatttcttgttaaggcttacaaat

SEQ ID NO: 11623 - DNA, 1283 bp, Artificial sequence
  DNA replication origin
ctccagcgcccgccgccctttcccggcgagaccactcgggcgcgccccgcccgccggtccccgatgcaaacagttgggctccgtaggcggctggctccgcgcctcccggcccggcgcgccccctccccggccacccggggccccgctcctcgcaccttttcgctggaggaggacgccccactccagggccggactgggggctctgggactcgggggcggcagcggcgggcgcctggggagccgcggtgtgctcagcagccgcggcaggaattaggggacatgctcgttaattgtttccactatcagccgccgtctgcctcctgtgtgcacggatcaaaccttaattggtctttacatttatcatggtgaattgcgaacctccaaacaagcctgggccgccgcttctgccgaggaggcgctcccctcccctccgcccccggggccctgcagggtgtgcggcggcggtcgtggttatttagacatctttatctctcgtgagttggatcgggagaggatcgcacggtttccacctgacggagccacgtcacgtcggccacaagggccccgtgctgggcgctgggttcggttcccggccgtcctcttgtggccgccttggcgttcattttatgacaccttgccggtgttcccagacatcatcccgcaccgctccgttttaccgacctccaggtcttcccgcccctgatcagaccccaacagcaaccgtactatatctggaccctatatttgaactacgtggtgagaatctgtgaaagcgagcctctcagggaaagaaggaagattgttgagttcaaggtcctggaggagggaaggctgtaaaaccgttttggaaacgtcaggccaaatcgtacaaaggcttcccgcagagcactagtgcagtttttgaaaatccccctagactgctttagactagaagtatttccgtcaagcaaatgaccatttgactccattgagagagagagtccaccgctgaaatgattaagtcctactaggtgggtggttagaaaaggttatcaataaagttctgatggacccatcgatagatggaagaatgactgggagatagatagtagatgtgggattagtgctgagccttaaccctgctgcttggggaaggctctactcacaggcatttttagcccacctccatggcagagacagctccagcgcaagattcaaagggaggaggcttcaacatctgttgcttttttcttttaggggtcgtggttgttagattttcccttcacctcacacccctggcagta

SEQ ID NO: 11624 - DNA, 1309 bp, Artificial sequence
  DNA replication origin
ctccctcccggacggggtggctgccgggcggagacgctcctcacttcccagatggggtggctgccgggcggagaggctcctcacttctcagacagggcagctgccgggcggaggggctcctcacttctcagacggggtggttgccaggcagagggtctcctcacttctcagacggggcggccgggcagagacgctcctcacctcccagacggggtctcggccgggcagaggcgctcctcacatcccagatggggcggcggggcagaggcgctccccacatctcagaatatgggcggccgggcagagacgctcctcacttcccagtaggggcggccgggcccgaggcgcccctcacctcccggacggggcggctggccgggcgggggggctgacccccccacctccctcccggatcgggcggctggccgggcggggggctgactccccccacctccctcccggacggggtggctgccgggcggagacgctcctcacttcccagatggggtggctgccgggcggagaggctcctcacttctcagacagggcagctgccgggcggaggggctcctcacttctcagacggggtggttgccaggcagagggtctcctcacttctcagacggggcggccgggcagagacgctcctcacctcccagacggggtctcggccgggcagaggcgctcctcacatcccagatggggcggcggggcagaggcgctccccacatctcagaatatgggcggccgggcagagacgctcctcacttcctagatgtgatggcggctgggaagaggcgctcctcacttcctagatgggatggcggccgggcggagacgctcctcactttccagactgggcagccaggcagaggggctcctcacatcccagacgatgggcggccaggcagagacactcctcacttcccagacggggtggcggccgggcagaggctgcaatctcggcactttgggaggccaaggcaggcggctgggaggtgtaggttgtagtgagccgagatcacgccactgcactccagcctgggcaccattgagcactgagtgaacgagactccgtctgcaatcccggcacctcgggaggccgaggttggcggatcactcgcggttaggggctggagaccggcccggccaacacagcgaaaccccatctccaccaaaaccagtcaggcgtggcggcgcgtgcctgcaatcgcaggcattcggcagactgaggcaggagaatcaggcagggaggttgcagtgagccgagatggcagcagtacagtccagcttcggctccgcatgagag

SEQ ID NO: 11625 - DNA, 916 bp, Artificial sequence
  DNA replication origin
gggaagtgaggagcccctctgcccggccagccgccccgtccgggagggaggtgggggggggtcagcccccccgcccggccagccgccccgtccgggaggtgaggggcgcctctgcccagccgcccctactgggaagtgaggagcccctctgcccggccagccgccccatccgggagggaggtgggggtgtcagccccccgcctggccagccgccccgtccgggagggaggtgggggggggtcagcccccccgcccggccagccgccccgtccgggaggtgaggggcgcctctgcccggccgcccctactgggaagtgaggagcccctctgcccggccagccgccccgtccgggagggaggtgggggggtcagccccccgcccggccggccgccccgtccgggaggtgaggggcgcctctgcccagccgcccctactgggaagtgagtagcccctctgcccggccaccaccccgtctgggaggtgtgcccaacagctcattgagaacgggccaggatgacaatggcggctttgtggaatagaaaggcgggaaaggtggggaaaagattgagaaatcggatggttgccgtgtctgtgtagaaagaagtagacatgggagacttttcattttgttctgcactaagaaaaattcctctgccttgggatcctgttgatctgtgaccttacccccaaccctgtgctctctgaaacatgtgctgtgtccactcagggttaaatggattaagggcggtgcaagatgtgctttgttaaacagatgcttgaaggcagcatgctcgttaagagtcatcaccaatccctaatctcaagtaatcagggacacaaacactgcggaaggccgcagggtcctctgcctaggaaaaccagagacctttgttcacttgtttatctgctgacctt

SEQ ID NO: 11626 - DNA, 1084 bp, Artificial sequence
  DNA replication origin
ccgagtaaacagccgccccccccaccccgcccccacccgcccgaccccccgggtgcagggtctgcagccccagagctcggccgcgaccgtctaagggcccgactccccaacggccccctggcggcctcacctctttcctgaggggggtttggccgggagccgcgggccgcagcggggcaaggtcggggctggctccctccgtgccggctgcggctgcaggactcggggccaaggcggcggccgggcccgggacctcctgcgctccgctcgggccggtcgcggggctccggccgccctccagactcggccggtgctgctggtactggtggaagcggctgggcagctgccctgcggggctggcccgcaccttcttctttcgccgcttcttcggcgctgcccgaggagtgcctcccgccacggcgaggctgcggttgggcagagctgctggagcgcgaggctggggggtcagacacgggccatctccccctaggaaatgagggaggaagagggtcgggggcagtgcccgggggtccgggatccggggtaaaggaggcggagccgtggtcaccatcgggagggccccaaagtaacctcgggaggaaaagccaagcggcgcaaggcggccacccaggacgagcggctcccgctgcgggacggagacgacagtcatagcgctaggaagcttgtcgctcagcaacgaagagagaaggagaaggtgaatgaagccagtgaagatagggtggcggcgatggatgctgctaggagagcctgagaagatcgcggaacatgactcgggcggtggcggcgcagcaacaaatagccacagccccagctccgagtgttgttatcggaagctccgccccgcgcccgcccactttcctgcgaaagcccaattagagtgcgacaaggcaggccacgccccctcgctccgcctccgcagcttcgggtagacacacacaaacaaccagcttgctgcagcctggcacaaagagggcgcactgcgcaggcgctgccagcgagctcttttgggaagaatcggtcccgcgaacaatgaaattgggtttccgccccaccctctttactc

SEQ ID NO: 11627 - DNA, 1740 bp, Artificial sequence
  DNA replication origin
tgaccccccagcctcgcgctccagcagctctgcccaaccgcagcctcgccgtggcgggaggcactcctcgggcagcgccgaagaagcggcgaaagaagaaggtgcgggccagccccgcagggcagctgcccagccgcttccaccagtaccagcagcaccggccgagtctggagggcggccggagccccgcgaccggcccgagcggagcgcaggaggtcccgggcccggccgccgccttggccccgagtcctgcagccgcagccggcacggagggagccagccccgaccttgccccgctgcggcccgcggctcccggccaaacccccctcaggaaagaggtgaggccgccagggggccgttggggagtcgggcccttagacggtcgcggccgagctctggggctgcagaccctgcacccggggggtcgggcgggtgggggcggggtggggggggcggctgtttactcgggagggaagtttccgtgacgcccgctccattcttgctttgggggaagaagggggaaggggaggcatgcgctggcgcttctgattggctcccaggagtcggccaatgagaagcgccgctgcgccccagcaacagccccgatttagaaggctggcggcgttccagggggtttcggcgttccgggcgcgcggcggggtgggggcagggacagggcccgcgggagggctgacgtcagcgcgcgctacgtgcccggcgctccggcgcccatgaaggaggcgaggccgggtgggggcagctggggaaggactgggcccggctttcggcctcccggctatcgggagccccagtcctagtcggtgaaacgcggagacggcctctaacgtcccgccgtagggggtggagtgggctccgagcggctgggtttcgtttggttggagttgtgccaaaatgtgaggtgcccggtgtgggacgcgcagtccagttggggctctgcccgcctcgggcctgacctacttagtggttccaagttaagagttggcaggagccgcacaaaactgattttattacttttgccactgtggtacttcgtgttagtgtgtccagagtaagttttcagaagagttagcaattgaattgacttagcccgtctgattgcagtgctattgcattaggataaaatggatagaagtttaaataggattaagtctacgaaatgatttcaaagtcttgtcagaataacgttttatggacttaagttcaatgacttaatcttcgtaataatgaaatgaaaaagttcccgttatttagtgaagaatgttgcattgaattagagatttgcggtttatctgtgcccttgggaaaaaatttgcccaccttgtttctttaaattatcgtctcaatgtctcccttttaaaattccacgacttttgaaatatccgtgattacctaaaagcttttgtgcttgtttcctggcctgttttctagaacaggtactaactagggagctctggcagtgaaccttattgacgtggaaagttgtggtcctctttcgtgtcgtgtcttgcttactaccgcgttacaagtgttggtagtgcagtgatctagtggattaccttacgcttttccatcctttcaagacttcctataaggcccacttaagttgggaaagattaaggtgagtgaagcagcgttcttgaagcagttactaaaccagaaaggaggtacacagcaaagattgtttctggcactcgtatttggaagagagctcattagtct

SEQ ID NO: 11628 - DNA, 2504 bp, Artificial sequence
  DNA replication origin
gaggcgcgagttccgccctgggccgcggagtagtccgagggctcacacctccccaagtggcgcagcctgggcccgcggggaggctccgcgcagctcccccgagcctccgccgggcctcggccgtgctccgcggcgcggctgttaccccgcccctcctccgcgcccccaacctgcagccgcggccgttcacctggtggcgtccgcgacgttcctgatgaacagggaggtgttggggggcctcgtgtagcgagacatgaccgcttcctccgttccctccgggtctgcccgcggccgctggactcgctccgtctcccgctaccgctgctaccaccacaggagctccgccggcccccggcgcgacccccacccctcggcctcagccccgccagcgcgcagccgcagaggccggcgcagagggggcgcagcgcggcgccagcctggacgcacgggccgggggcgggggcggcgccggcgcggcccaggggccgcgggaattccgaagacaggagcgcggccgttcccaggccctatgggatccgggtatggggggtcctggagtgcgacgggatttggggagggggcggcgagggccagtgtatgtcaggagggcggaggccaagagggggcttgaggccgcggcggggacgccgggggttagaggacccagaggtggtggcggggctgcggctgggcggaggtggggtcagtgagagccgctttcaaccgcgcccccgctcagcctccgcggccctcagcgcatcgtcctgagcgcaggaccttggcagttggtaggcctcctgcccctctggtcttgagccttcggctttccaactgtgaggtctcggttttgttcggatttgtttttttaatagagacggggtctcgctgtgttgcccaggtggtctcaaactcctgggctcaagcctctcccgcctcggccttccaaagtgctgggattacaggtgtgagccaccgcgcctggcctgttggatttttaagtattatatgattcttcatcctttattcacttggggcataacactcagctgtgagtacattcattcagatgtttattgagcgtctactatgcgccaggcacttagcgtgggatatagcaatgaacaaacaggccaagccccgccctctgagcttacattctagaggggggacaaacgaatgtacaaatgaatacatgatgtagaagacaacagtttaaatgcagggacagttaagcaaaatttaaattaccctctccctattcccccaaaatgttgtagcccatccccttctagttagactcgtcttcgccttgctcctgtggccggcaggcacagcctgttattcagggctgggagtgtaaccaggcaactcctaagtgtgaagagtgccccttttcgctcgcagaagtggtaggctttgaagaatacatgtcgtggtcacccttctagctcacagccctcccagaggctgtggaggttcctgggtctgcagctgtactggaacggtggctattctttcattcagaagggattgctctggcactgcaggcacagggctagactggcaccgtgcctattcccctagagcttagaatttggtagggaggcagaatctaacaatcacactggtaaagatacaaactataatacagggctatgaaaagaactatatgctgctgagagcaggcattgtgggatggtgagcaaggctagagggtcacttatgttccctgaacaagtcttgaagagatgggtaaagaatggagaagagtaattagtgcagtggaacagcacgtgcaaaggctttgaggcaatatagtaaatgaggcaaaacaggagcatgaggctggagaagagttggaaaatgaggctggagagcaggctggattcataatacaaaagcttagaatgcttaccatgtgttagttggctagggctgccatgacaaagcaccacagatttggtggcccgaaacaacagaaatttattctcttgtagttcagaggccagaagtctgaaatccaggtgtccgcagggccatcatctatctgaaggcactctaggggaatcctctgtttcttccagtctttggtggccccacacatgttttggctgtggatacatagatccagtctccacttctgtcttcacatggcctcctgtctttctctctctctttctctgtctctctctctttttattttagatggagtctatgttgcctaggctgatttcaaactcttaggctcaagtgatcctcctgccttggcctcccaaagttgagattacaggtgtgagccactgtattagtccgttttcacactgctgataaagacatacccaagactggggaggcctcacaatcatggtgtagggcaaaaggcacatcttacatggtggcagacagagaatgagagccaagcgaaaggggtttccccttataaaaccatcagatctcgtgagacttattcactaccaggagaacagtatggggaactgccccca

SEQ ID NO: 11629 - DNA, 784 bp, Artificial sequence
  DNA replication origin
ctcggtgcccgggcctccggcggctcccactcggcgcggaaggccgtgggcagctggtagtgcggctgcactgcccaggaggccgcgggcggctcccgctcgaagaagtgcgtcagcacgcggtgggcatggtgctcctcgtaggccagctcgggctggctccagatcgcgcggctcagggcccccagccgctcggccgcctcgtcgatgcactccgccgagcgcagcttcagtagctccagctcggagcggccattgcacgcgcccccttccacgggccgctcccctccgggcctcatgctgcccaagcccgctgccctctgcgccctctcgctccctggctcggccgcaggtagcgaccgcccgcgcacgcgcccagaggcctccaggaccccggcggagcgcgcacgcggccacacagctcccagggcaccacccccagtcccggggccgcccccggcgccgcgcgggaaacgctggcggccgctcgtaccctaccaggcgctctgccccgccgtggggttttgggggtgctgtggagaaggcagggctcgggactcttccacctccttggctgctctggcctttgagttatgctctaagattatcgattacttttccgttgttgcttatttcccacagcagcagaatgagaacggttattagttaatagccatcagagacagaccaagtggaacacagtcctcggaaaaacgccactctgtagcattagtaattaaaacctcacaaggtttgtatttcctgaaggaggccgtcagtgtca

SEQ ID NO: 11630 - DNA, 1107 bp, Artificial sequence
  DNA replication origin
gagaccctgtccccaagaaaagaaaaaaaaagaggagaggaggggaggagagggggggaggggggaggagaggggatgggggaggagagaggggaggggaggggggaagggagggaagtggggaggggaggggggaagggatggggagggaagaggggtggggaggggaagggggaaggagaggggggaaggagaggggagggggaaggggaggagggaaggagtgggggaggggaggggaggggagaggatttactaatgtcctaccctgtgcctagtatggagctaggctcagttaagaatctaaaagaggccaggcatggtgactcatgtctgtaatcccagcacttgggaggctaaggtaggaaggtcacttgaggccaggagtttgagaccagcctgggcaacaaagtgaaaccctgtctctacaaaaaataaaaataaaaaaaatttagccaagcgtggtatgtgtgactatagtctcagctactcaggaggctgacgtgggaggatcatttgagtgtgggacatcaaggctgcagtgagctgtgatcatgctattggactccagcctgggtgacagagtgagaccctatctcaagttaaaaaaaaaaaaagaatctaaaagagaagacattcaagaggccaggacgaaacctaaggactcagtatcacctaactagatgttagtgaggaaagacatggggagaaaggctctgagagaggtgtgattttcagaggagtgatgaatgaaaggataaataaatacttattgaatgaaagttggagaagacttttcaaaaaagaagtgaaccagaaagagtgtaatgttgaaaatcagggctgattctcagccagtgtggttagtatgaccataccattggctaactattgaaatatacctgtatttgttggtaaagagctgctgctaactactgtcctccaccaccaccagtctccccatgcaccagcccctccctccccgaagaccacttagctctccccatgatctagcaactaaataaaatgactcctgacacagtagagtgtctccaggaccctgctccaactctactgccagcattagcagttctctatatcagctaa

SEQ ID NO: 11631 - DNA, 867 bp, Artificial sequence
  DNA replication origin
gcgccgccccggccggcgccggtgcctgccaggcactcagggaggcgggggcgcagtggaggaggcggcgccatcgcgaagcgagcgcctcgcccgcactcagccttgccaccccgcccgcagtccaggctggactgggcggcatttgccgaggctcctcggccaggccccgtccgcccgagccgcgctgagacccgggcagcggccgcgtggagaggaggtggcagcggcccgggaggccggagccaagccagcgacccaccatggagacccgctacaacctgaagagtccgggtgagcagggctggggcccctgggcgaggagggcggagtgaccctggaccccggggtggtcgccgcctcggtcccctcgcgtctggcgccactcgcggctcagctcctggtttcgcgctctacgcgagaccgccgcctgcccgggaagtacaggccgcagggcgaggtggccgggtggacgtccgctgccaatcccccggccggccagcgcgccccgcagcacccagcctctcccttttctcatcttcgcctggtcccgtagagctgggtcagaaactcatccctgagaacaggtgtaaaggtgatgtcggtgggcgatagtcatcaaccccctcgctgtacctggtcgctattccctccctgtcgctgccaccggacttctatttacttctatttactgccggctgatttactcacatttgaggagttggtcgtttaaatatcctatttgcagcacttgggcgaatacaattacagacataaaggaaatgttctgtaactaaaccagttaactatagagctaaagcaaaacaaaacaacaacaaaaaaacacctcgttgagccctgttcttg

SEQ ID NO: 11632 - DNA, 1460 bp, Artificial sequence
  DNA replication origin
cgggaggaactgccgcgctccggctgactcctccgccggcgggcggggcgggggagggggcttcgggcgcgctgggaaccgcgggacccggacctgggcgccgcccgccgggggacgcgcggcccccgcttccgccgggccccgctgagctctagacaaacctccgcttcagaaataggctgcgggcggccggctaggaggcttggcccccaccccgggacccccgccgtccccgggccggccggccggtgggcacgatgagccaggtgctggggaagccgcagccgcaggacgaggacgacgcggaggaggaggaggaggaggatgagctggtggggctagcggactacggagacgggcccgactcctccgacgccgatccggacagcggcacagaggagggaggtgagcgcccggcccccgcgtcctcggctcgcgcccctttcctccccttggcgccttcccgcccccagcccggccgtgcgcgagccaccgacttggagggggtccaggggagcgggtccagttgagggtttggggtggggagggacgccaaaagcccgacctcgagctgccaaatgagggagcgcggtgctggtggcggaggggcaaccaggatcggtggaaaaggggaaggagggagtaagcgtctgggctggaggagcgcgcgcttctgcccctttcagagccggtgcctcccgcgcccctcaccccaagctctccgcagcgtctggcggttggggaggggaggggaccgcgggcgcgccctgggacctctctcccagaacggtgctgttgaagccagggtcagatgtcgtggctaaaaaaaggcagccggcggcggcgtgactggcagggtcgtcggcagctgcgggtgtcagtctcgccccgcgtcgccgcgggaggggcccacccaggtagtggctggggagacccgcggggcggcggggggatgctcgccaagctgttgtgggagtctccgagaggccgcagatttcccgggatccacgcaaacaccgttgtcaggacaccttatctgctctcggtatcaccacctggacatggcagtgcctgcccgggagtgagcgcgcggcggggaattctttgcttcaatagtgaagcaaactctttttcctgttctagaagcgggttttagcaatcgttcagcttgtgggggcttcctgcattttcttaaggtgtaaggaagttgagagccttttagtattccagagaggttaaactttttttagtttccctcagaagcgagcaaaagttcctttactgtaaggtcacttggaaaggtcaatagaaagcggctgttaaacatgatgttattctcagtgaaactgtatgcatccaagagaaggaactaactttaatgtttcacactgaagaaattgtgtgagagatacaagtacctttgtgactattgatttttaaagaacttttattgagaattc

SEQ ID NO: 11633 - DNA, 1359 bp, Artificial sequence
  DNA replication origin
ggtttgtctagagctcagcggggcccggcggaagcgggggccgcgcgtcccccggcgggcggcgcccaggtccgggtcccgcggttcccagcgcgcccgaagccccctcccccgccccgcccgccggcggaggagtcagccggagcgcggcagttcctcccggaggagggagagagagagagactgcgtgacccgagtcacctgacacacactgtcacatactcacatacacaccccgcacgggcgcgcgcgcgctcgcccggccgcgggcaccactcggcggggcgctgggccgaggacacacatgcacacgcacacgcacacgcacgaggagaccggggaggcgcggggcccctgcaccctcccagactcacaccgacacacgccccgtacacggggcccccgggacgccggccgtcacccaccgcggctgcgcgccaggggcccccacgcgcctctccttcacgtggtccccgcacaggcaggggagggggcgccgcacaccctcaatgtcccccccgccgtcccactcccacacgcccgcagagcgtctaccgtgggcggatgcctcctgcttacagtcctgagctagggtcccaagcgggtggcctcccaacactgtggcgcccagatcccccaccccagagcagcgtgcccaggacaccctgtggacgctcaagagccccaggcggagaactcagataaatgcacagtggaggcgcagtctccatagcaattgtcttttagtgtgcctttatggttcaaagtgcttcccaccaagaatatttaaaaagcaggcctacccagacgtaaatgtttctgaagaaatcacatgactcgtggctgcttagactaaataattcctctgcagccctttggaaaaggtctcagtgtataacacactcgggggctattcatggccacctcctcatgtctcattgttgcatagactgtaatcccacatgaataaaatatttcaaggcttttgtgggagtaggggagtggcggtggtgggggggcaattctcaaataggaatagcagcaacgtggagtgagactctaaaacctgcattcctccttcacaagcttttcaccacggaacacactgtacccaccctttctgggtactgcaaaaaattacgtggatgaacttccttctgtggagcacaataagaaaaaaccggccggtcagcatgatgatccagctcctacaggtgccagcagctcagccggtggtgcggtgcagaagcggagggaggaagctagggcaggagactctcagggcccaagggtgctaacctccataggaaacatttattaaccacctcctatatgcctgaggctgggctaagtagaggg

SEQ ID NO: 11634 - DNA, 1004 bp, Artificial sequence
  DNA replication origin
cgcgggcagtcggcgatcctggggtgccgagggagcagcgcccccttcccccgacagcgtcctccccgacctgaggcgcccaccccggtgtaagcgggggtcccagggagccggcgaggtcgcctggtacctttctctcccgcgccggacgtccgcgccgcagggaccaaggccggcgacacggtggggggcgaggggcgaagacggggactggctcccgctggctccggcggccccagggcctcggcgccgcccagcgccgtgcctccagccgcccgcgcgccaggcagcgctctcggctcctgcgggttacctgtggccgagcccgccgcgtccgccgccgcagggccctctgccccgtcccgccggccccgccccacccctgccggcggctcctacgccggtgccgcagcgcctcccagcggcgagccggggcacggcagggaccctcgcgagagagaggtggcaccgcggaggccctggggctggccccgatctgcagccctctcctgggtggggccaccgccttctgaagagtgggaggaagggggcctatagtagggtgaggttttccgcgtgggggttgccaggaagtgtattgggaggggaggagaattagcaggaggaacctcccaccttcactcaattcgtggccaagtggatatttcaatataaccatagctcacttaactggggctgctcagtacaaactgaacaacaatgatgaatgacccagatttattggggtagctggagaggggaaaggaagcctttatttctaacagcttgactataagtatcttgttggaatcatcccatatggaaatggcaaaagcattgagcgagcctgacccccatattcatatcacactttacataccattatctcagtctggttttgtctattttcattcacagccacttcttcaatacctagaagagctccctgaacacaggaagcattcaataagctactgttgaatacatgtaagatggatgggatc

SEQ ID NO: 11635 - DNA, 1462 bp, Artificial sequence
  DNA replication origin
gcgggacggggcagagggccctgcggcggcggacgcggcgggctcggccacaggtaacccgcaggagccgagagcgctgcctggcgcgcgggcggctggaggcacggcgctgggcggcgccgaggccctggggccgccggagccagcgggagccagtccccgtcttcgcccctcgccccccaccgtgtcgccggccttggtccctgcggcgcggacgtccggcgcgggagagaaaggtaccaggcgacctcgccggctccctgggacccccgcttacaccggggtgggcgcctcaggtcggggaggacgctgtcgggggaagggggcgctgctccctcggcaccccaggatcgccgactgcccgcggaggagacccggacaccgcgcctcgccccctggcctgcggcctccgaaaacgcccggcgcgagggggtccccccggggcgcctccctcttcgcctggcatcagttgcctccctggaatatggaacttcgggcgagggaggtggagaactttcttctggggctcgtccctcgttctcctgctcgcttgcagtttgaaggaagggcggtgggggcgggggtccgagtaccccgcggtctgcggcgcgtaggagggtaggtccctggcctgcggccgcctccgaatgaccccgtccctccccgccctggacgacagcactagggtgcagtcgcaggagaggggccgatacccctcaggagccccatcggcgaagcctcagcaagtggcatctcccggggtccagagagtcggcgtgctgtctggtttgggtccagacatcagctcacccaagcttatcttgggcttttaagtgtgttgcttccggtagatctcggggactggaggggaagtgcagcattatttgtgacccaagagggacttgaatgtctcaaagctggtcaagaatgtttcccccgcgaggtagcatgagatgggtcacgtggtagtaaagagccacttcgggcccgtgagatggagttctgactccaccacttgttaggtgtgtgactttggaaaacccacttctttaaaccttagtttttagaactctaaactgcaggtattgtacataacctcgtagtattgtgttcatgcagtgaagtgatgggaatgaaatgcttggcattgtactcttgtgtgttagacaccttttgcgaacctgttggatgttgaattcattcatgcttaggttctgttaggccagtgtaagtggaaagaacttgggcaatgaagacaaacacacctgggtccaaggtggtcccatccatggtatactgattgggggtttctcatccccaaaacaccaatagcagccttggcggggtttttgttgttgttgttttgagacagagtttcgctctgttgcccaggctgtaagctttgacctccttagctcaaccgatcttcccacctcagcctgggaccaccacacctggctaa

SEQ ID NO: 11636 - DNA, 822 bp, Artificial sequence
  DNA replication origin
gcgggaagggagccccggccgccgggcgcgcagccgccctccccgcgccctgcccgcttttatggcattttctaggaacgggaagggggtgggagccgagccggcggccgcgccgcgccgaatgtgtgctctccctcccggctgtttacggcggccgaggcgcattgtattttgctggcgtcgaagggtgttttggaacagcagagggaggaggagcagagagtaataagtcaggcatggggagggcgggctgcaggaggcgcgcgtccgcgcgagccgcagcagctgtcagacccgcggccctgcccccggcccggcgaggcccgggtgtcccggcccccagcctgcgatcccagctccaggccgggcggcctcctccttaaccctcggcgtgcgcatcccgggctgctccgcgaggaccttggccgcggcgcctttgcgctcagctgtcagccgccgccgggtggcccggaccaccgcgaccggcggggaatcaaagcccaagtttagggtcgcaggaagaggcgagctgggggcctcgcggcgcagacctggatcgaatctctcctagcgaaagatcgggttgtcggaaagcgtcccgcgtagctaagacctaagggcgccaggcttctgagagggaaaccttgcacctcctctcccacagatcctccatgaagtcaaggtgcaacacacacacacacacacacacacacacaccctacactccagtctccaagccccagaagcttcacccaggagactggtttatgaaggggacactgccctccccgtccccgcgtcgaggcgctccgtggccccgct

SEQ ID NO: 11637 - DNA, 1190 bp, Artificial sequence
  DNA replication origin
cgctcacgttagcgctgtgcgaccgcagcccgggcgtgcacggccgctgctgccgctgctgctgctgctgctgctgctgaggcggcggcggctcggcgctgtttgctccgcgccgcgcggcttgcgctctccccggaacgcccacactctcaatcgctacattgttgacattcggcgctgacgtcacccgctccccattcacaataactttacgggagccgggcagcgcacctccccggccgctggggcgcggtacgcccggcgactagcgtaagccgctccgcgaatggcgctccgggggctggggcggggggcgggggacgggggcgggcgcgcgcgctccgctggctcgcgggagggggcgcgcctcatgccgccgcagcagcagatctccccgctttgtgcggccgcgcggcccggagagccccctcctcccggcccggctgaccgccccgctcggcctggccttcccggccacgaaagacgagggttgggggcatagcagggtgagagtagtggtgagggctggtgtggcacgtggggagggggccagagccctaggtgctgcacctggggaaggagagcagacgtcgggaccggggatcccagggttagctagcgttttcccggaagggcaagaaaagatgctccactggcccccacaaagctgaccggactcccttttgggtggggaccgggcgagtaaaagcagccttttgaatgttgacttctcaatccttttcaggaggccctccgcctgccctactgagcgaacctttaagcccccaagccagtgtttttggaaagagagtggtcaatttcaggaggacattaaaagccaacctcccgggcttcagccccagctcctactgccttccagccactctcccctgcctttcctttctgcggctcttaggatgttgttgctgcccttaaaggccgtcgtgtgagtgccctgtcagaagaaagcttggtggtggttaggattttacagaaggtaattaggatttaggctgaatgtacatttgcaataaaataaggttgtgttagtgttgtgctggtgcctgcaactttacctcttgccaaggccagaaaattctgccacgtttccctaaacacctataacttggccctcttgtgtacaggcagtattccatattattacacgtggtgctgatttttaatgaata

SEQ ID NO: 11638 - DNA, 1152 bp, Artificial sequence
  DNA replication origin
tagaggggccccgggaggcaccttcagagccggcaccaggcagaggcgggggcggggcaggccgggaccggcgtctccatgccgggcctcgctcacctcttccacctcgatctccttgtagtcgatctcttcaaagttgaggacctgggaaggggcttcgatcatctcaccggccgaagacgaggaggaggaggaggcggcagaggctgtagacatgatccctcgcggcgcccggtggggccgggaacggtgccacccggacaatccgggtgagacccgcgcccacccgcctccggaccgaccctcagcctggagccgcgcagtcctactacccggcgatccgtggcgggggtagaggcagcggccacagccgtgtccggctctggctccgctgcgttttccgccgacgggccccgcccactacacttccggttccgggctgaaatcggaaacaggaggagggccgtaaactccggggtaggggaggggagaattttgtgacttggaaagaaaaggagggacaggttgggggtggggtggagtaagctaagaagcaaacttggacctctagaacaaatttcgcgagacctttattacagggcctcagcaaccggatgataccgcgagagaggacgcctgacgtaattaaagtgcgcgaacggaagtggcgcggaacatgacggaaaatcagtacggttggtcccttaaggaccagcgggaaagataaaagctggggtttagtctgtgctgcgtgaaatatgtcttggcctcacttcctgtcctctgagctgcctgcagccgggcgaggtggtgttgaactgtgttttttgtgacgaagcttacttttaagtttcatccctaaactaagttgacctgtttctttaagacggcttgcaaaatgtgttttcctcaatgtgggatatggaaagaagcagttgctcctgttattttgagctagtacctgacgctatgagaaattctaaaagagcgaatcagatcatgcaacatgaataactatggaggctgagtgatcaagaacagaagttaatattttggtgttacaaactttccacggattaggtgaataagatatttataatttggtgtgttcatctcaagttatggattacgagtgcggggcactagtgcttt

SEQ ID NO: 11639 - DNA, 988 bp, Artificial sequence
  DNA replication origin
ctatgatagtgtatacagtgtggtttttggttgtaaagaaataacgtgtatttttaagtatctttaaaatgtttcaataaatgagtataaatgcagctcatctttaggcaattcaacttggtggtgttttaattttctctcttaaccaactttcataattaagaacttgatccaaacctcatttctacaggtaaaagttacggaacatggtttttaaaaaaacacaagtcaacattgtgcttttaaataatatgttcatatttgactatggaacatcatatacgatttcgtttttctctgtaccaaggaccaagaggagtatttggaagtctgggctccagtctcagctccccactcggctcgtcggtcgcgggccgacgttcctccagccctcgcatggatttctgggcctggtgttggggacatggtgacaaagaagccacggtggctcctgtcctcagggaagccgtggtctcagaggtcccacgtagcagaaatttcatggttggaaatggtgcgaaggggacgtgtgtcttaagaccgtgtttgtgtagtaagccgagttctttcttgactgtctgtttatttgggatagcccggcgagggggcgctggagattatgggggtgggggcggtttcttggggaggcctgggtctatggagtggaaaccaatctttgatgaatttggtcacaataacgaacacgggagaaaaaggagaattgaaaggaaatggattctgcgagagactggggagacaaaaccaagaggaaaaacacagaatcaaaaacgacaggaaacactagagaagagtaggcagaaaatagagaagaggaagaaacgagtcggacggagacggggccgggcactgggagcttgaggctgggtctccatccttcctttcatcctctcgggagcccgcagagacggcggcttcagtctcgctttacgggtgggaaagcagcgaccttgagaggttaggtgactgc

SEQ ID NO: 11640 - DNA, 1280 bp, Artificial sequence
  DNA replication origin
gggaaagcagcgaccttgagaggttaggtgactgctcaaggtcaccgagctaagtgccagagccaggattctcaccgctcctcaccccagatcggggctccggccagaccacgctggccgccgggggagaggacgcgcggggcgggcagagcgcggccgggggccgggaaggagccggcgccaggcgcgcgcggaggaggcggccgggcggggagccatttcctccccaagcaacggcgcttttcaggggcgcgaccgggaagcctctcttggcgtcccttccccagccgcagtttgggcaggggagcgagggccgggaggcgtctaggctgtggcgaggggagaagcatcccccatccctccgctccccgtctcgctcaagctcttcctgcgccacgggcaggtctcccagcctcgccatcgcggggcgtccccgtcccggcccacacctctttcctctccagccacaccggcgcgccccgagggttgcaggcgggggctgcaccgggttgaagcccagtcaaccacacgtcccagggcttaggcgccgggcggggacaacgtgtctgcctgggctcagacgctgctagggggcatccctgtcggtgagaccagactcagacacgagggggcctgggctattacaaacctcagggtaacttacaggaatatacacaaatacacaagactagcaacgtttgtacctcagggggcaaatcaaaacaatcacaaggacgaatcttgcccagtctatattgtaaatcgatgcagttgcatattatgagcaccccattcgaagaatagctcctgccagtcctcagtgattattcaatgattatcaattgacgagacacctttcacctgaaaatggcttgtctgcattgtctttcttctcagagaactgcgaattaaagtttctttgttagggagaacaaagaagaatccaaattattttaaggaggctttagcatttgacttggcaaaccgttttgctaaagatcaacccttcgctctgtggttcgccccctctctgtcacagcctcacagccgagttgtctttgaaacaagactagagctcctggtgggtttgggggctccctcttctagaggtgagcaatttagagctaaggggaaatttagaagccgcgtaacagacccgttaacattcacatcggaggcaactgaggcctgcagaagttaaggctgtcttgccagtttgtgccaaagctgggacctgacaccgggtccgggcctggtgctgtgcgcgttcgttggagcag

SEQ ID NO: 11641 - DNA, 940 bp, Artificial sequence
  DNA replication origin
gaactgggctggatttttatatttgatgaaaaagagcctaaacgctatctgatttgggataaagaaaaaggagcattaaccttgactatgcctttagctccagccacctttttaagagtaaattgctgggcaggtgggggagggctagtcacggaacgaaactgtaagccaggccaggtgtgaggaggggaggtgataaaaagattatagggtggaggagcagaggctgaggaagaattgggacctagctcagcctggcgaggatcagcctggggaggaagggagaggtcagatgggtctgtagaaaaggaagattagaaagactcagcgatgcttggggttgggactgaggggacaggcaggagggaaagaaggaagatttgggacgagttgcactgggcacagagactaggaagggactgatgtgtaaaagaatgcctggacgtcaggcacctcagaccgtttgcctattttatgacaagaattatttagatcttgcaggatggaaaaattcaaagtgctattttctggctatttggaactactgtcgagtttgtattggggtcaagtggcattgcagaagaaaataaggcatttaggttttaggtcaggtgtgagttaagaggttttaagtttttgagaacacaggccaagggactagaaggaggaatggaaggtggaaggttcccatagtgaaggaagcaagcctagagaaaagagagagtagataaatggagggaaggggttcgggggttcttaccttccagaaaagtgggaaaaggggttggggcgcagagataagaggtcggggcatggaaataagggatggggcgcagaaataagaggtaggggcacggaaataagggattggggcgcagagatacgagctgggggtacttgcccctcctctagaaaagcgggacttgctgctaggagtgaa

SEQ ID NO: 11642 - DNA, 1438 bp, Artificial sequence
  DNA replication origin
ccactttggggacccagccagtcacatggtcactgtgcccaaccccaacccgccaagggcaccaggtttgtgtgccttgggcggagtctctgcacagggcctcccggggccgcattcccggggtccgctccacatcaggtagccgccacgcctgacactaccaatagctaggcccggggcgccatccactcccggaggcaccccctcaggcatggccgctggctgtgtaagaggaagctctgggcctgcctgagcaccagggccacaggggagctggcagcaaagttgcccctgccccagatgcaggccaggtcccagagagaacctggggccccgccccaggctggggggagatgtggctggtgctgcacactccacggagcaggcagaagcctggaacgagcggaagccccaccccttctgagttggtcaggtgggagcttcctgggtgcagctgcagatgccctgccatgggtctggacccaggtttctctgcagtctgcgccttcaggggctctggaaggacccccccccatccctgacccctagtcccacaggctcaggagtgtcagctactgctgcgtggccattccccattcccaacacaccctccagtctcagagcagggttggggccgagcttggatatcttcacggcctggccaggtgggtggatgcttgaggcagtgctgacatgccagcccctcccacctcagccccctctggattttgggcaccaacaagctcaggtgggggagacggtgaagtgggtgctgaaggctgctaggtactggcttgcagttgccccatggtgtgagcagcctgggcaccatggacagtggcaggagtcagaaggcttctgggtggaagggggtgggtccccagtgaggccccaccttcaggcaagggagggcctgaaggctgggggctggactgccagtccctcagaccagagtggggacttggggtggcttttctggtcagcctatggccgcccatggacatattggcatacacttcctccccactgaggcccatgaaatcccgggtctcagacagaacagagtagaggacagagaaagcacaggatgaccagctgcagacaggggctaccttctcttctgagagctgcagagacaaaggaggccccactctagggcctcttctctgccgagagttgaagacgaatgaccagctgtagagaggatctacactctgaactgaacacttgttgggattacctgcctgcagagaggagttccctctctgctaggagctgaacacccgtcaggacaccctgactatagagaggatctacccactgcgggtcttctctgggctgttctgttgctcaataaagctcctcttcatcttgctcaccctccacttctctgcatacctcattcttactgattccaggacaagaactcaggacccat

SEQ ID NO: 11643 - DNA, 783 bp, Artificial sequence
  DNA replication origin
tgttgggctgtgtaggacaactattggaaccacgttgtccaatctccctggctccagcaggggagcagggtgcggcctggagctatagagatggatgccgcccttccccagcccaggcagttatgagtcccagtgttggctgctgccccttcccacaaggaaggaactcaaacagcttagagagcaggcagcgcagctgcggccctggtcgccctccctccccggagcttgacaggcttaagcagattctagctaagaggctgttgaaaatctgcatggctccagggttgagaccctaggccctggtggcgtgggttgaacagttccacggaaaaaacaaaaacatggtttccctggctgggtagcactctcactcaccgcctcccttggcggggtttgggtgggggcggggaagcgggggccgggggtggggcgcggggaggggcggggggtcggtggtgagggctcccctgaccggtgtgccgctgcaccacattgctcttcctttctttccgtggatcacgccagccacctagtcagttctgatgagagaacctggataccttggttgccagtgcaggatccacacactaattatggttctttttgatgggagccccggattgctgctgcttctattcggccatcttgtccccaccccgggatgacatctaggtgcaagatcccagccccacgcctcattctccacaagctcctctgacgtaaggggctgcccagtcacccgctcacacccatccccttcctggctcaggggacagctgg

SEQ ID NO: 11644 - DNA, 1102 bp, Artificial sequence
  DNA replication origin
tctggaagcacccaaatagtgcaggagcttcttggtacaatgttttctaatcctcctatatcgctcttttagccactacacctaaagaaaaataagagctttggcttattgcaatttcaaagaagattttaaagggtaagtttggtgctactctcatctccttcaagaaaaagcttcttatcctcaagagttgctgagcttttgatagtgttgttgctgaaagagattcaccacctaggcaagtcctccgttcttaacctggaagtaagaccaattccgcaggaacaggtaaaataggtgtatttcctgtactcagctaagacgcctctcaatgaacagaacaaacctaagcaatgcaaatagttctgcgctttaaaacaacaataacaaaaagtttgtttccaaagggtttggtttttgtctttattttttcacgcttgataatacccttaacagcccaggtgctgagtaacacacaaagtaactgtacagaaaccaggatcacagcgtgtctgtgtcaatttcctgaggtgactgtcagaaaatctggacaggcaccattgtgtagagggaatgaggtcagaattcactaaggaccattcaccctgggaaggaataggacgggacagtcgggctcgagagccaggctttgggaaaggagagaaggtgggtcagggaggactttgtggagaaggctttgtcagcgcgagatcgggtgaagggtggcagataggggcgtttgtgcactggcataaggtgggaacgcagggacagtaacagtagagatgaccctgtttggggtgaccagagggtcggggccatctactgctgctagtgtgggagcctgggggctggaaggtgaggcgggactgcgagctgcaggcagctgtccccaagacggagaggggttcaggttgccagcaggtggagttgaaatcaaacatccccttggggaccacagagcaacaccctccctggaccctctgcctggaggacggggaatcacagcagctggtttggggtgcctcccaaaccaaaagatgttctctccgcgccaagctttgacgcccgaccccctgcactctcccgcctactcaccggt

SEQ ID NO: 11645 - DNA, 1054 bp, Artificial sequence
  DNA replication origin
gcactcctcagcccttgggcggtcgatgggactgggcgccctggagcagggggcggcgcttgtcggggaggctgcggccgcacagagcccatggaaggggtgggaggctcaggcatggcgggctgcaggtcccgagccctgccctgagggaaggcagctaaggcccggtgagaaatcgagcgcggcgccggtgggctcgcgctgctgggggacccagtatactctcggcagctgctggcctgggtgctaagtccctcattgcccggggccagcagggccggccggctgctccgagagcggggcccgcaaagcccacgcccacccagaactccagctggcccgcaagcgcagcgtgcagccccggttcccgcttgcgcctctccctccacacctccctgcaagctgagggagcctgctccggccttggccagcccagaaaggagctcccacagtgcagcggtgggctgaagggctcctcaagtgccgccaaagtaggagcccaggcagaggaggcgccgagagcgcgcgagggctgtgaggactgccagcacgctgtcacctctcactgtaactcttaggcaagtcctagtgcagaagtaggcccagagacagtgcactgtggggggaaacatgatctagtgagacaccagctagggcagctaagggagtgctggcatcacccctccccaaaccccaggctgcacatttcatggctgcagaagtgaccgtttccttccacttgaggagaggagagggaagaacagggaggactttgtcttacatcttgggtaccagctaagccacagcaggataaagcactggtcagagtcgtgaggaccccattccaggccctagctccaaacgacatttctagacacaacctggccagaaatgaacccactgccttgaaaaggaagacccagtcctggcagcatttatcacctgctaatggaagagtcactgggccctgaataaccagcagtaatacccaggtactacgtcgagggccttgggtgagtttctgagactttctggcttcaggtaccagcataat

SEQ ID NO: 11646 - DNA, 1168 bp, Artificial sequence
  DNA replication origin
gatggctggccaccagtaggggatgacaactctttgataaattaaagtgatttcaacagaaacctccttagctctaaagcatttggaaatgtactgggatgaagctcttgctagagctcctggcttctctcatcctctggagcaattttcgaagaggaaggcaagctagggacgagtgcactaacatacacctgcgcacagaggcggactggggaagtgggaggagggtgtactcagctatttcactgaagccattttcaagggctagggctgttgctccagccctgggataaacaggcgtatttggttgaagttggacttcagttctcttattctgcctgcacacagcacgaatgcaaatccttctgaagtgtacaagtgcacttaacaattgtgtcgttagtgtccgggaggacggcggttggggggggatgggggggtgggcggggaggggagcaggtggtgcacgggcgggagagatgcttttctggagagcagttaaccacagtcgtaataactgtgggccaaaatcttctgctaggtctcagagtttcgaatctgtcattctagacagcttttggacatcataaagttagagatgattgtatttttaaagacaggtttccagaatttgggtcctgggaacataggggcagacgttggccggaagaggaggcaggaagaggaagccttaggcagattggagcagggagacctcctggctcctcttgtcttttctgagagttttcgatggtaatctagggcagccgggtcccagcattaaatgcaaaataggaaaacagaacacggccgagtcataggcctgatcatattaacgccctaggtcagagggagagaataatgaataggcacggagctcagttcgtggaagggaacttaattaaccttgggagagtgaaagaaagtcagagatcatgcctagtacttcggtctggggtgcttatattaatatgtgtgtgtgtgtggtgtgtgtgtgttgggcaggggagaagtgtagtctgctcaatgcatttttctaatatatatatttttaaccctggaaaaagctggagttactcctcagggccatccaaacacccacacaatccctgcagggaactcccctgcgggagcccccgaactcggtagtgaggtcctgtgtcctagc

SEQ ID NO: 11647 - DNA, 1172 bp, Artificial sequence
  DNA replication origin
tatcaagacaccttgtcagttcaaagcattttagcgttgtttgaaatcctctccacgtcaacgtaagcagcctgtgtatttgaacagctgctttgaacagtgaaagggaataaactgattcaaaacctggaggtgtctgcccgagacaccttcaacgtgcttttatgcgggcggagaatggcaggcagacgcgcggactctgccctgacagggtcagcccaaagaatgggccccagagcccggggcgggggaggaaccggtggagaggccccagtctggacctaaaaccagcgagagctcaggtttcgggagccccgaagaggtgccgcgctgggaggcagacaaggaagcccagggtgctcggaacccggcgttcgcgccaaccgggcccctggcgcctggaggggaggcggcggtagctcgtggggaggtgttgctcagagccgcggtgcgagcccagcctggcccgcccggtgattggccgcgcttgggggtgggggtggggtgcagagactgaggccccgggtaggctatttctttgtgtactcccggggatttattgggtatattaaaccctgttgggaacgtttcggctccttggccgccagcgaaatgagacggggatggaagttggagttgagacctgggaagtcaacgtgggaaggatctcagcattaatcgccggtgatgtcctatcgcagacaggaagttttgatgtacacgtgcagcctattcttgtcccctcacactagcgccctatgccgggaggagggcgggggtgtggggtggggtgtggagagaaagataagaggaggaggaacttttaaattgattcagagccaggccgcctcagttccttcgaagatgtgtttgaaaacttcattcttctttcgagtgtatcatcctatgggctgcagaaggccttgtgcctcgagaaatgtgaaattaaatccagagaaaagcagacacctgccccagaaaggtgggggagaagtatgagctgcttagcacttggacgcggcccttccccagggctggattcttctgtccgtgggagctctgagctccaggtccgcgaaaagaaaggcacgacatgtcaggagaagatgcggctggcgggctgtctgtgcgctccccaaggcccagggaaagtcacgcgcctagcacagggg

SEQ ID NO: 11648 - DNA, 941 bp, Artificial sequence
  DNA replication origin
agaaatgtgaaattaaatccagagaaaagcagacacctgccccagaaaggtgggggagaagtatgagctgcttagcacttggacgcggcccttccccagggctggattcttctgtccgtgggagctctgagctccaggtccgcgaaaagaaaggcacgacatgtcaggagaagatgcggctggcgggctgtctgtgcgctccccaaggcccagggaaagtcacgcgcctagcacaggggacgcagggccgaagccgggagaaggcggttctgcccgccacccagccccttggctcgcggttgcggagccgcgggcaccagtcgctgagtctgcgcgctgaggctcggacttgttcattttttcctagctagacaaagttatgggattcctagcagcccccaggcgcgcggccagagtggccccgcgcttgcgctgggacggagcgacacgctgtgtgtgtcctcgcctcgcctcgccgcgcgggtgcgcgcgtggtgggggtgcaggtccgtcctgctggcggcctgtgggctcgcccctcccctatccatttctctcccccacacacgctcataaacacaggacacgtggaaattctcagccaaagcgtcttgcccgggcgggtgctcaacgtggtgatttataaacagctcagccactctccaaagagcatgactccttgttagtcatgatgaattttctggcccgctccagtctgctgtctggattcagatgctcagaggccccaaaatgctccctctgagcgttgatttggctgccctctcaagcctacgaccgccggcaaaaccagcgatagagcgaggggtgagaggtggggacgcgatccaggttccctggggtctgtcattcccttcccggcagtaactgttgattcgctttacagcgcccatgtacacacccggccctgcgtggcggtcacg

SEQ ID NO: 11649 - DNA, 1686 bp, Artificial sequence
  DNA replication origin
ctctgggcggctaaagaactgatggcgcgacgcgcccgcgctccgtagagcggcgctgcgggtgcatggtcccatagtcttgctctggagttcactgctgaaagctgagctgggagcttggccagggagcgccaaagacatagactaaccccacccgctagcgcccaccgaagttactgattaggaaggttcccctggcatcagcccatttgcttcacacactcttcctccttcccaaggggctaacggaaaagttgcacctaccagcggtaggagcacggggaatcgcgcacgcaggccctccgcgcggcttcccggagcggcctttggcgactgcgccgcccctacaaggccgcacacccctcgccagcactccggcagcctcgcacaagacggagcccacgcaggcttctagttttctaaaccaaaaactgcacgcgccggcgtgtgaatctgacggagagacttttagagttttgtttggttttcagttcagaccgctacgctgtcagagcaagcaactccgagccttgatgggaatgacttacaagccgcggtgcgggctgagcctgcctctctcggggttctttccccaagggagtgggagacaattgggcctggaacctaaaaggaagagagcctgtgctagccgcggggtagaggggaaggagaagagctttgggccgaagtgtccgcacaccctggagcaagagacacttgtgcactgaaattctaaccgtgggatgcaaggagagttgaacaggggaacaggtctggctcttggctctaggtttaagagatacacactgtgtgtgtgtccctaggtgaataaaaatccgactcccgctggctcggtgcgacccagcttttcccttaccccctccgtttccccatcttaaagccctattgggaaacgaaagtggacaccactgcctcccgccccccaccccaatccaagtcttccaagtgtctgtggccgataagagcaccgggaccgcccccctgccggtcttctctgcctgggagacagatggggggcggggcccatccgagagagggcggaggaggccccgggtgaggaagaagcgggggggtgagaactgagagaatctgaatcgggaggcgaaggggacggggaggagggctaggaggactccgagcccgggggagggggagggagtagctctgcgccaatcagtggcgccggcctgggaggttgctagcggtatccacgtaaatcaaagggcgcggagccaatgggagggggcggagggggcggggcccaggcgcgtgccgctgcgagccggcgctgccaagagagcgggagagagctggagagagcagggagaggggggagcgccgagctagtcagagagtgagcgagagcgagaaggagggagaggaggagaaagagagcgagggcgggcgggaggcggcggcggcggcagcagcagcagtaatagcaggagcagcaacagaaggcgtcggagcgggcgtcggagctgcccgctgtgggagagagaggagacagaaagagcgagcgaggagagggagcccgaggcgaaaaagtaactgtcaaatgcgcggctcctttaaccggagcgctcagtccggctccgagagtcatggcgaccgcagcgtctaaccactacagcctgctcacctccagcgcctccatcgtgcacg

SEQ ID NO: 11650 - DNA, 1462 bp, Artificial sequence
  DNA replication origin
ggtccaccagccccctgggccagccggacatcaagccctcggtggtggtgcagcagggcggccgcggagacgagctgcacgggccaggcgccctgcagcagcagcatcagcagcagcaacagcaacagcagcagcaacagcagcaacagcagcagcagcagcagcaacagcggccgccgcatctggtgcaccacgccgctaaccaccacccgggacccggggcatggcggagcgcggcggctgcagcgcacctcccaccctccatgggagcgtccaacggcggcttgctctactcgcagcccagcttcacggtgaacggcatgctgggcgccggcgggcagccggccggtctgcaccaccacggcctgcgggacgcgcacgacgagccacaccatgccgaccaccacccgcacccgcactcgcacccacaccagcagccgccgcccccgccgcccccgcagggtccgcctggccacccaggcgcgcaccacgacccgcactcggacgaggacacgccgacctcggacgacctggagcagttcgccaagcagttcaagcagcggcggatcaaactgggatttacccaagcggacgtggggctggctctgggcaccctgtatggcaacgtgttctcgcagaccaccatctgcaggtttgaggccctgcagctgagcttcaagaacatgtgcaagctgaagcctttgttgaacaagtggttggaggaggcggactcgtcctcgggcagccccacgagcatagacaagatcgcagcgcaagggcgcaagcggaaaaagcggacctccatcgaggtgagcgtcaagggggctctggagagccatttcctcaaatgccccaagccctcggcccaggagatcacctccctcgcggacagcttacagctggagaaggaggtggtgagagtttggttttgtaacaggagacagaaagagaaaaggatgacccctcccggagggactctgccgggcgccgaggatgtgtacggggggagtagggacactccaccacaccacggggtgcagacgcccgtccagtgaactcgagctgggggaggggcagagcgcggggctccccctccccttcggtccttggccctttcccggccctcttgttccctctctaacttctgattgttcttttatttttaattattatttccccgtcccttaaaaagacaaaaaaaataaggcaaaaggaaagcaactaagacactggactatcctttaaaggtagcaggtgtaatgatgtgttttgacctttgcaggcgagtaaccaggcaatggagtggagtgtctcctggagagagtgaggagagtgtgtgatagctagaaagagagagagacagagagatggcaagcactgagataaatacctggcaaaactaaataaattaccaaaaaggaaaaaaaatccaccaaaccatgataaacacaaaatgcagctt

SEQ ID NO: 11651 - DNA, 1306 bp, Artificial sequence
  DNA replication origin
agcctgcctaggccaggcacccctttgggtgagagcggagggcccctgggacgcccagccaggcctggcgtctggggagccggggctcctgtgtgtgtcgggcaggctccgatggccgaagcagggacgaaggaacggcttcgctgcgggaggctagagggctgcgcttccgccctcccggcctccctcttgccgcatgagcagcgcagggcctcctgggctgtgctggggtcaagagttatgaacacttcgtgtcctcaggagctcacgggggtgacgagaggcggtctgggtctgaagccgctacacagaggggagcagtggggcctcggggagcagcggggcctcggcttggcggctccccccgccaccccgccacctttcaggacccaggccaagccgcctcacgaagaccaggaagcggcctctgccgggaagccacctgcagcctatagtcccctccccaagcggccccagcccgtgctatctcctacatagttgccttccgaacgcctggagggccctgacccttccggtgttccaccgcaatggggtcggggggagaggggggctgtggctgcctgagacctccagggcagcgcacattacgggcgggaaagggaagtcaaggcaggaaccagaacatccagggagaatgcaggtctgacatgagccaaggccttggcagtagaggaactttcaccaggtcgtggaaaagaccaagccactagccccaaagagccggacttctcgccaagcgccggagtccctgaaccaggatatgtgggcactgctccctgcaaggtgtcgataatgcaggtacgtgaagacacacgcatttccaaaagaacagacctaaatgcagaactttaggacccttagagtaatcaaagttagttaggaggtgatttagcaatctcaaaaacaaaaaaggaagaatgctttggcagaaagaagagagaagtggagtaggcactctgggtagaagggaactggcacaatgtgaggcaggaagcaggaaaaggcagagggcgagcaggtttgctgggctgggccggggagcaggagctggcacctggcatgagagggctgctaagggaaacagtgtatggagttaattggtagagggtctggaagaagttttaattagactcaaaaggcaattaagagccatcgtagagggggagatccgatggaaataatgctcctggaaggaagagagttggcacagtgcattggataggttggaaagtggtaaggatgaaagcagggaggttaactaggtaggaggttgctggtgtagatc

SEQ ID NO: 11652 - DNA, 986 bp, Artificial sequence
  DNA replication origin
acgtcagcagttctcaagggccccagcaagccccgcaagcgtgaagcggaggcgcgggggcgcggggccgcgggcggggaggggcgggcagcgggggcctctgccaggcgtccagactccccaaagcgcggagctgcgcgctggctcggccccggccccgccccggcgccaaaggaagaagacagagacccacgggagggagaagtaaaggaagggccgtaccctgcagggtccgggagaggcgcgcgccgcgggcttcaccagcgaccaggcagcgcgagaaggcctgggtgcgggggcggctccccgactctctagatgcggcacaaccgccgcaagcccggcctagcgcgacccggaaggaagacgcggaggccgcgaggagcggcgggcccggggaggcggggcggagccggggaggaggggcggggccgcggggttggggcggggccggggaggcggggcggggcctggagggaggcggggcggggccagaagcaaagccgggcgtttctcccatgggaggtgctctgggtcctacggacagcccgctcccaggccagggggaggagctttctgctggcttcctagctccagtggtgcccgtgtaaagggcctaggtcatacacagcgggtagtgtctacaaatcctcttcggaataatcccttccgagtaccggctcgccatgtgtagtgtggtcctacaaggacttcttcagtccagacttggtggatcagatgatacataggtaatacggctggtacgcatacgtagaggaaaagtataatatacattatatgcactctgaaggtataattcacctagtttacaaacctcctcttccctgcatacaaatcctgcctgcaggctcatttccataccaacgttcagaagcctctgaccattacctctgatgaagaagatggtctggcagcctctcttactcattttgatttatttttggtagattcagtatggcacttta

SEQ ID NO: 11653 - DNA, 1050 bp, Artificial sequence
  DNA replication origin
cttctttccacacagacacagcaaccatccgatttctcaatcttttccccacctttcccccctttctattccacaaaaccgccattgtcatcatggcccgttctcaatgagctgttgggtacacctcccagacggggtggtggccgggcagaggggctcctcacttcccagtaggggcggccgggcagaggcgcccctcacctcccggacggggcggctggcctggcgggggctgacccccacctccctcccagacggggtggctaccgggcggagacgctcctcacttcccagagggggtggctgccgggcggaggggctcctcacttctcagacggggcagctgccgggcggaggggctcctcacttctcagacggggtgattgccaggcggagggtctcctcccttctcagacagggtggctgggcagagatgctcctcacctcccagacggggtcgcggccgggcagaggcgctcctcacatcccagacggggtggtggggcaaaggcgctccccacatctcagacgatgggcggccgggcagagacgctcctcacttcctagatgggatggcggccgggcagagacgctcctcactttccagattggacagccaggcagaggggctcctcacgtcccagacgataggcagccaggcagagacgctcctcacttcccagatggggtggcggccgggcagaggctgcactctcggcactttgggaggccaaggcaggcggctgggaggtggaggttgtagcgagctgagatcatgccactgcactccagcctgggcaccattgagcactgagtgaaccagacaccatctgccatcccggcacctccggaggccgaggctggcggatcactcacggttaggagctggagaccagcccggccaacacagcgaaaccccgtctccaccagaaaaatacgaaaaccagtcaggcgtgatggcgcgcacctgcaatcgcaggcactcggcaggctgaggcaggagaatcaggcagggaggttgcagtgagccgagatggcagcagtacagtc

SEQ ID NO: 11654 - DNA, 1299 bp, Artificial sequence
  DNA replication origin
ctgtccaatctggaaagtgaggagcgtctctgcccggccgccatcccatctaggaagtgaggagcgtctctgcccggccgcccatcgtctgagatgtggggagcgcctttgccccaccaccccgtctgggatgtgaggagcgcctctgcccggccgcgaccccgtctgggaggtgaggagcatctctgcccagccaccctgtctgagaagggaggagaccctccgcctggcaatcaccccgtctgagaagtgaggagcccctccgcccggcagctgccccgtctgagaagtgaggagcccctccgcccggcagccaccccctctgggaagtgaggagcgtctccgcccggtagccaccccgtctgggagggaggtgggggtcagcccccgccaggccagccgccccgtccgggaggtgaggggcgcctctgcccggccgcccctactgggaagtgaggagcccctctgcccggccaccaccccgtctgggaggtgtacccaacagctcattgagaacgggccatgatgacaatggcggttttgtggaatagaaaggggggaaaggtggggaaaagattgagaaatcggatggttgctgtgtctgtgtggaaagaagtagacatgggagacttttcattttgttctgtactaagaaaaattcttctgccttgggatcctgttgatctgtgaccttacccccaaccctgtgctctctgaaacatgtgctgtgtccactcagggttaaatggattaagggcggtgcaagatgtgctttgttaaacagatgcttgaaggcagcatgctcgttaagagtcatcaccactccctaatctcaagtacccagggacacaaacactgcggaaggccgcagggtcctctgcctaggaaaaccagagacctttgttcacttgtttatctgctgaccttccctccactattgccctatgaccctgccaaatccccctctgtgagaaacacccaagaatgatcaataaaaaaaaaaaaaaaggttaaaatggaaaaaaaaaaaaaacagtgtgtcagaactcccttgaaggcttgtcaaaacacattgctgggctccaccaaaggagtttctgattcagtagatccagggtcaggcctgagaattgcatttctgataaggttctgaatgatcctggcattgctcatctgagcccactctaagaatcatggctataaagaaagggagcttcatttagaatattaaaagtggtttaggagaagtaaaaataaattcattacatggagaaaatgtgggtgatgagtagaggggac

SEQ ID NO: 11655 - DNA, 1512 bp, Artificial sequence
  DNA replication origin
gtgatggtggtgacccgcgccgcccgccgccgagttctccccgctcccggggcgcccgcacgcccggcccccgcccagcagcctgcccaaagcgaggccggctccttgcttgctgctgctctcctcccggtaggggtcgccgtgagcggccgccgccgccctcgctaggccggcgggcttgaaagctgagcgcacgccggggtagaaagccaggctgccgacccccgccgaggagccgcccacgatgccgaggaagtgcccttgtcctcgggcggctccgctcatgtccagggcacggtccagctgctccttgcccttcttgggctgcccccacttgcctggggtcggcgaggtggccgagggcgcggaagaggcctcgcgcttgatgccctcccgcgcaccgcaggcctgaactggtggcgggcccagggggtggggtcgcaaagttcctgcctgggaaggcgcggcgaaatcgggcgccgggggttttggggagagaccgaggccatcagccgctgggacggcgccttggcgagccgcgtgttcgtggtgcaggaaggcgccgcctccaccgccgctgaacacgcagtggaaacgcaggtgtgccttaaggctgttggggtatctaaacgtcctccagcagtaccagcagatgtagcgctcctcccctgggcaagaaagaatggaaaagcgacccggtgagaggcgaacaagcgagacataaagaaagcgccagtgcacccaaggcaaagcccaagtttcgactagcggtgtggggagagggtgaaatataagttcggtagccctactgtatcgaggaccccgaaaagccccaaatggccaatccttatcagtgtctccatcctctgggactactcggaggccaaaaaaggtgacggggcctttccaacgaagacttcctccaggccatccgagcaaaatcttcgttggaagggcagcactcaggcaggctggccgtgtaagagcaaagagcagctgttgctttaaatcaagtgttgaggctgtgcagtgcctgggcccatctgttggcgtttgcagaataggtggcgtatgtcaaggagtttggataagctgaacaaagaccaatctaatggtcgtgagcgcctcattaccaggcgagacaatatcctgtatgtataggccatatgtaatcattccttttcacaggacaatgtcttttgtgtcccctacccacccattccacccccttccagccttaaacactttgcctgaggttttcctggagcgtgaccaactgaaggaccacatagggactatgatttgccattcttcaaaattatttgtatctttatttcctctttaacaccatttaatttgctgggagaaaagaaaaaattcttatgccctgatactctaaaaagggtgatgataatctaagaaggatgatgttgcattgtcttgtcttgtctgccacttggtaattaattaactcctagatagctgcacaaatccaagcttagtaaagtcttt

SEQ ID NO: 11656 - DNA, 1060 bp, Artificial sequence
  DNA replication origin
agatggctgccgggaagggtcgcggacgcctggactcggggacgttgccaccggccgtcgcggcggcgggaggcaccgggggcggcggcagcggaggcagcggcgcaggtaagcccaagaccggccacctgtgcctctactgtggcaagctgtactcgcgcaagtatgggctcaagatccacatgcggacgcacacgggctacaagccactcaagtgcaaagtctgtctgcggcccttcggcgaccccagcaatctcaacaagcacatccggctgcacgccgagggcaatacgccctaccgctgcgagttctgcggcaaggtacttgtgcgccgccgggacctggagcgacatgtcaagtcccgccaccctggccagagtctgctcgccaaagcgggcgacggcccgggtgccgagcccggctatcccccggagcctggggatcccaagagcgacgacagtgacgtggacgtctgcttcacagacgaccagagcgaccccgaggttgggggcggcggggagcgcgacttgtaacgagtcttcccgggaaggggcggggtgaggacagagaggagtcgagggtttattctcgcagtagaggaactcctggtggtgggaagagggacccaatggacaaaaccgtttttgtttttgagagggcgccagatttgaaacagtgagaggtcccacatctggtgctgaaactcagagcaacagttcagaggtggcgtaaatctggccacctggagagctcgagtgccaccagtacctccgcaccccgggcctctggacttcttggatgagctcaccctgaaccgcccaggcggtctgctcttggtgttcagaatcacatcaatgcgaacgtcacagcgccttcgagggcgcagattttaactgccacgtatttttaagttgtacttttctgtggaggaaattgtgccttttgaaacgacgttttgtgtgtgtatttcacgttagcatttcattgcataggcaaaacactagtcacaattgggtagatgtgacatccatatacttgtttacattttatctgttctcat

SEQ ID NO: 11657 - DNA, 834 bp, Artificial sequence
  DNA replication origin
tctctgcccggccgcccatcgtctgagatgtggggagagcctctgccccgctgccccgtctgggatgtgaggagcgtctctgcccggccaccccatctgagaagtgaggagcccctctgcccggcggccgccccgtctgagaagtgaggagcccctccgcccggcagccaccccgtctgggaagtgaggagcgtctccgcccggcagccgccccgtccgggagggaggtgggggtcagcccccgcccggccagccgccccgtccgggagggaggtggggggtcagcccccgcccggccagccgccccgtccgggagggaggttgggggagcctccgcccggccagccgccccgtccgggaggtggggggcgcctctgcccggccgccccttctgggaagtgaggagcccctctgcccggccaccaccccgtctgggaggtgtacccaacagctcattgagaccgggccatgatgacaatggccgtttagtggaatagaaaagggggaaaggtggggaaaagattgagaaatcggatggttgctgtgtctgtgtagaaagaagtagacatgggagacttttcattttgttctgtactaagaaaaattcttctgccttgggatcctgttgatctatgaccttacccccaaccctgtgctctctgaaacatgtgctgtgtccactcagggttaaatggattaagggcagtgcaagatgtgctttgttaaacagatgcttgaaggcagcatgctcgttaagagtcatcaccactccctaatctcaagtacccagggacacaaacactgcggaaggccgcagggtcctctgcctaggaa

SEQ ID NO: 11658 - DNA, 1010 bp, Artificial sequence
  DNA replication origin
acctttcccccttttctattccactaaacggccattgtcatcatggcccggtctcaatgagctgttgggtacacctcccagacggggtggtggccgggcagaggggctcctcacttcccagaaggggcggccgggcagaggcgccccccacctcccggacggggcggctggccgggcggaggctcccccaacctccctcccggacggggcggctggccgggcgggggctgaccccccacctccctcccggacggggcggctggccgggcgggggctgacccccacctccctcccggacggggcggctgccgggcggagacgctcctcacttcccagacggggtggctgccgggcggaggggctcctcacttctcagacggggcggccgccgggcagaggggctcctcacttctcagatggggtggccgggcagagacgctcctcacatcccagacggggcagcggggcagaggctctccccacatctcagacgatgggcggccgggcagagacactcctcacttcctagatgggatggcggccgggaagaggcactcctcacttcccagactgggcggccgggcagaggggctcctcacatcccagacgatgggcggccaggcagagaggctcctcacttcccagacggggtggcggccgggcagaggctgcaatctcagcactttgggaggccaaggcaggcggctgggaggtggaggttgtagcgagccgagatcacgccactgcactccagtctgggcaccattgagcactgagtggacgagactccgtctgcaatcctggcacctcgggaggccgaggctggcggatcactcacggttaggtgctggagaccagcccggccaacacagtgaaaccctgtctccaccaaaaaaaatacgaaaaccagtcaggcgtggcggcacgtgcctgcaatcacaggcactcggcaggctgaggcaggagaatcaggcagggaggttgcagtgagccgagatggcagcagtaca

SEQ ID NO: 11659 - DNA, 946 bp, Artificial sequence
  DNA replication origin
atgagaacagttaagagatgggcgcccccgaaacctctgccgcttgtggggactgaaggtaggtgaagcagaagacgccccgcgcccgcccagcagccccgcagctccgcggtggtgtgggagaggccgcggcgcctcccacccccgggggagcctgcgaggggctgtcgcgagcgcgccacctgttaacctggcgctgctgggccccgcttgttgcagcccctgctgggcagccagagcgctgggtcgccttgggagtcccgagagacttggtgtgtaagtgtcactttttgaggaatccctcagacttgagacccaagttaaagaggtagccaaggtccagatctgccaaggtagggagctgaaaggcccctgcctcgccttggaggaattctgatttgcggaaacctgctttcctgggacgtgcgcccggcctgggcgcggactcggggatccgcggcggaagatcccttgcgggtcttcagaaatatgtattttgttgtttgggcaacttcccaggggtctggaggatgcggctggcatgggtgagggaatgccagcattatttgcagggggctgtctcgctgccgatttacccgtttctttaaaaacaaacccaaaacgcctggctaggcgcactgaggccctttccggccgtgtttttggaattgggacgagtgtgtgagtacttgtggagccgctgatctcttatgctctgatgctgttgtcttcacagggccttgaaagagttgtctggggttcctgctcttcccaaaggggctcggagataccttaaatgccgcgagactgaagagcaaacgtcagggattattatgtcgattttccgaggaccagggttcgcagctggcagtagaagaaaaggctggctcctcaggggtcccactggcatttgataccctgaacgaccctcaggattgcccaaatt

SEQ ID NO: 11660 - DNA, 1293 bp, Artificial sequence
  DNA replication origin
tgtttgatgaaaaagagcctaaatgctatctgatttgggataaagaaaaaggagcattaactttgactatgcctttggctccagccacctttttaagagtaaattgctgggcaggtgggggagggctagtcacggaacaaaactgtaagccagaccaggtgtgaggaggggaggcgataaaaagattacagggtggaggagcggaggctgaggaagatttgggacatagcttgggctggcgaggaggggagaggtcagatgggtctgtagaaaaggaagattagaaagactcagtgacacttggggttgggactgaggggacaggtgggagggaaagaaggaagatttgggacaagttgcactgggcacagagactaggaagggactgatgtgtaaaagaatgcctggatgtcaggcatctcagaccgtttgcctattttatgacaagaattatttagattttgcaggatggaaaaattcaaagtgccattttctggctatttggaactactgttgagtttgtattggggtcaagcagcatttaggttttaggtcaggtgtgagttgaagaggttttaagtttttgagaacacaggccaagggagaagaaggaggaatggagggtggaaagttgacaatagtgaaggaagcaagcctagagaaaagagagagtagagaaacagagggaaggggttcgggggttcttaccttccagaaaagttggaaaaggggttggggcacagagataagaggtcgggatgcagaaataagggattggggtgcagagatataagaggttggggcgtagagatataagaggttggggcatggaaataagggatggggtgcagagataagaggtcggggtgtggaaataagggattggggcacagagataagaggttggggcacagaaataagggattggggtgcagagataagaggttggggcacagaaataagggattggggcacagagataagaggttggggcatggaaataaggaattgggggttcttgccccgtagaaagcaggacttgccgctaagggtgaaggagaaggggttgaggggtacttgcccctctcccagaaaaatgggacttgccactaagggtgaaggagaaggggttgaggggtacttgcccctgccccaggaaagtgggacttgacactaagggtgaaggagaaggggttgaggggtacttgcccctcccccagaaaagcgagacttgctgctaagggtaaaggacaaaggcaggcatccctgcgtggtctgacacctttgaaacgt

SEQ ID NO: 11661 - DNA, 868 bp, Artificial sequence
  DNA replication origin
ccctctgcccggctgcccagtctgggaagtgaggagcgcctcttcccggccgccatcccgtctaggaagtgaggagcgtctctgcccagccgcccatcgtctgagatgtggggatcacctctgccccgccgccccgtctgggatgtgaggagcgcctctgcccggccgcgaccccgtctgggaggtgaggagcgtctctgcccggccgcccactctgagaggtgaggagcccctccgcgcggcagccgccccgtccgagaagtgaggcgcccctccacccggcagccaccccgtccgggagggaggcagggggcagcccccgcccggccagccaccccgtctgggagggaggtggggggcgtctccgcctggccgccgccctgtccgggaggtgggggggcgcctctgcccggccgccccttctgggaagtgaggagcccctctgcccgccgccaccccgtctgggaggtgtacccaacagctcattgagaacgggccatgatgacgatggcagttttgtcgaatagaaaacggggaaatgtggggaaaagatagagaaatcagattgttgctgtgtctgtgtagaaagaaggagacataggagactccattttgttctgtactaagaaaaattattctgccttgggatgctgttaatctatgaccttacccccaacccggtgctctctgaaacatgtgctgtgtccactcagggttaaatggattaagggcggtgcaagatgcgctttgttaaacagatgcttgaaggcagcatgctcgttaagagtcatcaccactccctaatctcaagtacccagggacacaaacactgcagaaggcgcagggtcctctgcctaggaaaaccaga

SEQ ID NO: 11662 - DNA, 964 bp, Artificial sequence
  DNA replication origin
caatctgatttctctatcttttccccacatttccccgttttctattcgacaaaactgccatcgtcatcatggcccgttctcaatgagctgttgggtacacctcccagacggggtggcggcgggcagaggggctcctcacttcccagaaggggcggccgggcagaggcgcccccccacctcccggacagggcggcggccaggcggagacgccccccacctccctcccagacggggtggctggccgggcgggggctgccccctgcctccctcccggacggggtggctgccgggtggaggggcgcctcacttctcggacggggcggctgccgcgcggaggggctcctcacctctcagagtgggcggccgggcagagacgctcctcacctcccagacggggtcgcggccgggcagaggcgctcctcacatcccagacggggcggcggggcagaggtgatccccacatctcagacgatgggcggctgggcagagacgctcctcacttcctagacgggatggcggccgggaagaggcgctcctcacttcccagactgggcagccgggcagagggcctcctcacatcccagaagatgggcggccgggcagagacgctcctcacttcccagatggggtggtggccgggcagaggctgcaatctcggcactttgggaggccaaggcaggcggctgggaggtggaggttgtagcgagccgagatcacgccactgcactccagcctgggcaacattgagcactgagtgaacgagactccgtctgcaatcccggcaccccaggaggccgaggctggcagatcactcgcggttaggagctggagaccagcccggccaacacagcgaaaccccgtctccaccaaaaaaatacgaaaacagtcggggtggcggcgtgcgcctgcaatcgcaggcactcgcaggctgaggcaggagaatcaggcagggaggttgcagtga

SEQ ID NO: 11663 - DNA, 1529 bp, Artificial sequence
  DNA replication origin
cagggccgacaaagttgctccccgaggggctgagatccaactttcgcttcccgatttagccaggggagcgcgaggccgcacacaacccggcgcggggggaaagccggctgcagctgcgcctcccatccttacccggctggtccctggcggggagcctgggcagcgccgaccaaagttcggagcggcagcttcggggcgcgggacgcggggcacacgggctcagctgctcgacgggagcccgacgcgcgctcctcggcgggtcggcgggtccggaagctccgctgcccgggccgggtccccaagcccgcagccgctttgactaaaataggcatcgcgacggcggcggcaggcggcggcagccagggctggggccgcaccgcgcacgcgcatgcgcccgccgccccgcgccccccggcgggcggagcccggcgccgcggccaggatttcccacctcgctcccgcgactccgctgcgggtctgcacacccgaggactcggtttgaaacgcccgcttatttattttcttgtcgcctcgctacaagattctatccttgtttgggcatgagtggggggcggcagtctcgtgggaccggcggcattcgtcgttcctccttacggggataattcgagaagtgcggtccgggtagggagagaaatcaggagagaaaatgagaaagagaatcctcgtttcccctcaaagttggacgacccactcgtatatctcctttttgggagattcgcccataactcagcacaaacagggaatagcccggaaagcgcgcgagttcccgtccgattgtggcgggggaggctgaacgtttggtccacacgggtgcaggacgcgggggtcaggcctcctgctgcggaggaagagggggaagaggccgcgcgggagggacttctgacacgcgccactgtttttgttttcaaacaggggtacttaaccgaaactagcaatcccaggcggtacaaggccctccatcgtaggcaaagcactacctgaatgtagatttgggccatacgttggaaaataagacatgagagtatgctccgatcaacttttactgttcactggacaactattttgggtaagaaaagcaaggaaacttaataaagaattggcgttgttgggagttgtcttgtaggacaatagaggaaggttagatgggtacccagtttccaccaaaagtgtcccattattggttaaaattggcatcagttattagattatgagatcgttcatgcatgtgaaatgtgatctcaatataaaaaataccaccaccgattgtgtgaaggtacattataaagagtacctggaggtgcacactggacaagtctctggttgaagagatggtgcagcctagtaagaaagagcatgggccttgatgtcacacaagccgggtttgaatactccctctcctaccagtttactgtgtgaccttggagaagttacctagcccttctgtgcctcagtttcctttttggaacatggggataatgatgatgatgatgatgatgatgatgataatt

SEQ ID NO: 11664 - DNA, 966 bp, Artificial sequence
  DNA replication origin
agtgccttgcaaaacaagactgtcatttccaaagtagcatcctgaaatgtttaaatgtttatgatagaaaccactcgaatcatccccagcgagtttctcagaaggggcagctggaggagggaagggcagctggaggaggggaaggggccgcaggaggaggggaaagggaggcagctggaggaggggaaggggcagctggaggaggggaaggggcagctggaggaggggaaggggcagctggaggaggggaagggcagctggaggaggggaaggggcagcgggaggaggagaaggggcagctggaggaggggaaggggcagccggaggaggagaaggggcaggtggatgaggggaagggggaagctggaggaggggaaggggaggctggaggaggggaaggggggcagctggaggaggagaagggggacagtggaaggaggggaaggggggcagctggaggaggggagggggcagctggaggaggggaaggggcagctggaggaggggaagggggcagctggaggaggagaagggacagctggaggaggggaaggggcagctggaggaggggaagggccaaccaactggaggagttcattattagattatgttttaaaggtaataaatccactaccttttctcagatatttaaaagaactaccataggaaatggtgaaatagggaaggacattagactcaagagggaataatttattacagtctcagaattctctaactcatcagccacaaagtatatctgaggaggctccattcattatgcaggatccatgtgatacatgacgagtaaaaggcgggcttcaactcccaaggggcctgcatgcttgttagtgagacatggcagaacttcactctaataggcatttctaaatgaaactactatggaaaacataacagaaaaagaaatcataccctgaaaccatattatgagtaggaggagactcaaac

SEQ ID NO: 11665 - DNA, 930 bp, Artificial sequence
  DNA replication origin
ccctgcagccaccccgtctgggaagtgaggagcatctccgcccggcagccaccccgtctgggagggaggtgggggggtcagccccccgcccggccagccgccccgtccgggaggtgaggggcgcctctgcccggccgcccctactgggaagtgaggagcccctctgcccagccagccgccccgtcggggagggaggtgggggtgtcagccccccgcccggccagccgccccgtccgggagggaggtgggggggggtcagccccccgcccggccagccgccccatccgggaggtgaggggcgcctctgcccggccgtccctactgggaagtgaggagcccctctgcccggccagccgccccgtcggggagggagatggggggggggttagccccccgcccggccagccgccccgtccgggaggtgaggggcgcctctgcccagccgcccctactgggaagtgaggagcccctctgcccggccaccaccccgtctgggaggtgtacccaacagctcattgagaacgggcagggatgacaatggcggttttgtggaatagaaaggggggaaaggtggggaaaagattgggaaatcggatggttgccgcgtctgtgtagaaagaagtagacatgggagacttttcattctgttctgtaccaagaaaaattcttctgccttgggatcctgttgatcggtgaccttacccccaaccctgtgctctctgaaacatgtgctgtgtccactcagggtaaatggattaagggcggtgcaagatgtgctttgttaaacagatgcttgaaggcagcatgctcgttaagaatcatcaccactccctaatctcaagtacccagggacacaaaccctgcggaaggccgcagggtcctctgcctaggaaaaccagagacctttgttcacttgtttatctgctgacc

SEQ ID NO: 11666 - DNA, 1243 bp, Artificial sequence
  DNA replication origin
cagaggggctcctcacttcccagtaggggcggctgggcagaggcgcccctcacctcccggacggggcggctggccgggcggggggctaaccccccccccatctccctccccgacggggcggctggccgggcagaggggctcctcacttcccagtagggacggccgggcagaggcgcccctcacctcccggatggggcggctggccgggcggggggctgacccccccccacctccctcccggacggggcggctggccgggcggggggctgacacccccacctccctccccgacggggcggctggctgggcagaggggctcctcacttcccagtaggggcggccgggcagaggcgcccctcacctcccggacggggcggctggccgggcggggggctgacccccccacctccctcccagacggggtggctgccgggcggagatgctcctcacttcccagacggggtggctgcagggcgtagaggctcctcacttctcagatggggcggccgggcagagatgctcctcacctcccagacggggtcccggccgggcgctctcacatcccagacggggcggcggggcagaggcgctccccacatctcaggcgatgggcggcggggcagagacgctcctcacttcctagatgggaaggtggccgggaagaggcgctcctcacttcctagatgggatggcggccgggaagaggcgctcctcacttcctagacgggatggcggccgggaagaggcgctcctcactttccagactgggcagccaggcagaggggctcctcacgtcccagacgatgggcggccaggcagagacgctcctcacttcccagacggggtggcggccgggcagaggctgcaatctcggcactttgggaggccaaggcaggcggctgggaggtggaggttgtagcgagccgagatcacgccactgcactccagcctgggcaccattgagcactgagtgaaccagactccgtctgcaatcccggcacctcgggaggccgaggctggcggatcactcgcggttaggagctggagaccagcccggccaacacagcgaaaccccgtctccaccaaaaaagtaagaaaaccagtcaggcgtggtggcgcgctacaggcactcggcaggctgaggcaggagaatcaggcagggaggttgcagtgagccgagatggcagcagtacagtccagcttcggctcggcatcagagggagaccatggaaagagagggaga

SEQ ID NO: 11667 - DNA, 1430 bp, Artificial sequence
  DNA replication origin
gcccgaggggtcccggcgcccgccccccacgcggtcgcactggaattcgcagcccctctcgggtccccggggcgcattttgcagtctgagtggcaatgcacttgctccaggacaggcggctaccccgccgcagcggaggcgcggacttttcttttggggggtaagatggcaggtcccgggaaacaaaggaaacttgggcccggcccccagcgcggcgtgtgtggctcgcgtgtgtgccccgggtcctgtgccggaggcgctgggcgcctgtgccagcctgcccgcagcccgcagccggcgcggggataccagccgggtaccagcagccggcggcgcccgcccacctgcagcggcgcccgcccggggggctcccggcccgcgagggccggagcggcggtggcagtggcggcggcggcgggggcgctggggaacccggagcggggcggggaaggcggggaggcggcgggcggcggcggaggggagccggggtgggcgggcggcgccacgtcacggctattgtggctttcctggtatataaggtctcgccggctcgccgcgctccccaccttgcctgcgcccgcccggagccagcggttctccaagcacccagcatcctgctagacgcgccgcgcaccgacggaggggacatgggcagagcaatggtggccaggctcgggctggggctgctgctgctggcactgctcctacccacgcaggtgaggccctggcgcccggcggggctcgagggccgttcccggggtgggggcaggggagatggacccggtcccgggggaccgtcctgcgctcctgcctcgggccacggacagggaccgggagagaatcttgcttagctgaccaggggagagggccatgtggaccccatttttccattcccttgcgtgctgccccccctcctcccacggccctgggaacaatgcagctccgcgtgcgggctgagaggaccctgccccaccccaggttccacgctgtcccttcccaggcagccaggtgactacttcccactttcacccagaggcccgaggtgcctgcagggattagcgcctggagagctcgggctccctggggacgttgtccctgggtccctgaggactcgctttcccctaggaatgtcttcgcgctccccgcgctctacacaaagagaggcgacggtccctttcggggagggcggctcacgcccatcctccaccctcggagttggattgggtatcccggagaagctacggctatctggccctttttaaacaaaccccggttccgggctgaagccgaggcggggaccctctcctgacgctgcgctctctgcgaggcaacctttcacgtccatcgcttgtcatcttaggatccccatgttattttagcccagattggctagttctggggaggcagcatggtgggacgattctgtcccg

SEQ ID NO: 11668 - DNA, 1701 bp, Artificial sequence
  DNA replication origin
taaaactttcccattatattagttcttcagcaagaagatggcatctctggtatcaacaacaacaaaaaaaaacgctgggcgtggtggtacacgtctgtaatcccagcactttgggaggccgaagctggcgaatgacctgaggtcgggagttcgagaccagcctgaccaacatgcagaaatcccctctctactaaaaatacaaaactagccgggcatggtggcgcgcgcctataatcccagttacttgggaggctgaggcaggagaatcacttgaacccaggaggcagaggttgcggtgagccaagatcagaccattgcaatccagcctgggcaacaagagcaaaactctgtctcaagaaaaaaaaaaaaaaaagaaaggctgggcgcggtggctcacgcctgtaatcccaacattttgggaggccaaggtgagcggatcatgaggtcaggagattgagaccatcctggctaacacggtgaaagcccgtctctattaaaaatacaaaaaattagccgggagtggtggcacgcgcctgtagtcccagctactcgggaggctgtggcaggaaaatcccttgaacctgggaggcggaagttgcagcgagaagagatcacgccactgcactacagcctggtgatagagcgagactctgtctaaaaaaaaaaagcacggtggctcatgcctgtgatcccaacactttgggaggccaggcaggcagatcacctgaggtccggaaaccagcctgggcaacatggtgaaactccgtctctactacaaatacaaacattagcaaggcatggtggcacatggactgtaatcccagctactccgtgaggctgaggcaggaaaatcgcttgaacccgggaggcagacgttgcagtgagcagagatcaagccactgcactccagcccgggtgacagagcgagactccgtctcaaaaaaaaaaaaaaaacaaaaaaaaaactcatgttccatgacaggaggttgatgtgacagatttcaagggccacacagacaccagctaacccagcagcagcaactggcgctctggctccatctttcctctagaatccaagaggctctctccattcatttaggaaatacgcactgaacgcctactaagttatgagacaccgggttagaggctggggatgtgaaactgtgagggagataaaaaatcttgcccaagtcccagtaccgaggaaagcttgacaggctcttgtatggtagtataaagccaatatctagggatgaatggtttaaaaaaaaaagagagaaaaacggactgcaagggtggaagtggggagcgggtaacaagagaaagtcctccatcccagccgtttatatacctggctacctgaaggactcagttccttacctcagtttcctgcaaccgtagctttctggcactatgccacgctgccctgtggcatgtttactatttgtattcaaccattcaaaagttactttaaggagatgaactgcacatttccaactctagtgagtaaccttgttcctcccggcactcttgtcgagttagcgtttacgtgcagaattcttccagaaagaccacctgagcaatcaataaaacttttatctctgtaaaaacaccttgtttaaaatagctacatagggagacgtaggtaaacaagcacacaagggcctccaaatcggtggtgcacagctcacggatgaggca

SEQ ID NO: 11669 - DNA, 1084 bp, Artificial sequence
  DNA replication origin
tccaccgtcactggatacgcggatgctgcgcggctccgggggctgctcgcagccgcctgttcatccgcggcgggcacgggcggctcgcggcgccccccgcggccgccacctccccgccacacgccaggggcgccggcgcccgctcggaacccagccctgcttctcagctccgcgaggtgggctgggttgcgtgtggagttggtttttgagcccgtcctaggagccgctgaggaaaaatgaatgggggtgaaaggagaaggttgggcggcgggaggtcgcgagacctgaggtcgcctggctagagggccgccgtcccccggggagggttgactgagcctgccgcctcgggggtgcaacgctggggtctcggggaaaggaaaccacagcccggacgagcttccccccactgagctgccagaatagtttccccctccgggggccaccgcagagtgcgcggaggctggagaccccttggagaggtccccgcgccccgcccggccggtcctccacgcggcgctgcctcggactgcaatggcaatgaagcttttgcctctcaaagaactacttagaagtaggacatctcggccttcagccccttcatttctttttccccttgttccttctctctttatctctctctcacttatgccctgcttcaaagtaacagctttacgcgtgaccccgcctgcacccttatctgggtgtcctgggtttcgcccaaaaggttgggctgagtgggagcttctgggagcgcacggtcccgcgtagggtcccgctcacccggaccccgaacgccctcgccacgccccggtgggatcctcccctccccgcctggttgcactttctcctcccgacttcccagctagcgcctgccctccatggagcggtgctcgctccctctgcgctcacaagtcccctctttggccctctcctgccacgcctggggccgaggtctgattgagtctgtccctgtccctgggttgaggcattgggggtgacgactggatgatgtttctgtgatacgcgcggctctgagcgctcccacacgttgcagaggacacattgacgttcccggcttctcctt

SEQ ID NO: 11670 - DNA, 1103 bp, Artificial sequence
  DNA replication origin
aaattgttttatatcaatagagactcgtgaaatcaacacagaataaaaccctcgcccaggcaaaagccgcaacttcatggaaaataaggaggtggggggcaacgagggggtccagagctgagcggtgctcttgtgcaattgctctaacgcgaacagctggagcgccaggctgctgcgctctccacctctggtgcaccgctggcctggcggggagcccagcctcgccgagaggactccgggccggccttagcgaacaatggacaggcgccctgcaaaggccgcccctcagacagctgtcctccagcggggctggccggggtctgcttggctgggaagtgaggcaggcagaggcgagcgggaggcggaggctgccagtggtgaggtgcgggcgggggcgggcgaggagagcggtcaggaccgtgcccagacccgcgcctctcgggccgcagctcgccgggcactgacgggctcttcacgccgtcgcagctggttggttggggggaagcgggattgaggagcaggagggtgagctgggggagaggggtggaatagagctctctccggggtgccccggccaggaggctcctaactttggagggaccctgaggatgattctcaaaaaggggggagaaactgcaccgtccactgggaaagcctcttcccctgcccaacgccgctcgagtccccggtgccctcgccctgaaacgcgtccgtgccaacctgggattcgtaaggttaaatagtatgtggtcccccctcatcaaatctgaggttggcaacaatttcggggatgcagccctcgagttggcctctgctttacacctggaggaggagcggagccgttctgggcatcctacagaaactgacaagcgcgccccggtaccccccagatccataccacggcccacggggagcgggcgcaagaaagagctcagtctccctggcccccgagatcaaaaaataccttcatctcctcattgatctcccttttcactgggtgagccggcttcctgctccgtttattttcgggaggtctcccttctttctccatttctgccatgtttttgtgtctggtttctgtggagatgaaatggctgctgccg

SEQ ID NO: 11671 - DNA, 2184 bp, Artificial sequence
  DNA replication origin
gcgccctcggcggcggcgccgcgcgtgccgttcacgatgacgttgcaggccgcggccgcctcggggcccgccggggcgcccgggcctgggtcgccggcggcgggcgggctgcagtggccgtccctgcagccgccgcaggtcctgcgctccgcggcgctcggctcgcgctccgccttgacgtgcgcgtgcagcgcgcggtggatcacgttgtgcagccgggctcggtggcccacggtcaggtcgatgacgccgtcctgcgggccctgcagcacgcctgggaagccgagctggccgcccgcgcccggggggcccggggggctgccggcgcgccgcgtcaggtccaccacctcgctccggccatgctcggcgggcgtgggcgccaggctcagggcctggcccgagcagccggggggcgagtccgcggacttggacgagccctgcttggagtcccggggggacagggagtgtccgcttggcttgccgcccgccgccgcggagtcgccaggggcgttcggaatgaagttctccccgttgctggagaacccgttggggggcttggagtcgctgacgtgagggatagggatggggatggggatgggcaccggtaggggcacgatcacggggtacggcacgagcagggtcgggggcggcaccagcggggcaagcgacggcagcccgaaattcatcatctggggcaccggcatcgggccatttggcatcatgctcactggcgggaagggaagactcggcagcggggcgcccggaggcggcgggggcagcaggcctggggggttcccgggcatggtgggggtgctcggggggtggatgtggggcgatagcatgggccggtgcatggggctggaagtggggcccaggtttctggggccaccgggcgggggcccgatgccgggaagcatggggttggacagggggctgttggggttggaggcatggtgcggaggcccgcggatgaagggcgggcggatctgctgcatgatctgctgctccatgaagatgggcagcggcaccgggccgcggttggtcatcaccatgggagggctccgaggcgggacgccaaggggaggcccgatgctagcaggtggctggacggagacaggagggatatttggagtctcgctgatggggatggacttgggcactggcgtggggattttagtgacagagcagttggcagtgtcagatggagagacggtggtggacgccgacgggccagggccctggctttggccagctgtagccaccggggagggggccttcctccgagcatctgttagcgggatattccaagagtctggagtgagcagctgcaccccggtgccttctgctttattttccatgggagggtgtaatgtgctgcacagcccagctggaagattggcctgggtctctttgtagaaaatgtccattttgtattgattgagacattttgcactgcagaactgaagccttctttccccgtccccaaaatccaggtattcttttgtgtgtcttatgtgcttacaccagtcacatacctacaacacagtaataaaaaaccacaacaggtaagacaagcaatttacctgggtagatgacgtttcgtgtttcacataaaggttcttttaaactttaccagcacttctcaaacaggcagaactgtttccttctaaaaggtaaaattctgaaatgtttgtaaaatgatgggttggctttataaatatgagctcttcagaataccaattatcacaacctcctattcttttttcttaaattgtgttgtcccctttaagcatgacttaaagatggttctgagaaaagggaatatatatacctgtccaatgtacctgcccacacattttcacttgtcagagaggctcattgtaaatgcaaacctaaagagttttggagggaaaggttctccagaaagttcaatgggcttgaaatattaccccttacaattctcctcatgcgaagtcactttacactgttgactatgtttgataatgcagttggaaagagtgtactgtgttaaccaataacacaaagcgctgaacatcattatgtctggcttccaaggagaaacttggaattaatcatgaagtctgtgtgaggtttagctattcccaacctgtgatgttgcagcaagctagaattattttttgagctgtttgcccactctctctc

SEQ ID NO: 11672 - DNA, 2033 bp, Artificial sequence
  DNA replication origin
tgtccccccgggactccaagcagggctcgtccaagtccgcggactcgccccccggctgctcgggccaggccctgagcctggcgcccacgcccgccgagcatggccggagcgaggtggtggacctgacgcggcgcgccggcagccccccgggccccccgggcgcgggcggccagctcggcttcccaggcgtgctgcagggcccgcaggacggcgtcatcgacctgaccgtgggccaccgagcccggctgcacaacgtgatccaccgcgcgctgcacgcgcacgtcaaggcggagcgcgagccgagcgccgcggagcgcaggacctgcggcggctgcagggacggccactgcagcccgcccgccgccggcgacccaggcccgggcgccccggcgggccccgaggcggccgcggcctgcaacgtcatcgtgaacggcacgcgcggcgccgccgccgagggcgctaagagcgcggagccgcctcccgagcagccgccgccgccgccgccgcccgcgccccccaagaagctgctgtcgcctgaggaaccggcggtgagcgagctagagtcggtcaaggagaataactgtgcttccaactgccacctggacggggaggcggccaaaaagctgatgggcgaggaggccctggcggggggcgacaagtcagacccgaaccttaataaccccgcggacgaggaccatgcctatgctctgcggatgctgcccaagaccggctgcgtgatccagcctgtgccaaaacccgcggagaaggctgccatggcaccgtgcatcatctcctcgcccatgctcagcgccgggcctgaggacctggagccgccgctcaaaaggaggtgcctccgaattagaaatcagaataagtaaaaggtttgtatgtccgccgggcgctcctccacaccagccagtgcacctctccttacttctgacaaggcagaggggagagttgtaattatagtcatgattttaccgtgtgtgttttatattgcacacggtgtggtcacgctatcaacattctgagccagcagctctgatgctgagttgttcagtagcatcattcccattttacagccgaggaaactgagccacagcatgtgagtgccaagccccgggtcacttacttgaggggagagctcagtctccaacctgtcatgaaatattgtctctccaattacactttattatcatgctcatctccgtaaatcaccctattggagaagaggaggatggggggagggagaagagattaacttgggacacctaaatgtgtgatcatgaggttgcagggcagtggtgaaatgtccagtgaacccatgagctgggccacctactaaatagagctggttgcctcattggcagaatgtcaccaaattttcttgataaggacgggattccatttgtaaagtgagaatgaaacctaactcttacatgcatatgtcaactgaacccaggccactgagtcctatttgcctggcagggtgtctttcctgttcatggggtctccttcctgcagtttggcaccaagcagcatcccccagggtaggcctcaagcgtcactgaccagctttgctctctcccccttttggggcccagcggcttagctgatgagttgctcacctttgcaggtaatgggaggcttcgatagggaagagggtggcattgctaaagtgagtgacactgcacatctctgacctcatagacagactcctgcctaatgccaagtgagccgccaagagtgagttaaatttttcaatattgggaaggggaactaacatgtgtgcctgtcataggcagaggtggcctcatttgctcctcctgccaattctggtggaataggcatcatctgtatctcaccaaggaggcagatgaagcttagatactgtgcccgaagcagagctggtacgtggggaagccgtattcaactcaggcctgttggacacagcccaagctctcccgtctatccaagcgggcatcaaacaggccaaaattcagttgagtttatcaacttcttatggagaggaa

SEQ ID NO: 11673 - DNA, 1062 bp, Artificial sequence
  DNA replication origin
tggacacagcacatgtttcagagagcacagggttgggggtaaggtcacagatcaacaggatcccaaggcagaagaatttttcttagtacagaacaaaatgaaaagtctcccatgtctacctctttctacacagacatggcaaccatccgatttctcaatcttttccccacctttcccccgtttctattccacaaaaccgccattgtcatcatggcccgttctcaatgagctgttgagtacacctcccagacggggtggtggccgggcagaggggctcctcacttcccagtaggggcggccgggcagaggcgcccctcacctcccggaccgggcggctggccgggcggggggctgacccccccacctccctcccggatggggcggctggccgggcgaggggctgacccccacctccctcccagacggggtggctgccgggcggagacgctcctcacttcccagacaaagtggctgccgggcggaggggctcctcacttcacagatggggcggttgccaggcagagggtctcctcacttctcagacagggcggccgggcagaggcgctccccacatctcagacgatgggcggccaggcagagacgctcctcacttcccagatggggtggcggccgggcaaaggcgcaatctcggcactttgctgggccaaggcaggcagctgggaggtggaagttgtagcgagccgagatcacgccactgcactccagcctgggcaccattgagcactgagtgaacgcgactccgtctgccatcccggcacctcgggaggccgaggctggcggatcactcgcggttaggagctggagaccagcccggccaacacagcgaaaacccgtctccaccaaaaaaatacgaaaaccagtcaggcgtggcggcgcgcgactgcaatcgcaggcactcggcaggctgaggcaggagaatcaggcagggaggttgcagtgagccgagatggcagcagtacagtccagctttggctcggcatcagggggagaccgtggaaagagagggagagggagaccgtggggagagggagagggaggggg

SEQ ID NO: 11674 - DNA, 918 bp, Artificial sequence
  DNA replication origin
ggagtgcagtggcgtgatctcggctcgctacaacttccacctcccagctgcctgccttggcccagcaaagtgccgagattgcgcctttgcccggccgccaccccatctgggaagtgaggagcgtctctgcctggccgcccatcgtctgagatgtggggagcgcctctgcccggccgccctgtctgagaagtgaggagaccctctgcctggcaaccgccccatctgtgaagtgaggagcccctccgcccggcagccactttgtctgggaagtgaggagcgtctccgcccggcagccaccccgtctgggagggaggtgggggtcagcccctcgcccggccagccgccccatccgggagggaggtgggggggtcagccccccgcccggccagccgcccggtccgggaggtgaggggcgcctctgcccggccgcccctactgggaagtgaggagcccctctgcccggccaccaccccgtctgggaggtgtactcaacagctcattgagaacgggccatgatgacaatggcggttttgtggaatagaaacgggggaaaggtggggaaaagattgagaaatcggatggttgccatgtctgtgtagaaagaggtagacatgggagacttttcattttgttctgtactaagaaaaattcttctgccttgggatcctgttgatctgtgaccttacccccaaccctgtgctctctgaaacatgtgctgtgtccactcagggttgaatggattaagggtggtgcaagatgtgctttgtcaaacagatgcttgaaggcagcatgctggttaagagtcatcaccactccctaatctcaagtacccagggacacaaacactgcggaaggccgcagggtcctctgcctaggaaaaccagagacctttgttcacttgtttatctgctgaccctc

SEQ ID NO: 11675 - DNA, 1267 bp, Artificial sequence
  DNA replication origin
acttcccagtaggggcggctgggcagaggcgcccctcacctcccggacggggtggctggccgggcggggggctgacccccccacctccctgccggacggggcggctggccgggcagggggctgacccccccacctccctcctggacggggtggctggcctggcggggggctgacccccacctccctcccggacggggcagctggctgggcggggggctgacccccccacctccctcccagacggggcagctggccaggcagaggggctcctcacttcccagtaggggcggctgggcagaggcgcccctcacctcccggacggggtggctggccgggcggggggctgaccccccccacctccctgccggacggggcggctggccgggcagggggctgacccccccacctccctcctggacggggtggctggcctggcggggggctgacccccacctccctcccggacggggtggctgccgggcggagacgctcctcacttcccagacggggtggctgccaggcgtaggggctcctcacttctcagacggggcggctgccgggcggaggggctcctcacttctcagatggagcggccgggcagagacgctcctcacctcccagacggggtcgcggccgggcactctcacatcccagacggggccgcggggcacagacgcttcccacatctcaggcgatgggcggccgggcagagacgctcctcacttcctagatgggatgacggccgggaagaggcgctcctcacttcctagatgggatggcggccgggcagagacgctcctcacttcctagacgggatggcggctgggaagaggcgctcctcactttccagactgggcagccaggcagaggggctcctcacgtcccagacgatgggtggccaggcagagacgctcctcacttcccagacggggtggcggcggggcagaggctgcaatctcggcactttgggaggccaaggcaggcggctgggaggtggaggttgtagcgagccaagatcacgccactgcactccagcctgggcaccattgagcactgagtgaaccagactccgtctgcaaacccggcacctcgggaggccgaggctggcggatcactcgcggttaggagctggagaccagcccggccaacacagcgaaaccccgtctccaccaaaaaagtacgaaaaccagtcaggcgtggcggcgcgcgcctgcaatcgcaggcactcggcaggctgaggcaggagaatcaggcagggaggttgcag

SEQ ID NO: 11676 - DNA, 940 bp, Artificial sequence
  DNA replication origin
tggccagctgccccgtctgggagggaggtgggggggtcagccccccgcccagccagctgccccgtccgggagggaggtgggggtcagccccccgccaggccagccaccccgtccaggagggaggtgggggggtcagccccctgcccggccagccgccccgtccggcagggaggtgggggggtcagccccccgcccggccagccaccccgtccgggaggtgaggggcgcctctgcccagccgcccctactgggaagtgaggagcccctctgcctggccagctgccccgtccgggagggaggtgggggggtcagccccccgcccagccagctgccccgtccgggagggaggtgggggggtcagccccccgcccggccagccgcccgtctgggagatgaggggcgcctctgcccggccgcccctactgggaagtgaggagcccctctgcccggccaccaccccgtctgggaggtgtgcccaacagctcactgagaacgggccgggatgacaatggcggttttgtggaatagaaaggggggaaaggtggggaaaagattgggaaatcggatggttgccgtgtctgtgtagaaagaagtagacatgggagacttttcattttgttctgtactaagaaaaattcttctgccttgggatcctgttgatcggtgaccttacccccaaccctgtgctctctgaaacatgtgctgtgtccactcagggttaaatggattaagggtggtgcaagatgtgctttgttaaacagatgcttgaaggcagcatgctcgttaagagtcatcacactccctaatctcaagtacccagggacacaaacactgcggaaggccgcagggtcctctgcctaggaaaaccagagacctttgttcacttgtttatctgctgaccttccctccactattgtcctatgaccctgccaactccccc

SEQ ID NO: 11677 - DNA, 949 bp, Artificial sequence
  DNA replication origin
agtgaggagcccctctgcccggccagccgccccgtccgggagggaggtggggggtcagccccccgcccggccagccgccccgtccgggagggaggtgggggggtcagccccccgcccggccagccgccccgtccgggaggtgaggggcgcctctgcccggccgcccctactggcaagtgaggagcccctctgcccggccagccgccccgtccgggagggaggtggggggtcagccccctgcccggccagccgccctgtccgggagggaggtggggggttcagccccccgcccggccagccgccccgtccgggagggaggtgggggtgtgagccccccgcccggccagccgccccgtccgggagggaggtgggggggtcagccccccgcccggccagccgcccggtccgggaggtgaggggcgcctctcctcagccgcccctactgggacgtgaggagcccctctgcccggccaccaccccgtctgggaggtgtacccaacagctcattgagaacgggccatgatgacaatggcggttttgtggaatagaaagaggggaaaggcagggaaaggattgggaaatcggatggttgccatgtctgtgtagaaagaggtagacacgggagacttttcattttgttctgtactaggaaaaattcttctgccttgggatcctgttgatcggtgaccctacccccaaccctgtgctctctgaaacatgtgctgtgtccactcagggttaaatggattaagggcggtgcaagatgtgctttgttaaacagatgcttgaaggcagcatgctcgttaagagtcatcaccactccctaatctcaagtacccagggacacaaacactgcggaaggccgcagggtcctctgcctaggaaaaccagagacctctgttcacttgtttatctgctgaccctccctccactattgtcctatgaccct

SEQ ID NO: 11678 - DNA, 870 bp, Artificial sequence
  DNA replication origin
gcggggcgggaactatctcctctcgcgagagctggcgacggcggcggcagcggcagaggtggcggcggcgtgtccgtgagagtggcgtgggggcggggaggagaggcggcggcggcagtgtccaagctacgccactcgggccggggcgttgggagcgggagtgcagagcgtggtcgtggcggcggcggtgagaagagcgaggcggaggagggggtgccatggccgggcagcagttccagtacgatgacagtgggaacaccttcttctacttcctcacctccttcgtggggctcatcgtgatcccggcgacatactacctctggccccgagatcagaatgccggtgagtcccgccggcctttgcccgcgaacccgcgcaggccccgccagcgcccccaggccctgcggcgcccgcttgcccggccccagcccgcggcgtccgggatgacagggacggtgcggcccggcctgtgtccagcgtccgccactggcggggcccgggtcagcagcgtttccctcggcgcttctccacctcccttcattgtcctcaggagtttcgctcgctccatcttctccattgttgtggacgctccttgcagcctcctcctgcctctttgtcttctctgcctttgcttttattggggatttttctttatggaggaagcgggatggggacttgggaggtgagcaaagagttggccaagaagagactgaacgtgcgggcacaactctcagtccgtccagttcgcggccctcatcccccgactccggtttccctgttgcagctgctcttaacagatgttttagggcatctctgagccgggtggcatgcttaggactccaattgagctttccaccgcctacccccgtc

SEQ ID NO: 11679 - DNA, 811 bp, Artificial sequence
  DNA replication origin
tacaggcgtgagccactgtgcccggcctcccaccccctattctaaatgacacttgtttccaaaatatgggggctggaggagcagatccagaacccaaggaaacgtgatcaaccagggcaattaatccagagggcaggacaggctgagcctcagctcttctctgaatatctgggacccctgcgcagccaggtgaaccgcccgcgaccgctgctccggcgggaagccttctctgggatcctgtacgccgacgcccggaatccggcgtggtgcgctgggaaactgagcggtggaggaaggcggagcggttaggggcgggaccctaggggaggggttgggggagggctttgacgttagggcggggctaagggcgagacctcgccgagttccaccgttgcgctcgccacgtctcccttagcgagctcgctggggacacgcagggggagggaaaactgagcggggcgggaactatctcctctcgcgagagctggcgacggcggcggcagcggcagaggtggcggcggcgtgtccgtgagagtggcgtgggggcggggaggagaggcggcggcggcagtgtccaagctacgccactcgggccggggcgttgggagcgggagtgcagagcgtggtcgtggcggcggcggtgagaagagcgaggcggaggagggggtgccatggccgggcagcagttccagtacgatgacagtgggaacaccttcttctacttcctcacctccttcgtggggctcatcgtgatcccggcgacatactacctctggccccgagatcagaatgccggtgagtcccgccggcc

SEQ ID NO: 11680 - DNA, 1024 bp, Artificial sequence
  DNA replication origin
gggcgccgcgcgcagggggcggggccgtgacgcgccctcctcgtgacccggctctcggcctgcgctcgcggaaaccggaagcggcggctgtccgcggtgccggctgggggcggagaggcggcggtgggctccctggggtgtgtgagcccggtgatggagccgggcccgacagccgcgcagcggaggtgttcgttgccgccgtggctgccgctggggctgctgctgtggtcggggctggccctgggcgcgctccccttcggcagcagtccgcacagggtcttccacgacctcctgtcggagcagcagttgctggaggtggaggacttgtccctgtccctcctgcagggtggagggctggggcctctgtcgctgcccccggacctgccggatctggatcctgagtgccgggagctcctgctggacttcgccaacagcagcgcagagctgacagggtgtctggtgcgcagcgcccggcccgtgcgcctctgtcagacctgctaccccctcttccaacaggtcgtcagcaagatggacaacatcagccgagccgcgggggtgggtacaggaccacgtccgggactgtggctcaggagagttgggaaaggaggagggtgtaatgatggtcagcgctgggggcctcagtttccccaacagtaagaaaaaggggttggactgagtctgtagagttgggtcatcagaaaaagggggtggcattatggggcttgggatttgggtttttgcttccaagaatgctgttggacatctttggttcatataggtgtgattggttttcttgggggtcctgattccccaaccctcttgctcttcctccacccactccaccacggcttcttctcatcttcacctggagttgccaggaaggatccttttctgaaacaagtggggtggagacactggtagtggttagaaatttgagctttgtagccagaaatgttcatgtccaccaacttctaactatgtaaccttggattaattatcttctcagaaccttagtttcctcctc

SEQ ID NO: 11681 - DNA, 983 bp, Artificial sequence
  DNA replication origin
ttcagcagcatatcattaaagataagagtcagttaattctggagctggggtaatgtggctgaaatgaagagttcatttgcatgagatgctgagcccagtaacaaggggacaaaaatcactaattaggattgcagagtgtcggcctctcggcaagcaccgtttccagactgcggaccaagcggagattcgcattaatgtaaatctggggagcactaaaagctctcactggctttgtagaaggcgacaatcactcccgccctctacgacgtcctccctggcccgggcagcccaactggggcggggacgggggttactcgggtcggatccccttttcttccctatctatcctacctccactcccgcggccacgcgaaggcgtctcacccacccccttaggggcacgtgggcgagtgtctggtggccgggtgagtggaacccgccgcccagtccttgcagcgggctctggtctagtgggtgaggatccctggggaggtcccaactccggtgcagcgtccgcggggtgaagggcgcgagtgcattcaggccccaagggaaactcggggacatctgcacagacaagaatccccaaggaggcccaggtcccacggccaaagtcctcgacccccaccaggctgtctccctctagtcctccccactcctgacctgccattcgggacggagccagtccgcgggcacccaagggcgcaagctggtacaaaaagcacgcgcaggggtgtgcctgggtgcgcaggagtatgtgtgtgtgtgtgtgtgtttgtgtatgcgtgtgcaggtgagtccagctgtcgtgtaaatgtgactctacataagcttgttgctgtgtaaatgtgttttttcttggtataggcacaaacgtgtgaacgttggtctaaatggtatgtagtgtgtgtaatagtacacatgtgatgtgtgagcggtgtgtgatgtgcgtgtggtgcgaagaggggaggtgacaggccaga

SEQ ID NO: 11682 - DNA, 1553 bp, Artificial sequence
  DNA replication origin
gccctggacaaaaccggctgtttgaaaagggtaaatcccgcggcccggcgaggccgaacaatgggccgctggtgcggctgcggcgggggcggccgggcgggccgcacaaagggcggattaattggggccgcggctgagcggttcgcgctagctccactcagcccgcgccgcggggcgccccattgactgggccccgagccccacttttcacaaactccaaacaaaagtcaatttcttttttataaggcgggggagggggccgcggccaagattccccacttgttcctgcgactcgctcttgccgcatggggggcttcgggggctcaaggaactggaggcagaagggccctcggggatgcccgagaggggaaagagatgcgggtgtggctgccgcgtccctgtcccctcctccgctgccccgctccgacgcgtgtcgcaccctctgggccgcacctacaggcaggggctgagatcccagcccgaggcctggaagccgcgaagaagcgggatgaggtggtggccggaccgaggtgaaggctggggcacccggctgggggaagcgcaggcaggtgatttgggaggaaagaacacgtccctttgatattctaaatcctgggaagggtggccatgcattagatagttattgagaaactactgtgttcccgatggcgaatttgccttcaatggacagacaagtgggtggggggcagatttataagtcaatcagtcagcaggtgagggaccgcggtcagtatggggcgctaaaggaagtcaccatccctctgtaaaatgatgagatggacttgccggtgtaacatgtagaagatatctaattatagacacagactttgtacttggagaagtggcggtgattagaaaacaaacaaataaatccaaattgtaggactaacattgtcactggtctatacaccccgtaggaaggaaccaggagttcgtctcctcttgtttctcttctctcaaaataggagaatgactgcagagggctcttcagctgacactgagaggagcaggaaattcctttaacaatacaaatcgatacactccctagcccacaagcctctgctggaaaccggattggcggtggttgtacaagacactccaggccttgtcatttcaaggactgtcttccaaagtgaatgaacaggaaagagagaccatgtgctggtgtaagggaattcatgtgttggctggagccatgtgctaatggatgatattccaagactttatccaaggtgtttctttggggaaggaaggaggcttggatctgtgggcacttgtgtgctctacagctggcaaagtgactttatgagactgttgaagtctttaatagccaggctttattgtggagtccctccagcggcatctggctagtatactggcacccctctgggcaggctcagtgagaggggagctctgatgccaggtaatgaatctgtggcaagctcagtaaatgaggtgaagcaaatcctcaaggacaggctgaaacagggctggaggcagagacctaggcgttgacagtggggaggtaacag

SEQ ID NO: 11683 - DNA, 1392 bp, Artificial sequence
  DNA replication origin
tcccgctctccgggcggaggaatagtgaagagaggccctcatcccctaccccctccccattccgcttgccttcccgcgattcctgagctctctcgcgccttgctctgtgcgcggcgctgggagagcgcatgccgagggagcgatgatccccgatctctaagagattaattctatttaagctctctcggcagcttgaacttgtcgaacaagagcttgccagtccctcctcagggcgtggacccggccagaggtcagaggttacacctcccgccctccgctcgacgttcgcggggaggggagctgtggccggcgctctgcaattccgccagcccaccccccggtccctctttctccagactcggtgtcatcccgggctttcaatcagagttcgcctgtgcgtgcaagtgaatgctggagtcccccgagccctgggagggcgcagcaggtcctccgcctgggcgtcccagggggagcgggctgtgcgctccagtgggctccgacagcacgtgattgcaactttctgcccagccttggctcggcctcgagctcggggtctcgcacaccacacacaccagagcctgtgtcctccttagtggggcgccgcgaccaaggctggggtcccggggaaagagcaagatggggggatctttatctctcagtttattccctcctcctcggtttttcgaattgggacgagattgggggattgtgggacgaggccataagcgcgtaggggtttattaggtgacaggaggagaaatcagcgttttttgacagccaacttgtacagccgcttgtggagctagcccgaccggcggcgtagcgctttctcgaactcggcgcccagagaggggaggaatttcgggcaggatttgagaaacacaataagatgccaggctccgtttggaatcctcaggttctggttcacgccagaaatccacttgcttcagccacctaccaccaccacccccataacgcggacgcgattatggggttctttggttcaggacaaagaacttcaagggtggaactaatttatctggggcgaagatgagggcagtgtggggggtgatgactagacccaggcctgtctgcaggggaagcatttaggggtctgtttcgagaaggagaactactaattgctttgcctgtgcgggggctggacgatggctttcctgggctccaaaccacctcttcccctactctcgaacgctcctgccaggctggctcatttgtaggcaccaaaacttctggaaaatactcccaaggctcatcaaattgtctcaaaatcaaaatgggtatcttccctctttttcctgtcaccagtccccgatcaagcatggtgtcaagaagatgcctacggaatacacacacaccccattcagccctggc

SEQ ID NO: 11684 - DNA, 959 bp, Artificial sequence
  DNA replication origin
gagggatgttgaaagacagagatggagacacgaaaatggccttcctacggagcgaaatccctctttttccccattcctgtcactcagtcttcgatctctccctctacataggcatgcagagtgtgggcaatctctgccgaccgctggtctcccaaggaaagaaggaaaacactaccgcagtctcagaggcagacgggctccgcgctgccggaacccaagcgcagagtgggaaaactagattgctgggaaatcttccgagggaagaggcggccaggtccgggtttccggggagagccgcgcacgcagcggcgaagggtccccgaagttcattaccccgtgactttgtgcctgtcgctgcgggctgggtcccctgtaatatctccagaagcgctctgacaggcagccgcggggaggggaatagggcgtccctggcccacttagcttttcccccaactcctggcggggtctgacgtcagccatgtgcggggaggggatgggaagagggagggggttaaatgctaatgatattaatgaacctccaagcggctcccaaagaaaatgcaggcgctgtcggagcttacgagttagaaagtgtgaatatgggagtgtggctctgtgcgtgcgtgatggtgaggacggtgcggctcgtaataaaaatgaattcgtatatttcacggcaagaaggaaggggaggggtgacggggctttctcaaaacgcttttccccctctctccagagtgccagatagattcgcggaagaaattgggtggctgtgtgctggcgtgtgattgtgcgcgccggacatggccatgtgagttggttcattcttggtccggtgccccttctgttgggtaaaacttggatctggcccgaggtgagtaatttactcattttgcacatatctacggaaagtcagggctgaggatggggtcttctggaggttccgcgttccttcggcc

SEQ ID NO: 11685 - DNA, 1098 bp, Artificial sequence
  DNA replication origin
cgaagactgagtgacaggaatggggaaaaagagggatttcgctccgtaggaaggccattttcgtgtctccatctctgtctttcaacatccctctcttgctgttcttccttcttcctcagtcttcctgtccatctctccatctgtctgtccatgtgtgtgtccatatcaagcagcattcccagcagctgcggttttgcaagagccgggaagaaacttaaggatgcttaaatttccactgttggacgaattctgagcgcccagggagcagcgcagcgcgcgactgacacccacctgtcccgcccaggagccttgcaggctggagggcagctggagagcggcggcgcccggcggcgaggcgggcgctgccggccgggactcgggcagcgcccaccaaccgctccgccccgggacagccagcatgagcaagccagccggatcaacaagtgggtacctctcgggccgccgtggggcctaggcgcgcagcctggggcgagcgagcggggaggctgggggaggtcctgcctggagcgctgcgaatctgagcccctgagagggattccagcgggcgtgtgcgttcggcccagacctgtagaccgtgagttggagcatttcgtggagaggggagagccgtttcgttgcctctggattgcttgatcccccctgtctggtgcggtgagaaggttacgacccgcgcagcccaccagtcggatgagttgtctccatttagccgccaggtgctggatgggggggccatgggggcgggaactgggccgcagctccaggcggtagcacaataacacactcgctcaaaactccgagctccagcgcgcaaaagcaactctgtgcaaagcggattttgaatggaatgctttgcaccccgtttctagctatttcaaataatcctgcaaactgggaagcagaaacaatttaaaagtcacattttccttaatcctaaatccgcgtaggtcataactggggaatttaaagtatggcgaaccactctagcaaagagaggaccaaatccctaatcccaaggacttttcgagccggagcccagcagaggcaggagtgcgcggcctgctccctccgtgcgcttct

SEQ ID NO: 11686 - DNA, 1406 bp, Artificial sequence
  DNA replication origin
aaggcctccagtttgggccccagcggcctcaggcctccctgaaattcgacagctgctgccgaaagcgcttgggttggggactacgatgggattgaggtgggaaggggcggcagtggaacgtctgggcgaggggagtaggggaggtgagggcgtggcgcggggagggcctcgaggcaccgcaggtgtaaacttgctcctggaacccgaggcgtccgggcgagcttgcaccgtgggtcccagactcgtctcaggtggagggggtgggggaaggagagcgcgggggaccgtgcttgggggtgagggggtgttcggtaacgaccaggctcggccgggtaattacaaccccgcggcagcacctgcctatagagccaccagtgacccgtcaaaaagagtagcatgggaattcggacggcgacaaaggcgggcaggggaggcgcgcggcgcggcggccaccggctcggcgcccccctcccacagggcgggaggggagattgtgctgtgggagggaggggctggagagggccaggcaagggcacagcgggtcttgtcctccactccttcgggcctgtcactgcgcccaagggagttcctggtcgctcaggaaccgggtctggagctccgctgcactgcactcactctggaagcggtaaacttggtttccatatcttacaaccatcctctgcttaacacgcgccctctgaccgctccagggtccacgtttggggcccagcagtactgtcaccccagctgtcctcttccctgtggcactgttgaagatgccaagatgagtgagtgggaggagcagtggtggggtctctttttccccacttcccatccggacaggaggcccatgacaacatctctggagaacccgatgagggtggagggaagaccagtgcagggtgggggcccctcctcggattcccccgcccgagcttccggactgttgccctctaggccaccaccagtgcgagtcctgcctctgagcagacctctgagccgcggctcccggggcagattagaaacaggcaaccgggctggggcggggcccaggagggagggacgcgaaaattccggggcatagcgggcctgtgcctcagactccgccacccagccacgttaaggtgacttggggtcacgagacaagctggttgaccccgttgcaaagctcctctcatttagcaagccgagcgagctccgacgtgaggcgagccggagtttcctgaagctggaaaaccgttcttaacttccctcgccagggggtcccctcggggctttttgtgtgtcataattgcctaaagatatatggcagcttcgattactgtaattaccatcagaggctgttgaaagaagttagtctgggctgcaggggtgactggccagggtctcgttaccacccaggcggg

SEQ ID NO: 11687 - DNA, 1598 bp, Artificial sequence
  DNA replication origin
gctgttgggtacacctcccagacggggtggtggccgggcagaggggctcctcacttcccagtaggggcggccgggcagaggcgcccctcacctcccggatggtgcggctggccgggcggggggctgacccccccacctccctcccggacggggaggctgaccgggcagaggggctcctcacttcccagtaggggcggccgggcagaggcgcccctcacctcccggacggggtggctggccgggcggggggctaacgcccccacctccctccaggtcgggggggccggccaggcagaggggctcctcacttcccagtaggggcggccgggcagaggcgcccctcacctcccagagggggcggctggccgggcgtggggctgatccccccacctccctcccggacggggcggctggccgggaggggggctgacccccccacctccctcctggacggggtggctgccgggcggagacgctcctcacttcccagacggggtggctgccgggcggaggggctcctcacttctcagacggggcggctgctgggcggaggggctcctcacttctcagacagggcggttgccaggcagagggtctcctcacttctcagacggggcggccgggcagagacgctcctcacttcctagatgggatggcggccgggaagaggcgctcctcacttcctagatgggatggcggccgggcagagacgctcctcactttccagactgggcagccaggcagaggggctcctcacatcccagatgatgggcggccaggcagagacgctcctcacttcccagacggggtggcggccgggcagaggctgcaatctcggcactttgggaggccaaggcaggctgctgggaggtggatgttgtagcgagccgagatcacgccactgcactccagcctgggcaccattgagcactgagtgaaggagactccgtctgcaatcccggcacctcgggaggccgaggctggcggatcactcgcggttaggagctggagaccagcccggccaacacagcgaaaccccgtctccacccaaaaaatacgaaaaccagtcaggcgtggtggcgcgcgcctgcaatcgcagggactcggcaggctgaggcaggagaatcaggcagggaggttgcagtgagccgagatggcagcagtacagtccagctccggctcggcatcagagggagaccgtggaaagagcggagaggggagagggagagggagagggagagcgatttttaaataatgtaaatgctttacttacttaaaattaacaaacaactcacaatgcccttaaataatttcctcagtaccaaagttgaaaatgtccagatcctcaaaagctggaagtggtgtgggtctgcctcatgctctcagaagttctgaaattgactcatactgtaaatagtcttgtggtggtgaggagggagatactgagcttcatggcttttacttttctttgtgctggaagaagtaaggttatctgctgagagtaaggaagaggagtgcaaaatgtgagaagagaattaaacaggggaggccaggcatggtggctcacatctgtcatcccagcactttgggaggccgag

SEQ ID NO: 11688 - DNA, 1571 bp, Artificial sequence
  DNA replication origin
gcccggcagccaccccgtccaggagggaggtgggggggtcagcccccctcccggccagccgccccgtccgggagggaggtggggggatcagccccacgcccggccagccgccccctctgggaggtgaggggcgcctctgcccggccgcccctactgggaagtgaggagcccctctgcctggccggcccccccgacctggagggaggtgggggcgttagccccccgcccggccagccaccccgtccgggaggtgaggggcgcctctgcccggccgcccctactgggaagtgaggagcccctctgcccggtcagcctccccgtccgggagggaggtgggggggtcagccccccgcccggccagccgcaccatccgggaggtgaggggcgcctctgcccggccgcccctactgggaagtgaggagcccctctgcccggccaccaccccgtctgggaggtgtacccaacagctcattgagaacgggccatgatgacaatggcggttttgtggaatagaaaggggggaaaggtggggaaaagattgagaaatcggatggttgccatgtctgtgtagaaagaggtagacatgggagacttttcattttgttctgtactaagaaaaattcttctgccttgggatcctgttgatctgtgaacttacccccaaccctgtgctctctgaaacatgtgctgtgtccactcagggttaaatggattaagggcggtgcaagatgtgctttgttaaacagatgcttgaaggcagcatgctcgttaagagtcatcaccactccctaatctcaagtacccagggacacaaacactgcagaaggccgcagggtcctctgcctaggaaaaccagagacctttgttcacttgtttgtctgctgaccttccctccactattgtcctgtgaccctgccaaatccccctctgctagaaacacccaataatgatcaataaaaaaataaataaacaacaacaacaacaaaaaagtcaaaaaataacatgctggcaaggctgtggaaaaaaggggatgcttatacccttttggtgggagtgtttaaccgttgtggaaaacagtatggtgattcctgaaagagctaaaaatagaaataccattcaacccagcaatctcattattgggtatacacccaaaggaatataaatcattctaccataaagacccatgcatgtgtatgttcattgcagcactattcacaatagaaaagacatggaaacaacctaaatgcccatcaatgacagattggataaagaaaatgtggtacgtatacaccatgaaatagactatgcagccataagaaagaacgagagcatgtctgttgtgggaacatagatggagctagaggccattatccttagcaaacaaacacaggaacagaaaaccaaatatcacatgttctcacttatacgtgggagctggccaggcacggtggttcacgcctgtaatcccggcactttgggaggccaaggtaggcagatcacctgaagtcaggagttggagactagcctggccaacatagtgaaacttcatctctactgaaaatacaaaaatt

SEQ ID NO: 11689 - DNA, 978 bp, Artificial sequence
  DNA replication origin
cgactgggcgcgcctggcggggtagggggcgctagggcccggagcggcggggctgggggctcgggggcggggcgcgacccgccgagggggcggggactgaatggcgccggccgacacgtgcgggaggagggcgggcgcgcgccacacacactgggccggggcgcgcggccctggtagccgcgcgcgcttgtttaccagcgcacgtgggtgttatttttaaatggaatgtggcgctggctgcgctgccgagtggcgggcgcgtggggccgcccgcgctggcggagggacgcggcggggcccgcggcgcggcctctccgggcgctgctcgcgagacagctaggctgtccccactgcgcgccgctggcatagccggcggcccgggccggggaacctgattgagagtttcgcgcgctgcccgagccgcggcggagacgacggtttcccgccgcggaacgccgccgtctttgcgcccagctcggctccctcattctcacattcagggaacaaagcctcctgtttgtgcttcgcccaggaggccgcgccagtccgcggccacggtttctagagcagatctcacaagctgcacacactcactggcacacatactttggctgcgaggtggaccctcagcaccctacgtactctgtgtcctcgcttccttgtaccgaatgcccgcagtccacatgtgcctgtctcgtgggcatgcggctctgcccacatataaaagcgtttctgctatttcgggttgcccttggaagggggagtctggggaagggggctctgactgcttactgcggtggctcctcctcacgaggcacctctcctctccttgtaggcctgtcccactgagaagccccaggtttgcattgggtttacagcctgggagtgtggatggtgatgtatgaccacaactcggcttcaagtgccagtgcttggggtgcgggttgggtatggtggtggttaaaagctggtattcag

SEQ ID NO: 11690 - DNA, 1263 bp, Artificial sequence
  DNA replication origin
taccagggccgcgcgccccggcccagtgtgtgtggcgcgcgcccgccctcctcccgcacgtgtcggccggcgccattcagtccccgccccctcggcgggtcgcgccccgcccccgagcccccagccccgccgctccgggccctagcgccccctaccccgccaggcgcgcccagtcgagtgcgctgcaactttcctcccccgacgcctcctcttcgctggcagacccaccgccccaagtcggctgccttcctcccgtccgctgtcctctcgcgtccccccttgaaccctcccaccgccagcgcgcgaaggattggtttctagtgcgccctctccctttttccctctcctctctctccttccttagaattttactcgattgtttattatttgctggggggcgggggcgggggggcggagaggggcgtctggggcctggagactggtggccgcggccagtcagcgcgcggcgtgccttgacgagtaagcggcgcagcgaatggcgacgcggcggagagctccggggtcacgcgcgtgtggatacgatgacatcatctgtttgtacgcgtcgaactagcttggtgcaggggcggggccgcgcgtcacttgagtgacgggcgctgcgcaaagcccggagcccggaggcggctgggcgggctggctcttgcgtacgctgggctggacctttttgtgtatggggtcgttgaggagcccgcttctacactctgagctatctccggtgacttacaaggattttttaaaaaatatatttatgaactagtgtgtagacttttggtgtgcatgtcgcgtgtggtgcattcgtagagtacaaataaacgatttggggcacggatcgtagaataaggacttgtgcagatgtttttcgtttaacctaaaggatacgtctttttttaaaagtcaaaaatgcccacgtagcggttttgtcgtcatttacaaattagattaaaattatttccccttctcagttgttcggaatctgctcttgaatgtaggacgggggtaaatttgcatttcttccggagttagttacacctctcccccgtttgccatgaaacccatgaaaagtgaaacacgactgtggtccaccgtccgaggtgagagactcagtgcaaaccttttggtgcctgatcgaatctgtgagcatcagcttatcgaagttgtgcaggcaccaacatcttcgccgttcagtatttccacaccgcgataaccctgcccatcttgcggccagcatcttatctcgggtgt

SEQ ID NO: 11691 - DNA, 905 bp, Artificial sequence
  DNA replication origin
cgccgagtcccggcccacggcgcgcgcccggacacccacgcccgcagccccgcggagccgggccgcgcaggcgcgcgcgagctcacacacgcgcactcacacacgcacgcccgccgcgcgcccggcccgccgcccagcccgccgcccagccctccccctgggcggggacccgcccgccgtcagcctaggttgaggcgccctgcgtgtgtctataactttgtgctgctgccgcggccgccctgctcgtggaagggaggaggaggaatgtggaaggtggcggcgcgcgagctgacaggcggttcctcgggcgggctgcggcgacggcccgagcgcttctccttcgccgaggttgcgcgccccctcctcgccgtgccccgggcccgcgcgggatcgtgcgtcgtcccgccgcgtccctgaagggaaggaagcgaggtaggcgccggagccgtgcagcgggcggccgccttcccggtgactccggatctgcttccgagctgggccgggcgcttccctttcccctccctgagccgcggtgtgcgcgccccccttctcgcccgctagtgtttttaaaggactcgggaagggggaaactgtcaagatggcagcagcgggagcaaggaggtgatgaacgtgctggtccgggttttctagcagcccgggagacttggcgcttcccgacctgttggaagatttatgttccgactcgctccctcccccggatcccgactgggaagggggcggaggggacgacgtccgcgagaatgcaaaccacacaaaaccccgaagtggccgtccccgccgggctcgaacctctgcgaacacccgctgggctgctgctcccccttctttctgtctttcctttattttttggaagtgacaagggcccatctgcgcccagacccccg

SEQ ID NO: 11692 - DNA, 1423 bp, Artificial sequence
  DNA replication origin
tcggcggcggcggcgggagcggcacgctgggctccgggctgctccttgaggactcggcccgggtgctggcacccggagggcaagaccccgggtctgggccagccaccgcggcgggcgggctgagcgggggtacacaggcgctgctgcagcctcagcaaccgctgccaccgccgcagccgggggcggctgggggctccgggcagccgaggaaatgttcgtcgcggcggaacgcctggggaaacctgtcctacgcggacctgatcacccgcgccatcgagagctccccggacaaacggctcactctgtcccagatctacgagtggatggtgcgttgcgtgccctacttcaaggataagggcgacagcaacagctctgccggctggaaggtgcgtacccaccccgggctggcagcaggacccgccgggcctcctgcgcagcgcgagacgcgtctcggattcgtcggagtgcgcttgcgggctccagggcaaggggttggcagggggagcctccgctgcgaggctttgggggttatctttgatccccggagtcggggcacctggggacggtctcggaggggtgaatgaggctccccagaagcttggggcatggccaggtgaggagagggggcaggggacgccggcgagggaagggcgaacggacaggagtacatttgctggattctccggacagcaccgaggaggtaggtccgcagccaactttggagtagagtttaccgtagtgggggtctggtgcgggcgctgtggctggagtgagaggtgtgggggtgtttgggacgcagtgtctggaggaggggttggatgtgtggtttccagtctgtcgcaggagcatgttgcgtcgtcactagctgaatgagaaccttcgggtccaagtttcagcttgtgggtgttaacacctacaggcacatcgatccgattagaaaaagcagtggttgcaaaccttttcctggacggcttcctttccttgcctatattgataccttttcttctcggagatgtcgctccagtaaacctgcttctgactagctgcttctgaaatgttctggggcctcgaaccggccggtctggccacctcaatccagactggctgcacccgctgctcccgccgaggcctggattcaggcactgtttgagggaagggctctggtgtgggggacgcggggcctgcgcttcattcactctggcgtttgggaggaggtttgggggctgggccgggccgtaatggcttctacctgtaaatgaacccgaagagagactctctaccgttccttatcatcctcttggggcacgggacacgtggtagggagagaggtgtggaaaggcctatgatgtaatgacttcctgcagttgggtatccaaagagattaactcctctgcccctgctgggctgctgatatccagctgct

SEQ ID NO: 11693 - DNA, 1698 bp, Artificial sequence
  DNA replication origin
actaagagcactcgatagtttattagtaaggctttcaagccttagtcatcattccacaatctacagtgagggctagaaggagatgggagtaaaagagcagagttatttccattttatacattagaaaactgagcccctgaaagtgttaagatacttgccaaatacagctaaatcaagtggctgagagagaaccaaacctaaatccagagattctggctcctcaggaacagtccctgattctccataacaactggctgttcttgggctttcctcctaaagatcccatttccaaaccatgatagtttgaacgtttacatggaaagccttaacagattttttaagcaggtaaagagattcatctgctttgaaagagattccatggatggatggatggatggatggatggacgaacaggtgggtgaatagatagatggatgactgcgtgggtgggtgggtgggtgggtggatggatagatgggtagatgggtgggtggataggttaatgaatagatggatgaatggataaatgggtggatggatgggggatgggtgaatgggtgcatggataggtggatgggtggatgaatgggtagatgggtatatggatggatgaatggatgggtggataggtggatgggtaggtgctagctgcatgggtagacagatgggtagatatatggatgggtggatgggtagatggatggatagatggatggatgaatggatgggtagacaggtggatggatgggtgaatgggtggatggatggggagatatatggatgggtggatgggtagacagatggataggtggataggtgggtggatgggtgaatgggtggatagatgggtagatatatagatgagcggatggatggatggatggatgaatggatgggtggatgacagatgggtgggtaggtagacggatgggtgggtggatgggcagatgagtggatgagtagatgggtgaatgggtagatggacaggtggatgggtatgtggatggatggatgaatggacagttggatgggtggatgaatgggtgtctgggtggatgtatgggtagatatgtcgatggctggataggtagatgggtgaatgggtggatggatggatggagaatacacacattttgttaatggcagctgcattactttcaatccatatagtaatacaaagcaagtgatggtgaagtattcctgaggagcaagtctgccagaccttaaatgaatccctaaatgggcatatggagactatcataactgacacaaggtttgaggatgacagttccgtaagtgcttgacagtgtgttctcttttgtaaagttaaatagtcctctaaagcattgtttacaatgatactttgtttagcaaatcctttttccaccataaccagcataaagttgaactccattccatccatattcagatattccatcaatatctgaattatccatattataaatgagggtatacaattattgcagtttcatggaaacaaaatgctccttcctctcccagccagataaacacacaccacacaggtgaccgctgtcacactggacaagcctgcaaggcccccacactgggagtgtggcctcacccactctctcccctttccacggtctacttacacactccttctcaaccctccctgctcctgccagcccagctcactgacaattgccactttatggt

SEQ ID NO: 11694 - DNA, 1330 bp, Artificial sequence
  DNA replication origin
ccggatggggcggctggccgggcagaggggctcctcacttcccagtaggggcggccgggcagaggcgcccctcacctcccggacggggcggctggccgggcagggggctgacccccccacctccctcccggacggggcggctggccgggcagaggggctcctcacttcccagtaggggcggccgggcagaggcgcccctcacctcccagacggggcggctggccgggcggagggctgacccccccacctccctcccggacggggcggctggccgggcggggggctgacccccccacctccctcccggaccgggcggctggccgggcagaggggctcctcacttcccagtaggggcggccgggcagaggcgcccctcacctcccagatggggcggctggccgggtggagggctgaccccccacctccctcccggatggggcggctggccgggcagggggctgaccccccccacctccctcccggacggggtggctgccgggtggagacgctcctcacttcccagatggggtggctgccgggcggagaggctcctcacttctcagacggggcagctgccggacggaggggctcctcacttctcatacggggtggttgccaggcagagggtctcctcacttctcagacagggcggccgggcagagacgctcctcacctcccagacggggtctcggccgggcagaggcactcctcacaacccagatggggcggcggggcagaggcgctccccacatctcagacgatgggcggccgggcagagacgctcctcacttcctagatgtgatggcggctgggaagaggcgctcctcacttcctagatgggatggcggccgggcgcagacgctcctcactttccagactgggcagccaggcagaggggctcctcacatcccagacgatgggtggccaggcagagacactcctcacttcccagacggggtggcggccgggcagaggctgcaatctcggcactttgggaggccaaggcaggcggctgggaggtgtaggttgtagtgagccgagatcatgccactgcactccagcctgggcaccattgagcactgagtgaacgagactccgtctgcaatcccggcacctcgggaggccaaggctggcggatcactcgcggttaggggctggagaccggcccggccaacacagcgaaaccccgtctccaccaaaaccagtcaggcgtggcggcgcgtgcctgcaatcgcaggcactcggcaggctgaggcaggagaatcaggcagggaggttgcagtgagccgagatggcagcagtacagtccagcttcggctccgcatgagag

SEQ ID NO: 11695 - DNA, 981 bp, Artificial sequence
  DNA replication origin
tctgggaggtgaggggcgcctctgcccggccgcccctactgggaagtgaggagcccctctgcccggccagccgcccggtccgggagggaggtgggggggtcagccccccgcccggccagccgccccgtccgggagggaggtgggggggtcagccctccgcccggccagccgccccgtctgggaggtgaggggcgcctctgcccggccgcccctactgggaagtgaggagcccctctgcccggccagccgccccgtccgggagggaggtgggggggtcagccccctgcccggccagccgccccgtccgggaggtgaggggcgcctctgcccggccgcccctactgggaagtgaggagcccctctgcccggccagccgccccatccgggagggaggtgggggggtcagccccctgcccggccagccgccccgtccgggaggtgaggggcgcctctgcccggccgcccctactgggaagtgaggagcccctctgcccggccaccaccccgtctgggaggtgtgcccaacagctcattgagaacgggccaggatgacaatggcggctttgtggaatagaaaggggggaaaggtggggaaaagattgagaaatcggatggttgccgtgtctgtgtagaaagaagtagacatgggagacttttcattttgttctgcactaagaaaaattcttctgccttgggatcctgttgatctgtgaccttacccccaaccctgtgctctctgaaacatgtgctgtgtccactcagggttaaatggattaagggtggtgcaagatgtgctttgttaaacagatgcttgaaggcagcatgctggttaagagtcatcaccactccctaatctcaagtacccagggacacaaacactgcggaaggccacagggtcctctgcctaggaaaaccagagacctttgttcacttgtttatctgctgaccttccctccactattgtcccatgaccctgccaaa

SEQ ID NO: 11696 - DNA, 1225 bp, Artificial sequence
  DNA replication origin
ccgtccaggaagcgtgactgggcaacggggcctgggtctggccggggtctggccggggtcagagctgaaaccggagtccgagtcagaggggaagccggggccggggccaggctccaagaggccgcaggggtcccagacagagcttagctcgacgtcacaaggttcggggccggggaggtcccggagtgggatcaggaactggaatcgctgccgggcggggcttcagggcagccctcggagcggcggccgtcgctggggcaggggcaggggccacagccatccccggcgttggagggggacaacgcacccctgccagaggtggaaaccccggagaccccgtctgctggcgccactgccacaccgactgcctggaggcgccgctcttcttccagtggccgaggtggcaggtggacgcgcacccctggatcttcctgctggcgcccatgatgctgacggccgtgctgggcgccggcttccttcaccttcccaaggacgaagaggaagatctgcaggagcagtgcatcccggtggggagcccggccaaggcggagagacgctttgtgcagggctatttcaccaccaacgattcctaccgcctctccacctccaggaggtgcactcaggccaatttcacctggattctggtgggctcccacagcaacccactgctggaaccggacatctttgcaaagtcagtaaattggacagcacggtgcaggatctacgtgtggcacagggaaacggaagccagatccagtacgagcaggtgtgcgtgaggtacaagaggctctgtgtgtcctccaacccgttcctggatgtctggcaagtggacaaaacgttcgacctgagctacaaccacagtgagcatccctctgtctgatcggcttctttggaggacacatcttgggatgtaactggcctaggtaatgggccagttcctcctgcagtccaaagccatgtggctgctgaactgcctgaagagcaccctgaggacaacgtgcagagcaagatggctcacccattccctcaaccaatttagcaacattaagaacagtctggccttgaagaaaatcgaggtacctggtagttcaggtttacagggaggtcaggaggatgtgggagggatgaggaagacttgctccgagaaccctaacaaaagcactgcatgactacttgatggggtccttgcctcacagctgggtttgctctactgtatttggtactt

SEQ ID NO: 11697 - DNA, 1548 bp, Artificial sequence
  DNA replication origin
accgccaacctcagaggcgcgacgcccggccccatcctcaaccccaccgctgcccccgcggaaggaagccacgtccccatttccgaccccaagtgaggctaggaattacgatgcacttttaaaaggcacctcgacttgcaacacttcgaggggggccccagccccgcagccactgggaaccgcgcgtccgcttccccccagcgcgctccccacccggcccggccacgagtggactccaggctggccgccatgttgccggagtcgccgccgcaccccgagcgcggcccgcccgcccgaccgtggcccgaacccgggccccgcccgcacggcgaggaggcagtgcggctcggctgggcaggggagggcgggaagcccacagggcccgcgcccacctggtgccggagtggtgaccagcgggagggacgtcaccggcgccgaggttacgttggagatgggcgctaaagtcgtcacgttcgggtgctgggtcgtgttcttgtccgcggacagcacgcagagcacgcccaggcaggtggcggcccaaagcagtgagcgggagagccgcgacatcgtgtcctcagcgctggcgttcgggagaaagctaaggctcgcaacgctcagtcaacccctcaatcccctgcggcgccgcctccgagactacgctcccccgcgggagcgcgcaggggtcacgtgagaggcccctgttttcggcgtgcgggggcgaagaggagggaggtggggctcggacgataccaacgggaatcctacggggggaagcaggggagtcgggaggaagccgaaggaacctggccctcaaagcgactgtgccacagccaagaaaactgggagcttctgcaaatcgttcttcttgccctcagattaccagacacgacgcagctggacttgtctcatgcctgcgatagggacggcccccaccctgacttgcatggaacagtcgacataatgtggcctactgcttccacctgagcgccccgccaggctgtaattccgcgggcccacgtgacctccggggccgcgccttccggacgcaactccactggggcggaagttggttttgtgcggctctcaagaactaagtttgtgctgtgctgcgggatccccagggagcttccttatatcttcggcaggaccccttctttttttcttgaagattgattttgctagaagttatcctgtgatgggactccctaggggaatggaggcaccacgtggttaaggagtttgtgcgttgccgcccacatagtgtgggcagctgaggcgccgcccggatcagagccgcagggcgtctactctgtcactttcccaacctgacttttccggattgctatttcagacggcggttgcagcagccgacctgtctcaactccaccactgtagtcagagaatcaaaagcggtctgagttgcgaggtcattggggaggcccccacccccacattaccagtgaggaaactgagacttaaaaaagtgacctgacctggacacgggattgcctgacatcagagctggattcttaagttcctgttagtgtt

SEQ ID NO: 11698 - DNA, 1114 bp, Artificial sequence
  DNA replication origin
cctccaagctcgtccccggcggtcgcggccgcccgcgcgccggcggcccagcaacaggcgcaaagttgaggaaaggcccagccgccacgggccgccctcgacccgcccctgggccccgcctcctgcgagcggcggaggcggggccgcgcggttgccggagcgacgcgcagtgtttggggtcaccgggcgtccccgggcgcggccatggcaaggccgcagccgtgcgggcccccgcacgctaggtgcggctcgccgtcgctgccggagcggccgctgcaggtgaaggtggtggggctcttcagctgccccaactttcagattgcgaagagcgccgctgaggtaaccacagagaaacctccgtcgtgggcggccctccccgctacccgctctcggccgcgtggactgcaggcgccgcgcctcctcgaggcggcgggggtcgaggccccaccggccgaggaaggggctggcgtgtcctggccgggcgggctccgtctggaggaccgggaggagagtataggggggcaagtgcgggtccgggggcgggcgttccacttggcgacttttaaagggagaactgagcgaaggaagggttcagaaccgcgctgggagataaggtaatcccctccgagacacacacacacacacccgcagattttgttctacgtcaattttttctttaattagagatatttaaatttatggaaaaatgattactatataactagctaatttttacaaccccgccacctcggcccaagcgatttttgttaactattcatgcggggagattcttttctttgaattttatagagccgtcactgcgttccaatcgaactagatgcttcacaagtgctttggaaaatcatttctttgtaaacactcagaacgatactaaaggaaaagcacttgaggaaactggaagaatttggccagatcagtcatgctgcagcacacttacaacctgaaatgcaggagaaatgtatgaaatgtcggcatgtagaattcagcccttcttacagggtttgctccagaaatgctgtccatggcaaacttctcgccgaagctcacttgactccaggaccatgccttaattaatgtttttaactcccgaagt

SEQ ID NO: 11699 - DNA, 1976 bp, Artificial sequence
  DNA replication origin
cacctagcgtgcgggggcccgcacggctgcggccttgccatggccgcgcccggggacgcccggtgaccccaaacactgcgcgtcgctccggcaaccgcgcggccccgcctccgccgctcgcaggaggcggggcccaggggcgggtcgagggcggcccgtggcggctgggcctttcctcaactttgcgcctgttgctgggccgccggcgcgcgggcggccgcgaccgccggggacgagcttggaggaaaaggaaccgggagccgcccacccgggggcgctctccggacccccagggtcctagcgcgcggcccttaccgagcctgggcgcccggatttcggcagcggatcgcctttccgggttggcggcccgcctgattgggaacagccggccggttgccgggggaacgcgggagtcgggcccgacctgagccacgcgggcttggtgcccacctgtgcgcgccgcctgcgaagaaggaacggtctggggagaaggcgccgccggccgcccccgtccccaccgcggccgtcgctggagagttcgagccgcctagcgcccctggagctccccaaccatgaagcccaacttctccctgcgactgcggatcttcaacctcaactgctggtgagtgcgtctgcggagtgcggtctgggggccaccttccgttcgcacccatgcagccttcctccccctatcccgccccacgatctcagggtgtagggaaaacccgaacctccaaagtccacatctggccccagcgccggtggtcccagcagtcgcctcccctgccccgctcttcccttccttaggggcattccgtacttgagcaagcaccgggccgaccgcatgaggcgcctgggagactttctgaaccaggagagcttcgacctggctttgctggaggaggtgagattgtgcagcacggtgcggaacccaggctgggaggagggacagaccgtcccactggggaaagaccaagcaggcatcctcaccgcttccctcaggtgtggagtgagcaggacttccagtacctgagacagaagctgtcacctacctacccagctgcacaccacttccggaggtgagaagcccactggcctgaagcctgttgtcatcccaggaggctcttggccctgccagcccttccctatcctgcctgcactctccagtctcctccagcctcctctccctctggatgtgagagaaggagaagggtgaaccaagaaggtcctatgacttcagcccatttcagctttgttttctggctgccctatactcctccaaaggctgtcgccttggttctagggctagtcccagcagtagaaaaagaaaaaaatagctgatcagagctggaagacaagggaggggaagaaggctgggtgtctctccctgtttttctggttattaagcagggcttggctttcagcggaatcattggcagtggcctctgtgtcttctccaaacatccaatccaggagcttacccagcacatctacactctcaatggctacccctacatggtaaggcagacctttgacctcttccacctcccttccccacctccagtaatacaaggtagaggaggcagccctctgagagctgcaggggatgggcagaaagatggtggcggtgccctgagtttctatctcctcctgcctgcagatccatcatggtgactggttcagtgggaaggctgtggggctgctggtgctccatctaagtggcatggtgctcaacgcctatgtgacccatgtgagtgaagctggcagtgcctagggctgggacatgcagcccagtcctgggacagagagatggtacttctctagctctcatacctggggatgaggtgtgggggcaagatcttataaggaagcaatgggcaaggcttatccattgtataccaaacaccatgccaagtgacagacacaggcttgattcagacatacccctgggaccctcagtcttatctgctgtgatc

SEQ ID NO: 11700 - DNA, 1228 bp, Artificial sequence
  DNA replication origin
tccacccccaagaaagatctttgcccttccgtcatgagattccgtctgccctcgtccgggccacccgcagcgggaggctttcatctcctgtctcggcgcggcgggctgggaacggaggggcagctggatggtggaggggcctgagcctcagggacctgcccccactgctgccattcaccctccctaacgctgccgtggacacccgcctcctccataccctctgataccttctgggccccgcgtgagaaaccccctcgggcacccttcaggtggcgtgggagggggcgacaaagcgaggctttgtctccggagattcctgggagagcgcgcccgggcgcacagggggcggggcggggtaggggtcgatcagggaggggggaacctgggaggggcgcacccggctgcggtcgacccccagccctacccacggccccctggagtagggcacattcacagaggaagtgttttgaccacagtgcgtcagaaatagacccaggcctccgttccccagtcagtcgcaacatcctcccgccgtttgttgaggcagtttggtggagggaagtggaacctacgcggacagaggctgtttctctgtcaggaggcaagcacgagtgctgaggaaaactttgcccttgccatgagacacttctcagacacagcgtggcactgaggccatcaaggggcgccggcacagggacgcttggagggagatggggcaggatgtatgctcagcagctggggttgtgggtatcagatctgtccctgtgttgcatgcaaaggcagctctgtcctctccacatctaagaaatccccgcacaccctgattccaaggcctaaggaaggcaggctaagaattcctaccccagggcttggagatccctggacagggaggctgaactggaggctcccctggtgtcccatgtgccctctgtgcccaagactaatgtttttcacttccaaatttggcaaatttcacttggagtggactggatagcagctgtctctggagcagatgctggcaggggaatgggctgggaggagcagagccaatcactggtgaatcccgagctccctggggacaccagcctgctctcttcgcctccccttcctttttatttcttctgttctccagcctcttccccttctttttccacctctccagccactcatctctgcccagctgctgccctccccaggaggcctccatggcttcacctacctccaccaa

SEQ ID NO: 11701 - DNA, 1005 bp, Artificial sequence
  DNA replication origin
gcggaaacgccgagatcgggcggggatgctgggatgcggggcggcccggggcgtgcgcctggagtcgcgcggagtgtgggcttccgcgaggggcgcggggcgccgcccgggctttattcgcgactcattagcatctcattacttctggatccctctaccgcctccagcggggacagtcttgggcccgcccatgcctgcagggtggcgcccgagggcgtggcgctgcggacaccccgttccgctctggggcctctgggtgggtctggcctgttgggggctgaggagctcgagggtcagggcgcccagtgctggaccgcgcaccctcggcctgggctccttgccggtgcttgcgcgtgcaaggctagctctttccccgccgcaaggcgaggaccacccgcccccgccgcggtcccaggtccgctggcagcctcccagcgccgggccgagagggcgctcaggctcctcaagaggtttggaaaagccggcgggtccgagggtggcgccggaacgtctgcgctctcctccggtctcccacctggagatccacggcccgggcgccccaggatggatccaagcgcagagtgcgcctcctgtgacagaggtcgacccctaagcccgggccgagggcaaagggcgcggattaaagtcctggaaactcagcaatctgcagcttccaaatggatatgagaagtgagagggaaggggatggcggggcgggttagaccaccactaagagatggggaatgggaggggtgtgtggaagagagaccaagtcttcaaagaatgccttagagtgaggacccacgggactgtctgctgaaaagggctggagaggcctttgggatcagcttcgtcgtattcccgataaggaacagcgcctaaagtgaagggacgcgtccagtcttttagctagttaatattaaaaaacatcgtctcatttattgaccgtcatcctatgagtattacctcaacatcagtgcttgcaacagtcccattttaccaaaa

SEQ ID NO: 11702 - DNA, 1681 bp, Artificial sequence
  DNA replication origin
ctctggggcttctgcgccgcaccggtttctgctcctgcgccgccgccgcagccacagccacagccaacccggaagcgcggcgccaagagccgcttgcgcgcggacgccgaaccacgtggcccgcagaggcgcccctggaggtgggggccacgagagcggcggggaggggaagggaggtgaggggcggggcggggcgagatggcggggcggggcggggcggggcaaggcggggcaaggcagggcaaggcggggcgcgaaggcagttcaagggttggggcgtggcaggggaggggaggggcaaggcggggcgagaatgcaggcctggggtcgggggagccgcggcggggcggggcagggcggggcgagatggcaggcccggggctttggggccggggccggggccggggccggggcagggcggggaggggcgcggcttcggaggagggacagtggccggggcggggcgcggccaggggcggggcggtgtcggcgcccgaggtcctgcgtgtggcactgccggggagcccaggcaggagcgacttttgcggtgaattgggggcaatggacaggagaggcgttgtgacccctccctttgggaagttttatatcgtattaaactgttagctcaacgccaataccttaattttatctcttctccgacaccgaatctggtgttgttcttgaatgtataaaggcatgaaatcccccttaccgtcatcatcattgtcatcatcatcaccatcgtcattatctagtgctaatataataactattacttacctcctaaatgtttttcacatctgcctccttttcctccccactcctgatgccttagtctaagggaatgaagagagcactgcagtcagagaaacctgggttctgagagatcttgggcaaattacttaccctcacaacttctttaccttacctgtaaaatggagatgttaacactagtgccactttggtagggttgctattgcataaacaaaattaagtatgtaatgggcttaggaaatgcctggtttaattcgtctgctgtgattaaaatgatcattattattcaaactttcatcatctttgttcaatagactgtttctaactggtctcagctgcagcgttgttctctttaattcgcagaagtacagaggatttctccaagtacatatgagatccagagactagagtcactccttggcttagaatccatgtggctcccacatgccctctggataaagtccaggcttcttaatgtggtctacaagccccatccagatctactccccacctgcttccatccatttatttcagcattttctctctcttagccaatacctaattacttatttttctgcccatttccagattcccaacatgccatctatagcctccctgatcttgaaccggaggtgtaattagcaacctggctcttacatttttactagattttattaaaactagctcaagccacacatgctccttctctgaggtttccctttcatattgaattgtctctaagtcctctggatttgtgggggtacaagtgggatggggagcgctccctgacttctgcataccagcaggaagttagctacctcattgtttcttgctgctacgagggttgcagtcaaatcactgtccctccagaggtcctcaacggcataagaagactcagtgccaaggt

SEQ ID NO: 11703 - DNA, 1446 bp, Artificial sequence
  DNA replication origin
cccatggggctgggcagcagagacgctgtccgcggtgctgaaagcgaagtttctggcattgcgaagcctggagagtcctggagcccagagacccctgcgaagggggtctgggaggagagactagggtgtgtgtatgggggcagcagagggtgggagtcaaggttggctccatttctcctcttctggaaagacctgtcccctggatatctttctcccctcctctccccacatcctcaaagttccctgggaactcggccactcacctggggcgtcaggacttctggaagtcgctggtcatgggcgccgaggcggggcgccgggctgagctccccgcgcaaacagagcagctgcctgcaggaggcggccgggccggggaggaggcaagcgcggggcgcctgtcgctgtgccggctccgcgagtgagagatacagttggtggcagaaaaggcggctgcgagcggcgcgcgctgcagattgacaggcagggcgtggtgacgtcaggctcccggctcccggtgcgagcccagcactcactctcctcgccagcccatcctgtgccctccccgccgcactccccctgcccccaacactatctgagggtcctaggagggaggagaagccagagcaaccacctccagtccagaacttccaggaatgggatgggagagagacaaggagaggtagaaaggagtgaagaagaccctgagaccaggcggcgaagagggtgagctgggaggggaggggtgaaggatgagtgacacctgccgggcagcaaagcccagcgtcaaagatcactgagggatcaggtcaaaaaagaaaccccggagaagggggaggttgggacaggggtgtttgatgggaaagtagctacctttaaaaaaaaatgccgttcccgaaacaggaattatctgggaaaagaaattcactttttaaaaattttatttatttatttattgagacagagtctcactctgtcgcccaggctggagtgtagtcgcccgatctcggcccactgcaacctctgtctcctgggttctagcgattctcctgcctcagcctccccagtagctggaattacagatgtacgccaccacgcccagctaatttttgtagagatggggtttcgccatgttggtcaggctggtctcgaactcctgacctcgtgtgatccacccgcctcggcctcccaaagtgctgttattacaggtgtgagccacctcaccaggcctgaaatccaatttttaaaaaggatgtttgtggtacatgctcagttgagtagagtcagggaagaaattctgagttatggggagcagttaaaagatggataagacagggacatctgaggaaaacaatctcttcttttggaggttgcctgtgcaattcctctctttcccattatcttttctgaactctacacagcaggtttcactgtgaccttttcggccca

SEQ ID NO: 11704 - DNA, 1162 bp, Artificial sequence
  DNA replication origin
taataggtgagcgcgttatacagggacaggtagcggtccaccgtaatggccagcaggctgctgacagaggcggcgaaggaggccacgaggaagcccaccgtgagcagactcacagtctccgagggcaccaagtactggaacacaaagtgcaagatgaggccacagcccgccaacaggtcagcggtggccaggctgcctaccagcacgaacatgggcgtgcgcagcgccggagtggacgcgatgagcgccaccaccagcgcgttttctccagcgatcactgtccccgacacgcacaggagcacgtcccacggattcaccgctggcagcaggagtcccggtggcccagccgacagctgcgaggacagctccagagacccattagctccgccgccggctcctagagccgccgcagcagggggtccccattcgcccgtgtccggcccccctgctgctgtggccgccgccgccgctccttcggccgccactaccaccacctgggagtcgttgagcgaggcggcgctcgcgttcatcgcggccggatttgcaccctgcatagggagggagtgcaggcgtcaggtgtacacttcaggctgccaggaaacttccccacgcgtagagcctcctctcgcattgccccacttgagttgcccaccccaccctgggaccccagagcaaatcggggaatcatgggttaagtgcgaacccaaaataaatacctgttgagtgagtgagtgaaatgcccacgcggacttctgagtttttgcagatatacaccaggacaacatgcactcacatgcacaaggatcaattctccaaggctgcctgtatttgcacacgcacccgagtgcaccaagctaggagtgtcatcctgggagagtcccgcctgggttgtggcggcgcgaccaggacatccccatggggctgggcagcagagacgctgtccgcggtgctgaaagcgaagtttctggcattgcgaagcctggagagtcctggagcccagagacccctgcgaagggggtctgggaggagagactagggtgtgtgtatgggggcagcagagggtgggagtcaaggttggctccatttctcctcttctggaaagacctgtcccctggatatctttctcccctcctctccccacatcctcaaagttccctgggaa

SEQ ID NO: 11705 - DNA, 1030 bp, Artificial sequence
  DNA replication origin
agcgggttccgccccagagcccgaccctcctgggggctctaggcggagtcccgcgagccgagggggaccggcgaccgctgccgaagcatgaagaaggggtaaggcgtgagcccccaagatttcacggtgagcgcgagtccctgaggaattgcttttttcggggagggggtgttgggagaggaactcttccttactggccggagcagaccgagtggtgtgtggcccgcaaaggtgacggggatggatgggcgcgccttccccgccccggcccccacccccatccgcgggttttccgagcgcccaccgcccacccgccagcggggctgggtgccgagggagacggcggcgggcgcgcctggggcttggctgcagggaccgccccggggctgctctcgctggagagactgtgggtgtcacctgaggtgccaccgcccgggcttccctgcccacccgcgcccgcggtccgccccgtgcctctttccgggggaggcggtagccccgggcgacagagaatcccctgctcgccctacgtgcgcgaggctcggtaaagcgagctcgtgcgtttgcgtgtttgctccgcgagtcggtgtctgaaaacataacggtaaagcgagtgcgggcatccttttcttcgttggaaggggaggcgaagcggtgctgtcgcttctggtgcctgttcatgggggctgccttgggcagagttacggagccgctcactcagcgctcatgtcggcaggactcgcccattgtgccacccagataattattcaactatgcagcatccattgcacctttcccatttttcttttccccttgctacagcatgccccctagcttcggtactctgacaccttctcttgcacttgcggatgatgaactggaataacgatgaaagaaagcacatccgatctcaacattcacgtcctgccctataaccgattaattaattgatccccagctagactaggtacttaaatacgacttactctaatcatttccttttctatgtaataagatgtgcggtggattc

SEQ ID NO: 11706 - DNA, 1207 bp, Artificial sequence
  DNA replication origin
aaaagaaaagaaagaaacatcacattgtaactcaaatatgtcccccgccttgagcagcctttcttgactccccaggcagagctgaaggcctcaattacaggattggaaatcaccggatgcctgtgctaagagcctcccccacgagaatctgaactcgttttgtgcctccagcaccagatgcctacctggtaagcccttggcaaaactgtgctgaatgtttaacatggtatcacggacagtgaattaggaacttggagaggaagtggctgctttcttctggaagatctaatcaagactttacacaggaggtgaggtttgcgagatagaaaaaggtatttcagtttatccaggaagttagcacgatggcccagcaaggaacagcagtggtgtggaaaaacggagggcgaggcccgaaggaagcgaggaagtgaagcccggcaggagtgctgggttgtggtgctgaaaagtaggctagcactgggcagccgaagacagcagcgaggcaaaggaagagttgttccctcccctccaggaccggtgatgggaagcggggtggaggttggggtggatgtctaaaagaaacgaggaacagccgggcaacggaaagtagttgctttggagaacgtggttgaggctggaagcaggagttgatgggtaaaaggatgaggagagctcatacctgtagttcttttcatttccatgtacgacgcaaattaccgagctccaaaaaggagatgagcccaaaaccttaacaatcagaggctaaaaatggactaatcagtgaggtgtaagccaagaagttaatgaggtaggaggcacaacacggtcgagagttataagacaaacccaggttattacttgggtcctcgaggatccaattaacttctcattaagtggggctgggtgctcggcttctcaactggcgccagcctcccagcccccagccaacgcctggaatgagactccagggaaattcggccagctggtggatcttcagcgagatgaaggcagtggcgtggacaggccattcacggcgatacccacccaactctgtccaggccttaagcagaaggctgggagcagcacagcacatcaatggcagccacaacgccttcctttccctttccctttccctgcctatcacgcaaacactcccctactaaagtgtatcctccgtgagaacagggctccgtccttcttcacggga

SEQ ID NO: 11707 - DNA, 1118 bp, Artificial sequence
  DNA replication origin
tcacctgcctcctgctggcgccgcgcggctggcccggcgcgggcggcaggtgcggcccaggtggccgccaggccgggcccggcggggcgctgcgggtgggggacccgggcccggcgcgccgcagctctgcgcagagccgcaggccgaacaacagcacagccccgagtagacaccggcgcaggacgccgcagcccctcccgggcggcctctcccgggccatggcgctacactcggggtcccgcgggccgcgcctggccggcagcagggatgtagccccacaggccggagcggccaactgtgggaactcccccgcgggccggggtgcgggctcggacccgcctccctccctcccgaccgaggaagccccggcgtaaccttatcctgccctgccgagcgcgccccgccgctggaacggtggtgggccgaacgcggtcacagggggccctctccgcccctccggaggtgccagggcccggctgtacagggtccctcaagaggtgccctccgccccggcctccaaagcctgacggagctgaaagacatagggccagaaaaagcgcattcctaacgggatcccgggccataacttcattttctggtattagtgttgttggagaaacacaggaggagggtaggtgagcatacaaggaacagtcaagcagtttgcaccattaagcacaatataaaaataaatagcacttatgcccgggcttacaacttctctctctctctcaagaaagaaagggattggggggcgaagagaatagcactcaatgcagaataatcaaattagagttattctatgtctaaattctgcctgaagccaattcgtgctttctttccgtgttatgaaatgtgtgggggtgaagaagaagagggaaaaagccagctaagacatctgacagcgggttggtgaggaggggggagagagaacagaagttaccatggcatgatgtaaatcaaattaatttagctccaaacacacacctccctgctgtctcgcagaaatacagagggacaaatttatctttcggcaaaatgctccccagctggtatttccatcaccaccttgaccttaattaatcagactgaactctcacagcctgaagtccagtggt

SEQ ID NO: 11708 - DNA, 1217 bp, Artificial sequence
  DNA replication origin
aggtgattctcatctctgatgctaacaccttcggcatggagagcacgcagcgcgccaccggccaccagagcctgttcctccgcatcctcagcaactcgtcggggtccgacgcgcaggagctgctggctctgtggccgttccacacacatagttgcgtgtgctgccccgccaacatgtgcaagcacaaggtgctcagcgactacctgcgcgaacgggcccacgacggcatgcacttcgagtgcctcttccatgtgggcgacagcgccaacgacttctgcccatggggctgctggcgggcggcgacatggccttcccgcgccgcagctaccccatgcaccgcctcatccctgaggcccagaaggcggagcccagctcgttctgtgccagcgtggtgccctgggaaaccgacgtgcgcctccacctgcaacaggtgcttaagtcgtgctgagtacggccacctgcagggggtcaaccgggccaacggcggagggggcggggaggggggattcggaaaagacaaagttagttttactactcccttttccctttggctttgctatatgtctctctgggaatttctggaatctcgttcatcatccctatcgatgcagttaacccacctcggctgcctcccctgttccactgcgcacggttgagttctggcgtctgactcatcgtggggtggcgggcaaaccttggaaggcagcagtgtttcctggtcctcccaagtgggaggaaggggctccccggcaggtgagagaaggaaaatctcccactgctgtaattgctgcctcgggccgcgtgaccgcccgcctccagtcttttgtggagggaacccaggatcctgaaatcctcgtggctgcaaggactccccacagagacagaggagggtctccacctatgccccaggccttcgcgatcttgcttcacccaccacgacccgacactatttctgcgctgtctacaccctcctgcctcccgacccctgcactcccctctatcacccccaaaggaaaagccagagggaacaaccgcctcctggtggtggtacgaggtagcgcaccgtccagctggggtccggccggccagtaacctcgaagcatgcgacggtgtctctctccttgcaccccagccttgtctatgcagcaagagaccagcgacttcaccaaaatcccccaacaatggaacagaaagccatgatgtgtttaagtagaacc

SEQ ID NO: 11709 - DNA, 885 bp, Artificial sequence
  DNA replication origin
gagactagcgaacaaccaacaaccacagaaaatcaactaaattaaacctcttctcccgccgctgccgccgccgctgcggattgttccagctgtgttactaaagttcaggttcctttttttttttgctataattttatattaactttttttaaaaaaaggactaataaaattttcccggctttgtgtgagcgaaagttgaacgtgagtcttttggaaatagaggcagatacagttcagtctcttgtattccgctgctttcccgttagagagagtagagcgagcgctagctaatgtcgccggccatactgtgtaagcgagagcgctgcgtgagcaccgcccttatatatcccggctccccccaaaagaccaggaagtgacgcatcgtcccacctccacggcctatagctgctgccgcctgtcaatcactcgcggccgagtggcggctggctggccgagggcctggcggagagcgcggggagctgcccactgcgctgcggctcgggctctggccggctcctgagtgggagttggtgctgtgatgtccagctggggactagaaacctcggatcgaacgcagagtgggtggggagagcgggaacggaatgaggaaaggctgtgcagagctgtttagaaaaaaaaaatgattagcagaaaacatgggtgggtccttaggggtgttggcggggttcagcggggacggtggccagcgctgggttggcgtggtggttttgatcttgtgcagttcaccgcgactgctgaggtacttggccattcttaaaagtgtgttttcccaaggcgaacgcagccaggcgttaaaactaaacatttgtccgtgacgcgcacgttgccaggggtcgaattagaaggcgctttaattctgctcac

SEQ ID NO: 11710 - DNA, 1878 bp, Artificial sequence
  DNA replication origin
ggggtaaggtcatagatcaacagcatcccaaggcagaagaatttttcttagtatagaacaaaatggagtctcctatgtctacttctttctacacagacacagcaacaatctgatttctctatcttttccccacatttcccccctttccactcgacaaaaccgccatcgtcatcatggcccgttctcaatgagctgttgggtacacctcccagacggggtggcggccgggtagaggggctcctcacttcccagaaggggtggccgggcagaggtgcccccaacctcccggacggggcggcggctgggcggaggcgcccccacctccctcccggatggggcggctggccgggcgggggctgccccccgcctccctcctggacggggcggctgccaggcggagacgctcctcacttcccagacggggcggctgccggatgggggggctcctcacttctcagacggggcggctgccgggcggaggggctcctcacttctcagatggggcggctgccgggcggaggggctcctcacttcttagacggggcggccgggcagagacgctcctcacctcccagatggggtcgcggccgggcagaggcgctcctcacatcccagacggggcggcagggcagaggcgctccccacatctcagacgatgggcggccgggcagagacactcctcacttcctagacgggatggcggccgggaagaggcgctcctcacttcccagactgggcagccgggcagaggggctcctcacatcccagacgatgggcagccaggcagagacgctcctcacttcccagacggggtggcggccaggcagaggctgcaatcttggcactttgggaggccaaggcaggcggctgggaggtggaggttgtagctagccgagatcacgccactgcactccagcctgggcaacattgagcactgagtgaacgagactccgtctgcaatcccggcacctctggaggccgaggctggcagatcactcgcggttaggagctggagaccagcctggccaacacagtgaaaccccgtccccaccaaaaaaatacgaaaaccagtcaggcgtggcggcgcgcgcctgcagtcgcaggcactcggcaggctgaggcaggagaatcaggcagggaggttgcagtgagcggagatggcagcagtacagtccagcttcggctcggcatcagggggagaccggggagggggagggggagggagagggagagggagagggagagggcaattgtggttcttgagataagtgtgtgacttctcttttttaaggcgttggtactggctgacagagcccacagtttcctaaagaatacactgactcccacaaattgcctttctctgtacattgagtttagactttgctgtacattttgagctatggtgtggctggtgttgcagcctgagagctgacagcttggtgttgacagtgtcttctgtacagtagtgttgtttgtccaaccatttgtatctagcattttgtacatcgtttttattttgttttcttcacaatgaaaatacatgactgaccagctttatgtcctatgaatgtccaaatgaaacttaaatattcacctcttagctgataatttccatcttgggctcaactgtattaaatcagagacatttagttctttttctccatataattaataccaccgcttctgtttttctgttttcctctcactaaaaataaatgaggcaaaatgcagtaaaatacccaatgatcataagatgtaattagagactttatagtaatttttagctggttaagatcgaaagccccttaagtctcctgtttgagtttccatatgtgatttgggagcttctaagtatgtattatactatacagtagatga

SEQ ID NO: 11711 - DNA, 930 bp, Artificial sequence
  DNA replication origin
cctccgggagcccgctggtaactcgcgtccctcgcgcttctccggcgcctgaggggcccgcctcgggccatggtgctctcccaggaggagccggactccgcgcggggcacgagcgaggcgcagccgctcggccccgcgcccacgggggccgctccgccgcccggcccgggaccctcggacagccccgaggcggctgtcgagaaggtggaggtggagctggcggggccggcgaccgcggagccccatgagccccccgaaccccccgagggcggctggggctggctggtgatgctggcggccatgtggtgcaacgggtcggtgttcggcatccagaacgcttgcggggtgctcttcgtgtccatgctggaaaccttcggctccaaagacgatgacaagatggtctttaagacaggtgaggcgcggcgcccgccgaggccagcctgggcgacccgcgtggggcccccgagcgcatcccgcgtgtgggctgtgtctgcctccgagtgtgcatgtcggtgggtccctgtgccagagggtgcgagcaggggggtctttcgagttgcagacagagcctgccgcttctggggcctcggggtgcccgtctttatatggaatccagctgcagagctgtgtgtttgcaagcaggtcgcagaacttacttgccgagatcgtcctcctttcccctcagcagagcagacgctaacagtccacaggagcccttccttttattgtttgaaaacaaacagaaccccagaaccttcaaccccagtcatcgccctgtcatttttgtggtctctttcgtgactatgccagttatgtagttcttcacctgcctccctgggccgcagaggggtgtgcgtatgttggcggggcggggggtggagtttggaggaatgaaagagatttgtacgaaggtcactggagttccaaagg

SEQ ID NO: 11712 - DNA, 986 bp, Artificial sequence
  DNA replication origin
gccgggtcgccagtgaagggaggcagtggcggcggcggcgaacatgttttcagtaaggatagtgactgcagactactacatggccagcccgctgcaggggctggatacctgccaatcccccctcacccaggcccctgtcaagaaggtgccggtggtgcgagtcttcggagcgaccccggcaggtaagcgggcgccgggcgcggggcgggagcgggagtcggcggggcgccggggccgccctccccgccgcgcacacgcgcacacgccaccggcgccggccgtctccgtggatcgctgccgcgtcttccctcccctccgccctcctcgccttttctctcgtgcgtgacaagagccgcaaaaatgtgggtccgcgcgagcgctgcgcggcgcccccacccccgggcagggaggtggcgagcgccgcgtgtttagactgcgtgtggcggccgggagcgggagccgcactccagggcgcgggccgggagagcgaaagccgcgggcgccccggacggcgggccaggtggccgcgccatgtccatcggtggacgggttcgtagggcctgctctgaggtcggtcgctagtgggacatcccttgtgtcccccaagtgccgctttctggaaacggggaagtgtcagccttgttgtcagtcgctccccatggtctcttctcaccctcgctctcctctgccagttccggagatgcagtgggccggagagagtggcgcttggggccagataatctttctcactggggtgaccgtgtggctctgctgtgagtgcaggtcgtgactccttagagtttagtgcctgagcgtcgggggacagggcagcatccttaggtgcagtgctttcaggaaatgtgcatccatggaagtaggaaatgcgtgtttatgttgcccaacctaaaacatcacacttaatggggtgaatttattaggaaccacagccagactcagcagcacagacattttgaaatgctcctagg

SEQ ID NO: 11713 - DNA, 788 bp, Artificial sequence
  DNA replication origin
gcagcgcccgcgcgggatcgatgactcggctggcgggcacggtcacctgggtgaggggcagcggaaggggcggcggagcaccgatctcatggatgggctccgaggggcttgcgggaggggggcgccagtgttcggggccgttttggcggctatgcaggattggcaggagctgcgatgctcacacttgcctcgccgaccgccatttcacatccagcagaggaggcgggggcagccgctgagacggtttttcacaaggtaagaaaatccgcccgcgtgaggagggaggcgaggcgcagatctcgtgccgctgcggcctcgcgggagggaagggcgggcgggcggcggaacgggcggggccgggtgcggacgcagccggcccttctcaggtaacgccgcggctccgcgcgtggcccgggggcggtgcgaagggtgggggcgcgcgggcgcgggcttcggcctataaaagggccgccctggcgttcccccttcccgaacgtgccgcgcgagccgcggtgccccctcctctttgctgctgcagtgtctgcgccgggccatttaatgagatttattcacgcacggctcttctcagctttgcgaggggttggcagatccagtgcacagggatttcccactaccgtgtttttctcccgcccccttccttccctctcgtcctaatacatccttcgttggtttcctcggccccgcaggctgcgtcccgggcacgcgcaagtacatgtaaggacttgtcagctgccggtgacctccctcctccctcgtcgctcctcccc

SEQ ID NO: 11714 - DNA, 1494 bp, Artificial sequence
  DNA replication origin
agatttacattaacatttcttccttaaagggaacatcaaatggtttagacttcagtcaagattctctacagccccagttcatagccaagtggcctcaaagcctcagatagttaaaccacttcctccaaaagtctgtgagtcccttcatctgaatacagggtacccatggagcagggactggggaagaagacagtacatagggtggaaagtattgcagttgcttgggtggtgagaaaggaagtaggcgtcccaagactaccttgaagcaggcaagaggcagtctgcagtggtcttccaaatgctaactctagaccgttttatccacgtccccaggtatttacttcaataaaagggtaaaacaacatcactgggcagacaggatttcatttcaaaagacttcagtacagtgccctcttagacttgagagaagaagccattcaggctgcctccctcttatcaaataacaatttaattctgattcagaaacaaaattcttgtgacccccacaccaatctactctaccccagctcttagtacttgttcccaaaaggacaggggaaagaacgaggggatggggaggctaccttaaaagtaaagcaactcttaagactgctgggataactgttcccttaaatctaagaaacactgcagctgccagtcaacactaccggtctctgaacacagcaaaatgccgacacctgccacccggcatccgggggttcttttattttttggtaaatgtggcaggaaagactcagagagatcaactgcttcatgggaaagaaagggaagccccagggaagagagacaagaagcatcgtgcctatcctagggtactttgtgtgtctcctctctatgcactgaaagggctctttgtgtcacactcacactcacacacccggcgagtctgtgtgatttattgggggaaggaggggcaagaagggtgattttattatccctcttcccagtgagtcccagcacatctctgctgggcccaagctcggtggcctccttctggcccagtcccctccgcctgtggccgcagagataacagaggggaggagcccaaacaaaaacagccatggatctagggaagtagagaggaaatccagcgagggagccggaaaggaaggagaaaagagctggagggagcagaggggtgggggacagaggaagaggagggaaggctccagcacaggggaaaggggaagggtgggtgggtggtggcacaggaagagtgaaggggaggatgggggaagtgcaagggaggtgccagaaataggcaggaggatgggttggagaaggcgaccgccgccgagggaggaggccgagaggtggaggagtggggcaggggttgggtggggagggaagcagcacggggcatcaattattaagtgattacatcatccctgacattaaaacaacacacacagccccagtccccgcggggggccccaaaaggagggcgggggcggagtctgggccagcctcgcc

SEQ ID NO: 11715 - DNA, 1443 bp, Artificial sequence
  DNA replication origin
ctcctccggcgcggccgaggcggctccggggggtccccggcgggcccgggagccggtgggccttccgagagcaccgagggggcggcgccggggtgtccccggcccggcggccgaatccctccctggcgcgggcggcggccgccgggcggtgcggcgcgggcggcggctttgtgtgcgcccgggcggtcctcggtgcgctgggagaagcgcggcgcgcccgggcgggagaggacgcgccgctcgcacaacaacctcgcctctactctcgccgccgggcggcgggcgggtctcgaaggccttcggctcgcggcgacccctcctcctcgcccgcggcagccccctcctcgccggctccgctcctgacagatggcgcaactgcaacgacgcgccgccgccaccagcgcggctgctcgctgctactcttgctgatgctctgcccctccagctccggaggggagcgaggagggggcggggcgcgcctcgagagtgacaggcccggctgccctatcaaagagccccttgggagctgcgagccgcaaccattggcgcctggggcgtgggcgggacggcagtaggtggggccgccgagtgggttgagcgttactgtggcagcgggcatcccagggtgcgtgcggtgcagggtgtgcaagaaaatgcgaggttggaggaggaggtctgtgtgtttttaaggattgtgtggagttgtgaggtggcggagtagggcgggagaaagagcggagagtgtgaactgcagtttccgctttgcggaaggttgcagctgctgctgcagattggcacctgccattcccccaaaaccatgggaaactgcctcgagacagggctatcttgcctttctggtgtcttttcatttgagggtgagaggatgaaatggaaaattgggcggtgatagcagcgttttctttgatcaaactgaaaagagtacggagcaaagtagaatcctgtcctgaaacgtggaaacgcacaacaaataacaatgaggaggagaaggagattaggatcattttatcagtcccctatttctgcggacactcatttatattttttttctagcaaaagtctggaggaagtattactgaaatagggggaggggccaagcggcgactaaggaacctgaaatgacagagatttgttcgtacattccccgccccacccccaaaaaacctcgtttaattgtagtcattggttgtctttggtttctcataacattcaaacttctcatgtttttttccccttcactgaatctgagcttttgctcatatttcccttgatgaaataattgccggtttagtatacagttgggagtgcatcggtctttatttcctatccagcttttctatggcaggatgtaacttcataaaaagaaacactttggcttcctgattttctttataggtaattcctgtttactgaaagttctgcttt

SEQ ID NO: 11716 - DNA, 919 bp, Artificial sequence
  DNA replication origin
gcgtctctgcccggccacccatcgtctgagatgtggggagcgcctctgccccgccgccccgtctgggatgtgaggagcgcctctacccggctgcgaccccgtctgggaggtgaggagcgtctctgcccagccgccccatctgagaagtgaggagaccctccgcctggcaaccgccccatatgagaagcgaggagcccctctgcccggcagccaccccgtctgggaagtgaggagcgtctctgcccggcagccaccccatccgggagggaggtgggggtcagcccccgccaggccagccgccccgtcagggagggaggtgggggggtcagccccccgcccggccagccgccccggccgggagggaggtgggggggtcagcccccacccggccagccgcccggtccgggaggtgaggggcgcctctgcccggcctcccctactgggaagtgaggagcccccctgcccagccaccaccccgtctgggaggtgtacccaacagcgcattgagaacgggccatgatgacaatggcggttttgtggaatagaaaggggggaaaggcggggaaaggattgagaaatcggatggttgccgtgtctgtgtagaaagaagtagacacgggagacttttcattttgttctgtactaagaaaaattcttctgccttgtgatcctgttgatcagtgaccctacccccaaccctgtgctctctgaaacttgtgctgtgtccactcagggttaaatggattaagggtggtgcaagatgtgctttgttaaacagatgcttgaaggcagcatgctcgttaagagtcatcaccactccctaatctcaagtacccagggacacaaacactgcggaaggccgcagggtcctctgcataggaaaaccagagacctttgttcacttgtttatctgctgacc

SEQ ID NO: 11717 - DNA, 1206 bp, Artificial sequence
  DNA replication origin
tcagagagcacagggttgggggtagggtcactgatcaacaggatcacaaggcagaagaatttttcttagtacagaacaaaatgaaaagtctcccgtgtctacttctttctacacagacacggcaaccatccgatttctcaatcctttccccgcctttcccccctttctattccacaaaaccgccattgtcatcatggcccgttctcaatgcgctgttgggtacacctcccagacggggtggtggctgggcaggggggctcctcacttcccagtaggggaggccgggcagaggcgcccctcacctcccggaccgggcggctggccgggtgggggctgacccccccacctccctcccggccggggcggctggccgggcggggggctgacccccccacctccctccctgacggggcggctggcctggcgggggctgacccccacctccctcccggatggggtggctgccgggcagagacgctcctcacttcccagacggggtggctgccgggcagaggggctcctcgcttctcatatggggcggttgccaggcggagggtctcctcacttctcagatggggcggctgggcagagacgctcctcacctcccagacggggtcgcagccgggtagaggcgctcctcacatcccagacggggcggcggggcagaggcgctccccacatctcagacgatgggtggccgggcagagacgctcctcactttccagactgggtagccaggcagaggggctcctcacgtcccagatgatgggcggccaggcagagatgctccaaacttcccagacggggtggcggccgggcagaggctgcaatctcggcactttgggaggccaaggcaggcggctgggaggtggaggttgtagcgagccgagatcacgccactgcactccagcctgggcaccactgagcactgagtgaaccagactccgtctgcaatcccggcacctcgggaggccgaggctggcggatcactcgcagttaggagctggagaccagcccggccaacacagcgaaaccccgtctccaccaaaaaaatacgaaaaccagtcaggcgtggtggcgcgcgcctgcaatcgcaggcactcggcaggctgaggcaggaggatcaggcagggaggctgcagtgagccgagatggcagcagtacagtccagcttcggctgggcatcagtgggagaccgtggaaaga

SEQ ID NO: 11718 - DNA, 1506 bp, Artificial sequence
  DNA replication origin
agagtacggggttgggggtaaggttatagactaacagcatcccaaggcagaagaatttttcttagtacagaacaaaatggagtctcctatgtctacttctttctacagagacagtaacaatctgatctctctttcttttccccacatttcccccttttctattcgacaaaaccgccatcgttatcatggcccgttctcaatagctgttgggtacacctcccagatggggtggcggctgggcagaggcgccccccacctcccggacagggaggctgcccggcggagacgctcctcacttcccagacggggcggccagttagagatgctcctcacctcccagatggggtggcggcggggcagagacactcctcagttcccagacgggatcgcggccaggcagaggtgctcttcacatctcagacggggcagcggggcagaggctctccctacatcccagacgatgggcggccaggcagagacgcccctcacttcctagacggggtggcggccggtcagaggctgcaatctcggcactttgggaggccaaggcaggcggctgggaggtggaggttgtagtgagccaagatcatgccactgcactccagcctgggcaacattgagcactgagtgagcgagactccgtctgcaatcccggcacttcgggaggccgaggctggcagatcacttgcagtcaggagctggagaccagcccggccaacacggcgaaaccccgtctccaccaaaaaatatgaaaagcagtcaggtgtggcggcgtgcgcctgcaatcccaggcactcggcaggctgaggcaggagaatcaggcagggaggttgcagtcagtcgagatggcggcagtacagtccagcctcggctcggcatcagagggacaccgtgcaaagaggcagaggcaggggcaggggcaggggcagggtcagaggcagaggccaaggtatttattttagtgttgtttacaataatagcctagatatttaccttcaaaaatttctttaaccaaaatggtagggtagaagcaagctggctttactccccctggcccacagaaaaacaaggacaaatacacagtgctttgattatcaccagcaatgtcccactactcatatgtgaggataagccagttcttgaggccatagagaggtgaaaaattctgagcagatggtgatacaattagacgtccatatctacaatgcccctcccctccttttgcttgtcaccaagcacagggaaaattttctccaaactcagaatttctactcttgaaaaagtgagattgaggtggacaaccagcttcccccaaccccatagtgattttcttggcaggagacctgtccctgcctcaacccatagaaagcattaggagtgcctgaaaagaaaaatatccccaaggacagccagaaacaaagaggagaggcaggactaccatcaccagccctgaaaactctgctgtgttactcagccgaaggagatgctaaatcagggtgtctcagc

SEQ ID NO: 11719 - DNA, 1052 bp, Artificial sequence
  DNA replication origin
atgcgcacctccccccgcagagcggctgcggtctccggcactgcgcggactccggctcctgcggccgcccgtgccgtgcccgcgccacgggagcgcgccctgccgcacctggttccagcctctcggggaagtgcaggaaacgcgccctaaactccactacttctcgcccgcctgcccccccgcccggctccccgcctcagacctcgccgccgccgccgccgccgccgccgcctgcgtgtggggcccgctcgcgtcttactcacacgcgccacgcacagccctgttggtttgctctcattcacgccgactcgctctccgccgagcctagcccgggcatccgaaactactggaccaactgccgtccggaccgcagcagcggccgggtgacccccacgcgacccgccgccgacccccgcgccctgaggctcccgcccgcgccgccaccgccggggaccacggtgagcaaggcgcgctgcccgcctcgcgcgggggaggggctttgagacctctagatttggggggaaatgagaaggggcaaatcgccaaagggaagcatccgggtgatgccagcaaaaaagcactttgtggggttcggttctcctgggcgctgcctggggaagacttttgagaggtttgcttaggaccagaggttaaactagtgcgagatgagaaacggcgggggcaattcctggggtaaaattagacagaaggtgtcagtcagcctgcctgtctgtttctctctcagtctctcccagagcgctgggtagcgctctctttgagggagaaagggaacacgcgtttactgcgctcgccagagtttaggggttcgcgttcggtcacttctggggtggctgtggagctgtttggagcgcgagggcagctttgggacagtgggggcctgcgaggccccagcagaggacaggcagagggcaggcaaagaacaggcaaaggctaagttaacatgtgggtggggttttctcttcccagctggccccccccacacccctcacagccccactttatgcatctcttcccacccaacacacacgcgc

SEQ ID NO: 11720 - DNA, 1030 bp, Artificial sequence
  DNA replication origin
tgcgcgtgtgtgtgtctaagcgaatctcttcccctccatcacttgggcgcgcaggagggaccgggtccctggcgaccagctgcagagtggctgccagtccacaccctcccggctctctccccacccaccccgcccctactcctcctcgccttcccctcctccccgtgctcctcctccagctgccgctcccgagctcccaaaggcagcggagaaaccgcagcgaaagggaggaggaggagggtggggaaggaagcgcaggtgtcttcggcggagagacgggcgcacgcaccggagcggcttgctgcagggggagggcagggccttaggcggagaaaggggaggaggaggatttacccggaggcggaggtcccgcagctgagccactgcgcgtcccacccaggcgctggaaccgcgggcgagcagcgcagtggggctgccgggtgggcgcgcagggctcccagttggactgaggtcgcagcttggggaacctgcggaggtgaccagggtggcagaactcggggacacagaggtcggagggacccaattgctgaggcgctgagaccggtctctctggggtgagggggatgcctagacccagagcttggggcacacaggtgtccaggaagctggtgtgtgtggctccagagtgccaggcgggagagccggaggcggtgaagggtcgggcggcggccgcggcgtgcttggggctgctgtgtgcatccggagtcacagggggcgatcaccgcctagctgggaagcggagctcaggactcagccttctttcaggtcccaagtccaaaagccgagaggcacactagccttcccaatttagtctgtgttcctccaaccctttgcccccagcaaaacaacaggccaggagctgattctacctgctacttactgtgctctttaccggactgaaaggactctactgctccaaggagactgatgtgttgcttcctctctcccaactctagtcccctccctcaacatacattcctacccaaccaaaattatccagaacattgta

SEQ ID NO: 11721 - DNA, 1246 bp, Artificial sequence
  DNA replication origin
ttaaccttgactatgcctttggctccagccacctttttaagagtaaattgctgggcaggtgggggagggctagtcacggaacgaaactgtaagctagaccaggtgtgaggaggggaggcgataaaaagattatagggtggagaagcggaggctgaggaagaattgggacctagctcggcctggcgaggagcagcctggggaggaagggagaggtcagatgggtctgtagaaaaggaagattagaaagactcagcgacacttggggttggtactgaggggacaggcgggagggaaagaaggaagatttgggacgagttgcactgggcacagagactaggaagggactgatgtgtaaaagaatgcctggacgtcaggcacctcagaccgtttgcctattttatgacaagaattatttagatttcgcaggatggaaaaattcaaagtgccattttctggctatttggaactactgtcgagtttgtattggggtcaagaggcattgcagaagaaaataaggcatttaggttttaggtcaggtgtgagttgaagaggttttaagtttttgagaacacaggccaagggagtagaaggaggaatggagggtggaagtttgcccatagtgaaggaagcaagcctagagaaaagagagagtagagaaacggagggaaggcgttcgggggttcttaccttccagaaaagtgggaaaaggggttggggcgcagagataagaggtcagggcatggaaataagggattggggtgcagagatataagaggttggggcatggaaataagggattgggacacagagatatgaggtaggggcacggaaataagggattggggcacagagataagaggtaggggcacagaaataagggattggggcacagagataagaggttggggtgcggaaataagggatgggggcacagaggtaagaggtcgaggtgtggaaataggggattggggtgcagagataagaggttggggcacagaaataagggattggggcacagagataagaggttggggcacagaaataagggattggggcacagagataagaggttggggcatggaaataagagattggggcacagagataagaggttggggcgtgaaaataagggattgggggttcttgccccgtagaaaagcgggacttgccgctaagggtgaaggagaaggggttgaggggtacttgcccctctcccagaaaagcagagaaggggtagagacaagga

SEQ ID NO: 11722 - DNA, 1506 bp, Artificial sequence
  DNA replication origin
gctcggtgctcggcgttcaagggggtggggaggatcgaaaagctgcccctcgaggctgctccgccgccggggaagcccgtggctcaggcttcacgcgtcaggcgctctctcggagtccagccgagccgggcccgggcgcgcaacccgcggcgctccgctctcagccggggacgtggctctccgtctcccgcccgcgccgggacagccccgaaggctacccgcccgaaactcccgaagaaagttgcgccgcgcgccccagctcgtcccttgcgcgcccctccacttaccgctcccagccgaggcttcgttctctccggcgtcgcctccgcagcctccagagccagctcccggtcctcctcactccagggcgcccgggctcccggccccctccgaaccgagccctccgcgcccccgccgcgccatgccccgggatgcgctgctgcagcctcgggcgacgctactgagagccgggccggcgggggcgggtaggtgtgggcgaaaggggcggagggagggacgcggcgggcgctgaggctccgctggaggggggaggaaaccgcaacgtcaccagagccagaggagacgaggatgaggagagggaaacggggaccccctcccccggccgaaccccgaccgcaggcccgccccgctttctcccgctcctcctctcccgggactcgccgctcgcagctgtgctcggccttccacgccacccggcccggactccacccgcacccccgcccgccaggcctctttggctctaacttgttctagtttcttaggactcaaacgcttcgggttcgagaatcacacccaaaggaaaggtaacttttggaggcccagggggaggagctgatgcttccatactactctgcgagaggaaagcgaggaagacgttaagactcttactaccgggactggtgcccactccagtctgcctcctcccgaatagttactgcctcttttctctcgaattcggttttactctcttctcaaagagaagttagtgggaggggggactttggggcgggggtcacctatagagaagcagttctcttttttactgtaccaacaaaatacactaaatccaagcgcaccgaaccctgcaaacggaacagattttaatcacagaaggtcaggagcaaagcatttaatgtaggcagctcacaaacagaaatttatcttacgcggtgggggggtgtgtgtgtgtgagagagagagatccctcatgcacccaagttcaggtggagcatttgcaaccttggtagtcacagcctcctggagaagagtcctcctgttttccaaaaatcagccactgctcaaacacgctcagccaggtccaaccaggccccaaggagatgtgaggtaggatcagggccatcacctcaggaatactttgccccttccacctccacccagtgtgtgcaagtaacctaccagacctagattgtacagaagtgaaagatttgtaggatacttacccattcattagaatgagagatattt

SEQ ID NO: 11723 - DNA, 1110 bp, Artificial sequence
  DNA replication origin
ccatgccgccgcaaacggggggcgcgcactccttcccaaagtccccagaggagacacgtacctggtggtagggggtgtaggcggctgcgaagtagggctgcggaggaccatagacttggtacataacatccagacagctcatgactctccgcagcggagacggttaagtgttttttcattaactctccttccccggagctcaggggtgctgcatgggcggcgcttggacccgcgctctggagtcatcaggcggagcaaagccagcgcgctccgcggctcggaatccagctggctcgctaccctcccactcctgcgattttactcccgaccgcgctccagggcagaagcgcctgagctcccgctagtgggcatttaaagcccatgcccggcgggcgtgctgacgccactcgggggctgcggagcgggagggggcggtggggggcggggaccggggggccaatggggagcgagggacgcttgttggaggggcagcgagtgtgtttcccggggcccacctctgacaagcatgcggccaagggtgccggagactatgcggttcccagcggatccgaggcttcgcaccgcgagtaggaatctcccaggacaaaataggagagagagagaaagagagagagagaaggaggcggggacgaagggatccgggctcatacacgcagagaaagaaagttggagaaaggtctcttaggaaagcccttgtctcatactgtagttgagtgggtgcttccagaagtgccgaggtggggcaaattctctgctttcggttcctgatgatgtatggggaggacggtgctgtcccttggaatcccctagggagtccgggtcgtggcagacaggatgtgggagtccgggtacccctccagggcgcagaagagctacctctgcggggaaatggcagtggctgaaacctgtaaccgctgtcctctaatccacttcctttcgctccctctaacctggtcctcccgccgcctgtcccacaccccaattctgctctcttgggccgtgcccttctgcccctctaaagttcgatcctgctcctttctctttgatgttctccaccggaacccgttagcttcgcatagatcgcgcccg

SEQ ID NO: 11724 - DNA, 939 bp, Artificial sequence
  DNA replication origin
gtcgaagtgcggcgcgtagacttcgtgcacggcggcggggcgcgggtagggggcggcctgggcgccgagggcgccgcccagggcgtaggggtgatgcgggtgcgcgtggtgcgggtgcgcgtggtgccagggctccgtggcgccctggtgcaggtggccatgcagcgcggcgggcgagtaggggtcggcggcggcgaagggcagctccgagtgcgcggtggccagagggctgcccagcggcgggggcactggcgcctggtacgcgctattccagaaggaggcggggaagctgcgctggctcatcgggaaggagcagtctgtaggccggccggggaggcggagtggaggaaaggaaaagaggtgcgtgtcactgcggctggactcagcgccgacctgcacgtcccgcccgagagacgaaggcgccgggcgggcacagggctggctagccatggccggggctgatgggcagcccccgcctctgcagcggcgtttttctaagggggctgcaacctgtgaaagcgaggtgggggaactgcaaaatgggggcttctgggaacccacgaaaaggaggcctgcttcctcccatttcgcagccgagtcctcagtgcggaaaccaagtggcgggtagagtagcaagagcggagagactccctccccgactcaagtccttgaagctcaaggagcttcccgcgactcagcgcagcacggcctccctttcctagccttaacctctccccaagctaacgatacctcttcccactcttggtcggccgcctagtgatctcactaccccctctcgcgtttcagccttcttgctccagaaaatgtgccccccaccacctaacgtctctgacagactgaaagtccatcgacatattttgaagtcttgctattgttagttttctttctagaaaccttctttcaaatatttttctccaa

SEQ ID NO: 11725 - DNA, 1235 bp, Artificial sequence
  DNA replication origin
accatgaccccgctgggcgccagcttggcaagctcggcctcccctcgacggatcccgagccgcagctgcccgggccgggccgcctcctctgcggacgagcgcggcgccgggacggggcgcagtcgctgccccgcaccgaatcccattggggcggctttcagcccagccctgcgggggcgtctcccgcccggccccgccccgccccgcacgtcggcccctagaggaggaagtcgcgttcccaggcagtgaccgacggcgaagccggaggcgagcgaggcgccgcccgcgctcccctccacgtatctggcgcgccctgctgcgctccttccttgccttcctccccacctgcaccagtacacgtgaacctgctaggcagcaggacacctcgccgccggacccgcccctcgccgcgtggtgcgggagtcattcctagatgggctgagcccgcggcggtgccttgggaggctgccccctccagggttttgccagcccgcggggatgggcatgccagggatagcaacaccgagggactcgaaatattttgatgataggatgatgacagtgccaagtaggaccttcactgatttattcactcattcattcattcattcaaaagttactcagttcagcagtgtgcttgtcaggagcagggctaaacccatgtggcacttgcagacaaaaataatcaggcaagtattcaatgcaaattgcaatcagtgacatgaaaggtgctgttgaagcacatttagagagctgtaattagatggcgggtaacaggggtgagggcgggaatcagctaggaaaggcctaagtggcatcaaagctgagattaaagcaggagccaaaacagacaagttgtgcaaagaagctgaaggaggaaagggccaggtagctggagcacagtgaacaggtgggtacacggccagatgtagaagctagtgtacagagtaggggccaggacgtgcagctaaataacctaaaggatgtttaacttggtcctcggagtagtgagcagccacggaaggttcagaagggggaaggactccacccgatgatcctcttgaggagttgcggagaagggtttggggaggacagattggagactggagaattacagggttatcaccgagtagttgaatagggtggtggcagtggaaaatgacgaggacagattagatatgtattttaaggactatctcacgtctctggtcccctgtagtccccgtttacttcct

SEQ ID NO: 11726 - DNA, 813 bp, Artificial sequence
  DNA replication origin
ggcgcctcgctcgcctccggcttcgccgtcggtcactgcctgggaacgcgacttcctcctctaggggccgacgtgcggggcggggcggggccgggcgggagacgcccccgcagggctgggctgaaagccgccccaatgggattcggtgcggggcagcgactgcgccccgtcccggcgccgcgctcgtccgcagaggaggcggcccggcccgggcagctgcggctcgggatccgtcgaggggaggccgagcttgccaagctggcgcccagcggggtcatggtgcccggcgcccgcggcggcggcgcactggcgcgggctgccgggcggggcctcctggctttgctgctcgcggtctccgccccgctccggctgcaggcggaggagctgggtgagtggagcgcgtccggctggcggcgggacccgaggcgccaggggcgggctgagggctgcggggcgggccgggccgggccgagggctacggggcgggccgggcctggggggacggagcgcgggaggaagtcgggctcgccgcctgccatccgcggagtccggctctacccgcggggctgggggtgaagtaggttactgcattccttgtcgctcccccaccaaactccttccttcccccaaaaccagagaattaacctggcgtctctgcactttctctccgccgccccccagcccatttcacttagtttccagacttcctgactctgctggccccgtgagaagtgacctgaccccgagggtcgccttaggggacagccgtgtgcagggccagttctttccagctgccttttgacaaagccgctc

SEQ ID NO: 11727 - DNA, 888 bp, Artificial sequence
  DNA replication origin
gacccgaggcgccaggggcgggctgagggctgcggggcgggccgggccgggccgagggctacggggcgggccgggcctggggggacggagcgcgggaggaagtcgggctcgccgcctgccatccgcggagtccggctctacccgcggggctgggggtgaagtaggttactgcattccttgtcgctcccccaccaaactccttccttcccccaaaaccagagaattaacctggcgtctctgcactttctctccgccgccccccagcccatttcacttagtttccagacttcctgactctgctggccccgtgagaagtgacctgaccccgagggtcgccttaggggacagccgtgtgcagggccagttctttccagctgccttttgacaaagccgctcctcggccggcgctgggccctgccctccctgccgtcgctcctcccgcgcggaattggaatcccggcgtgtgcgttcggggctcgtgcggaatggccggggcacgtttgccgaggttggccttggacgctggcgagcaggcggtgctgccacctcctctcgagtgtcctgctggcgccgcaagttggaatcgtgtggcttcctgtgtatttgagccggtagactctcaaccaggctgctttttctctggagctggtctttgacttggagttagacctaattaacccacaaccgagtttaccctctgcctgtccagcatattaaagcagcaaccccctttaccagccctgggtgtccctatttcattcgtcctcattaattagtgcttttttttttttaatagcaagggccagctttctgccgagttgtttcagtgtttcctctcctcccttgctcctggccgtatatgcctgagcttatttaatggcgctgagt

SEQ ID NO: 11728 - DNA, 1280 bp, Artificial sequence
  DNA replication origin
gagcctcagaaagaggtcagaagtccccatgagggggagttgagcctcagaaagaggtgagaaatcgccatggtgggggttgaacctcagaaagaggtgagaaatccccatggggggggttgaacctcagaaagaggtgagaaatccccatgacgggcatttgaaactcagaaagacgtgagaaatccccacgagggggtttgagcctcagaaagaggtgagaaatccccacggggggggggggggggttgagcctcagaaagaggtgagaaatccccatgggggggtgttgagcctcagaaagaggtgagaaatccccatggggggtgggggttgagcctcagaaagaggtgagaaatccccatgaggggctttgaacctcagaaagaggtgagaaatccccatgggaagggggggttgaagctcagaaagaggtgagaaatccccatgaggggctttgaacctcagaaagaggtgagaaatccccacgagagggtttgaaccttagaaagaggtgagaaatccccatggggggggttgaacataagaaagaggtgagaaatccccatgagtggggttgaacctcacacaaacctcccgtagtaagaaaaatattcagaacccccttttctttccctttaggggaagaaacagtagctccactcccgctggtccctcccctaggggaaggggaaagagaggggaaaacagcagcacaggtcactggcaaagacaaaggaaagaccagcagagaggaaaaagaaactaggagaggaattcagagagaaagaaagcaaaaacagcaagcacagcaccaaacagcaaggcaggcatgccaagagttaggtcccactccccagcctggctctatgtgaaaaagagggcagggaccagtgccagggggagagcagaggaggtgaaaggggcataattcttgcaatttgtggcaggcatctgccaagcctctgggctggtgactgcccggggcccggactgcagctgcgcaaatcccacccaccccgagaaactaagtaagaagaaaggaaaaaagcaaaaaggggaattgggagaaaaaaaaataggagaaatagatggcagcatgtgcacaggggtggggcccatgctgtggcctggccccgctggtggcaggagtgggagaactcgggaggggaaagggaaacgggatgacacagagagagaggaaaatagagtgcaaatgatagagaaatcaagggaaagagtaagaaagagagaaactggaggagacagaaatcaaagga

SEQ ID NO: 11729 - DNA, 1455 bp, Artificial sequence
  DNA replication origin
cacaccacgaggctcgcgatgtccgagaagctgggttcctgctccacctcggtgatcaccaggcccatatgcacaggcagcttctccaaggaacgaccgtccgcgcgccagcgcatccggtggtgtgcggctgccaggcacgaccccccgcgcgggtgccggtggtgacggcggttcctgccgactgccgggggcttgcggagcgtgaagccgagcggcgctaggaccgcggcagaggcggcgcggcagcagcgccgccagatccagttccaggtgccgaaccgaacgcggagccaggaggtgagcgtgcggtgcagacagagcagcgcgtgcagcacccgccacaccagctcgtacagccccgtcatactcttgtggccctcagacaccccctctccctcccgcccactcccgcagcgcgacggctttttatccgcccctgcggccggcgcgggccatcgctccgcgtccccccgccccccgagcccgaacccctttccactgccaacacctcacctcgcccccgccgccatcttcctcctcccttggcagccccgcccccagtagtacatggacagttccgattggccagcgtggaattctgacgcggcttctgggtccgagaacgtggcccgttccggcgcagtgagggaaggcgcacgcctgcgaactagccgggccgataccgcgggcgccccctggtcgcgtggagggcgatgagcgaacgacccgggacttgtctgaatgggaccccagcaaggcacacgtggtcttcaatgcgatgggcgcttccaggggacccggcgtcccttgggtccaggaagtcttatactgtctcctctcacggccccgacagaaacggtttctgaggagtagaagtgtcctaagtggattggaaattacaaatgccggaaagaacctagggatggaaagcagccctcagtaagtgttgatgctgggaatccaccagggtttccaaaagtgtcctcaaaggctggagtgatcctgctactgtcctttattcagcctcccggctgaggctgggagcgaggctctttagccatgttcctgaaacacccctctacccatgtcattctcatctaaggtatcctttcctggctgtacattgcttaatagaggctctacagcttggcagtccagtcacttaattctttttttttttttttttttttattcggcaagactttgaccaaccgccgtgggttaggtttacagtggggaaaaaaaatagaaattgtgcctgacttcaatgaccgccactatttgaagcaaactgcccatccaagccttatcatcccctttaacaccctaatgtttctgtccatgtggacttcgacgtggtcctctagaatggttttgtacttccccgcggtaagtctgtactgtctttgccctttttgttcaagctcttctcctgaattcctgattcccgac

SEQ ID NO: 11730 - DNA, 1005 bp, Artificial sequence
  DNA replication origin
acttgagattagggagtggtgatgactcttaacgagcatgctgccttcaagcatctgtttaacaaagcacatcttgcactgcccttaatccatttaaccctgagtggacacagcacatgtttcagagagcacggggttgggggtaaggttatagattaacagcatcccaaggcagaagaatttttcttagtacagaacaaaatggagtctcctatgtctacttctttctacacagacacagcaacaatctgatttttctatcttttccccacatttccctcttttctattcgacaaaaccgccatcatcatcatggcctattctcaatgagctgttgggtacacctcccagacagggtggcggctgggcagaagggctcttcacttcccagacggggcggctgctgggcggaggggctcctcacttctcagatggggcggctgctgggcagaggcgctcctcacatcccagatggggcggcggggcagaggcgctccccacatctcagacgatgggcggccgggcagagaccctcctcacttcctagacaggatggcggccggaaagaggcgttcctcacttcccagactgggcagccaggcagaggggctcctcacatcccagacgatgggcgtccaggcagagacgctcctcacttcccagacggggtggcggccgggccgaggctttaatctcggcactttgggaggccaaggcaggcggctgggaggtggaggttgtagcgagccgagatcacgccactgcactccagcctgggcaacattgagcaatgagtgaacgagactccgtctgcaatcccggcacctcgggaggccgaggctggcagatcactcatggttaggagctggagaccagcccggccaacacagcgaaaccccgtctccaccaaaaaaatacaaaaaccagtcaggcgtggcagtgtgcgcctgcaatcccaggcactcagcaggctgaggcaggagaatcaggcagggaggttgcagt

SEQ ID NO: 11731 - DNA, 1231 bp, Artificial sequence
  DNA replication origin
tgccggttccgggcccgggaacgcgcagaggacccggccgggcggccgcggcccgggaggcggtgctgcctgcgaagcggtgaggcggggaggcacccgcggctacggccgccgccgcccagcccgccactcactcctctccagtcccagtgcgcgcaccctcgcgcccgtgccgccgccgccgccgcccgccccggctcttcccgagccgcgtccccaagtcctggcccgccccgcgaagtggctgcgaagggtgtcgcgcgggggcgcggagctgccggtcggttccggggaaggagtcctgatttctccttgtttcctcgtgcccgggtctcctcggggcgcgcggcggcagttgtgctggcgccgcctcagcctgtgccccgctcggtcggaaagctaccgtctgtgtctcacggagtgagagaccgagggtgaacccggagagccgggcgggggcgccggcggcggcggcggcggcggcggcggcggcggcagagcggggcgcgggcgggggacctgcgcgctctcctctcgccagagggcgctgccgaggtgccttgttgcccccgaccctctactgccccgtccgcagaggcccacggtctaggttgtggtgattgttttggtttgggtgttttttagggggataagggggctgggaatagatcctccctgtggagttggcggggattcctcgtttctgcccaagcgccgcggaatccagcaccaccggcctgggacagcggcaggacgccgagacaggtgccggccccggattagaaacccaaacggagaatcctagatgttgctcctactacattcgccataattggcctggtggaaatgggagaaaaaactacttctcacaaagaatcaattctgggaactggaaaaagcatatcagaccaactcaaaacgtctccatttgaggcaatgtagtgctgtgaaaggaacgtaggcagatttgagtttcagtggcacatctgaaacttatccgcagagactctaagcaattaaattctgagacattcttctctgtgcagcgagactactcatgtctttctcccaggggagttgtaagacttaaatgaggtaaaccacgcagcaggggagcctaacagctcctttaatagtcccccaactccaaaagggaaagtcctgtgtatctgccacagaaatcttggaccatatttctaccaatggaaactgactctctgtcccgggcatt

SEQ ID NO: 11732 - DNA, 1214 bp, Artificial sequence
  DNA replication origin
gacgacgcgctccgcgggcgcagagaggccgcggcagctttgtcccggcgcagggagccctggagtggtggagctgcagctggtccgaggcgggagttcggggagaggcggggtttttcgtacctagccaccctgtatgtgtgtccgcactcacaccctccatacgcgtgccgcctcacttccctttccctctcgcaccccggctttgcgatcgggggtcggggggacgcggggacccggccagggctgaggagggaggcgcggggctgcagagatggcgtggaagtcctgggcctcgtgctgtcctccgccccgccccgcccgggggcttcgaccccttgccgggggaatggggtcgcagcgacagcctagcaggcggagggaacccacttctccagcctgacgctccagtcgcctctcggactcttcctggctgggagcagcgaagagagggctagaggcctggaacagacccagcaaagtgcaaaacattgcgggcagggtgtgagccggcggcgcccagttattccgaagcgcccatgccggagggggcgggtgccgatcgccggcgcctccagtgctggaatctgcgtagtggattcaggacgttgacgttttaggatgaggacctgggttgacgtgaaaatgggggtacctctggcacctctgactcaactgtgatgtgaaagggactttttctacttaagtaacttgaaatggttgacgagctgacaccttaaaaaattgtatagggaatgggttttgtgttcttttttgtttggatgcgtgggtgcctttcgatgcatctgtaggggtaactgttccagtcgctctgttcatacaggtttctgtgtggcattgtgttgggtagcagagattcccaacgaattcacacggaactgtctggggctcaaagctctggtgggagtacaaactatgtacagaaatagaatcttgagaaatatccttattttgggagtatagtttaatttagttatatcaaatcccgaaccattcaagaatccctggtggggaattaatgcgtgcgttagtttatttgcgggtacttctgtagctttccatttattatcaaacagaaagaaattcactctgacgggagacaggagttggtaatagaactaagtctttgatttgtagctgagaataccaccttccaaaagataaagtagaataaagcaagaagacgctggctc

SEQ ID NO: 11733 - DNA, 1237 bp, Artificial sequence
  DNA replication origin
cccacatcgcgggcgagagggccgggtgggccagggacgcccgactcctcacgtccgtcctcctgcttcttcggcggcggaaacttgcgcggagcgtgggcctcggcgacacgggcaggaggaaaggcgggatggctggttaacggctgctcagctacgggcggggagcgcaggggccagattcgccgcactgccggcgcctgccatggccaagccggctgggctgaggcccgcgccggggaagcggcgactcggcggtgacggctgctagatccccggctgagcccaggctcaaaggctccaggcgaagttgcagctgcgggttctctccgccccctccgccggcagagccagagccggggctggggccgcgagggggcggggcctcgggcaatgacttcaggcgtgcgcggcgccgcgcggggcggggactgcggggggcggggactgcggggggcgggtgagctaccccgaccccgcttcgcctccttggcggcgactgggctgtcccgccctcccgccgcatccctctgtctccatcctcccgccctgcgagttgagtagagggcagcgacttggcctattttgcgatactcgcccctcccttgggtaatccctcacgccctccctccgggcacctctgtgaagacacgtggaagacctgcccctggcgtcacaaccgctcgagatgaaaaagccaagccagggcgcggctgagggggcttccagcctcccttggaattaggattgggatttaaatcctcatctgtattccttcgtttatagattactttaggggcagaaaaggggtggttttcctttactaatttaatgggggcgtgggggcaacacaggcaccagaatatagcaccgggatgtgcaccggaaaaggcccgggggtaattagtacccgagggggagaggggccgtcattgtaatcgcacaacgtttcagattagcaagcagaaagtaaaaatggcaccaaagtctgtaaagggagccctttcctccttgccccctactccttcacgttcttcctcttcttggccagtttccacccttcacctgaacccttagtgcaggaggagacgtcctaaggaagggcgaaaagggacagcatcgttttatttttaaatcttacttctcactggcaatatggtgatgcttccaacgtttagttacgaactagttcgtataaaaaattctgggccagcactgtggtgggaggcgggctctg

SEQ ID NO: 11734 - DNA, 1080 bp, Artificial sequence
  DNA replication origin
actcggccgcaggcgccgtcccacccgcgacccccgggtcacccctggaagggacggggcggtcccgccggcccgaagccgcggggacaacggcgcggggcagatgcccggggttgggcggcggcggccgggggccgggccagctcttggaggctcctcggcccgcgcctggcggaggcgtcgaggacagcgcagctccgcgggtcccgctcgcagcccgcaccgaggactcggcgaggctgcggagggaggaggagacggggcgggctgcggcggggataggcggggacatggaggaggacgcgggagccgccgttaccagggcgcgcgcggggacggcgacgtcatttccccgcagccaagccccgcccagccccgcgcagccgccgccgccgccgccagtcccgcagccccgcggccagtgcgggcgcctcgcgaggtcgatccgggatcgtgccgccagtgcttcccccgtgtggcggggatccagcagcccagccctggcggcgatccccgtgcagcgagcgtgaggcctgacgtaaaaaaaaaaagtatccccaagaagacggtgctgtaatcaccttcggttagcagaacgggtgtcgatttacagaccctttccacatgcgtcctcgtgtgtgcagggccccaagaagtggctcttccccaagaagagaggcaagcccaatccagagacatgagtagtgaagtagcgaggattccctgccctgaccttccttccaatggcacacaagtgaccgtgacactgtcttagccgccccctcccaccccgagtgcccggccactgcccccagttcagtgctgagtgtatgtgtggagggaacgctccttttcagtcagctggtggagcaccgcatagctactttcccgcggtggagcccaagacaaatagatatgaaactacttggctggaaataagtaagaataggatcggagtgaaagtaatggtaaaaaaaacagaagatggaacaagacatcagtgctttaaggatttggagctgggccaaaatgtgtcataacttgtgcattttcgccttcataaatgtgttattccctact

SEQ ID NO: 11735 - DNA, 1174 bp, Artificial sequence
  DNA replication origin
ggatccgcagcccagccgagggggtcgggcggcctggctacgcaggacccagccccgcagccgcggactcccagcggcggcgaagtttggctgctgagcggcgcggcgccggaccactggacagcgggagcgatgcccgtggggggcctgttgccgctcttcagcagccccgcgggcggcgtcctgggcggggggctcggcggcggcggtggcaggaaggggtcgggccccgccgccctccgcctgacggagaagttcgtgctgctgctggtattcagcgccttcatcacgctctgcttcggggcgatcttcttcctgccagactcctccaagctgctcagcggggtcctgttccactccagccccgccttgcagccggccgccgaccacaagcccgggcccggggcgcgcgccgaggacgcggccgaggggcgagcccggcgccgcgaggagggggcacccggggacccggaggccgccctggaggacaacttggccaggatccgcgaaaaccacgagcgggctctcagggaagccaaggagaccctgcagaagctgcccgaggagatccaaagagacatcctactggagaagaagaaggtggcccaggaccagctgcgtgacaaggcgccgttcagaggcctgcccccggtggacttcgtgcccccaatcggggtggagagccgggagcccgccgacgccgccatccgcgagaaaagggcaaagatcaaagaggtgagtgggccgcgccagaaatccctcccgaccggccgtgtttttcagggagaaacggcaagcctttgaaactctgaagactgcaacaatgcaatgtatggggagatggaggtttgccccttccaccaggtgctgtgtcaaaagctctttcttttcctgtttccaatatagtagtagatgtgtccagtaagatctaaggtcaaatctcgttgcttttaatttgcatgctcttgctctggtgaccacaagccacacgaggtgggtataaatacatgggcaggtaatacgcaaacctcattctctggccgctacacggttaatcgccccaccagtaacagcgacggcactgatcagccccctggtaaggattggggacgtggctttaaagtgagtcttcacgcgtggtaaagctagccagcataccccgggttcagctgtg

SEQ ID NO: 11736 - DNA, 1346 bp, Artificial sequence
  DNA replication origin
gaagttatcaggtcccgtgggtaggggaggggtgtcccgcgcaggaaggggtcagggcagcgcgcgagcacctcggggaggggcagcgcacctctgggcaggaggggcgcagcgtgggcgggagactcgtcaacttcgcccgctccccatctccgcgctgagactgctgcctctttcctaggctgggctgagcgcgctgtcccacggtcccgcagccccggcgcggctcaggtgggcgagcgcgccgacctgcgggcgaatggcagcgagtagagcagcacggtacactccgccgcggccccgcgagcactaatctcactgccggtcttggggcggtggaaagcgagggaggcgacgcggccggagagtgacggcgcggccgggccaatcacgcgccgcccagggtcccgcgggggcggggccgaggcgaggagggggatgcgcggggcggggagtttacgggaagcgcagcctcggcggggcccggccggcggcggggaggtcgcggggccgggaggcgcgaggtaggcgggagccgcggtgaggaggacggtcgaacccgtggctgaggcccagcgccgagaagcggcaggcagagttcggggtcggggagtttatcctgcgctggcctcggcaggggtccccggggtggttgatcctcgactggcccgggaggcgcctgggtccgcgcgggacctctctgcctcctcctccgacccgtgcggggcggtcgggggcgctcccgagggggtcccgggaaaggcggggtctggcagggggtcctgggcgctgggtcgttcagaagcacggctttactccagttaccctctttttatccaaggccggggttccccgggtgcctggtagcagtgaaaccccaagtccctcggttaggggagccgtgaccctgggagcttttgagctctctggtataacatccttttacatcctaagagacacagttctgtgcttgcttaggacttttttcgtatgcgccctttcttcccccaaaaaacaaaaaaccgaaaaaacttgtatgtctctcccgcccacccgtactttcactattcatttacctcatagaagttggtcaaattttccattcgaagacgagttttatgctgcggtagcttcaagcaataagtcgaacactgtgttgaaattaagtcttggatccgactacttccagcgaagtgaggagttggtccaatagaaattattttccaaaatgtgttgtaattctcctgttgctccacaaataaggggttatcagagaggaaaacgttgactgacttcgcatttctgaaagctggtttgtagtcgccttatttcatccttacccttct

SEQ ID NO: 11737 - DNA, 1249 bp, Artificial sequence
  DNA replication origin
gcgcccactctggccgcgcttgaggagcccttcagcccactgctgcactgtgggagcccctttctgggctggccaaggccggagccggctccctcagcttgcggggaggcgtggagggagaggcacgggtgggaaccagggctgcgcgcagtgcttgcgggccagcgcgagttccgggtgggtgtggactcggcgggacccgcactcggagcggccggctggccctgtccaccctgggcaatgaggagcttagtacctgggcaagcagctgcggagggtgtgctgggtctcccagcagtgctggcccaccggcgctgcgctcgatttctcgcgggccttagctgccttcccgcggggcagggctcggacctgcagcccgccatgcctgagcctccccggccccaccgcttggtgggctcctgtgcagccggagcctgccggacgagcgccgccccctgcttcacggcgcccagtcccatcgatcacccaagggctgaggagtgtaggcgcacggcgtgggatggtcaggcagtcccacctgcagccccagtgcgagatccactgggtgaagccagctgggctcctgactggtggggacttggagaatctttatgtctagctaagggattgtaaatacaccaatcggcaccctgtgtctagctcaaggtttgtaaacacaccaatcagcaccctgtgtctagctcagggtttgtgaatgcaccagtccacactctgtatttagctactctggtggggacttggagaacctttgtgttgacactctgtatctagctaatctagtggggaggtggagaatctttgtgtctagctcagggattgtaaactcaccaatcagcaccctgtgtctagctcagggtttgtgaatgcaccaatcgacactctgtatctagctactctggtgggaacttggagaacctttgtgtccacactctgtatctagctaatctagtggggacctggagaacctttgtgtctagctcagggattgtaaacgcaccaatcagcaccctgtcaaaacagaccacttggctctctgtaaaatgaaccaatcaacaggatgtgggtggggccagataagagaataaaagcaggctgccccagccagcagtggcaacccactcgggtccccttccacactctggaagctttgttcttttgttctttgcaataaatcttgctactgctcactctttgggtccacactgcctttatgagctgtaacaccgcg

SEQ ID NO: 11738 - DNA, 949 bp, Artificial sequence
  DNA replication origin
agaaaaggaatattagaaagactcagtgacgcttgggcttgggactgaggggacaggcgggagggaaagaaggaagatttgggacgagttgcactgggcacagagacaaggaagggaccgatgtgtaaaagaatgcctggacatcaggcacctcagaccggttgcctattttacgacaagaattatttagattttgcaggatggaaaaattcaaagttccattttctggctatgtggaactactgttgagtttgtactgtggtcgagcagcattgcagaagaaaataaggcatttaggttttaggtcaggtgtgagttgaagaggttttaagttttttgagaacacaggccaagggagtagaaggaggaatggagggtggaaagttgcccatagtgaaggaagcaagcctagagaaaagagagagtagagaaacggagggaaggggttcaggggttcttaccttccagaaaagtgggaaaaggggttggggcacagagataagaggttggggtgcggaaataagggattggggcacagagataagaggttggggtgtggaaataagggatggggcgcagagataagaggttggggcatggacaaaagggattggggcacagagataagaggttggggtgcggaaataagggattggggcacagagataagaggttggggtgcagaaataagggattggggcacagagataagaggttggggcatggacataagggattgggggttcttgccccgtagaaaagtgggacttgctgctaagggtgaaggagaaggggttgaggggtactttcccctctcccagaaaagcagagaaggggtagagacaaggagagaaggggttgaggtacttgccccttccccagaaaagcgggacttgctactaagggtgaaggaccaaggcaagcatccctgcgcagtctgacacccttg

SEQ ID NO: 11739 - DNA, 1036 bp, Artificial sequence
  DNA replication origin
catacacacattgtatttgcttagagtttgtaaaagtataatttatggtgatgtatagatggaattatttagactgttaatagaaaagaaatgtttttcttccctgtatatattaaattagtactaggagaaagtggcgggataaagagaaggggcttatgactgtagttgtgagataaaccaagaacatgtttgggattctttcaagtggaaatgatagaaagctaacactaaacttcatagaatcattcgttaccccagacaaacgcctgcctccacacattaatgatgtgataatattttaacagcaacataaaaagtttatagtaattaagaccagagagttatcatgtttctggtgagatttggtttgggttttaagtaaactcctagaggattcaccatatccaaaatatgtcccaaaacagatgaaaaggctagtccctcatcttacagtttattttattcctccagatagttcaaataagcatttaacataaaggagacactgattttcatttccagagataaaattagaggcgggaagatgatagtgaggagggaagggagagtaggtagatgtggggtggaggtagagagagtgggtgtgtaggggggtagagagagtggatgtgtgtggggggaaggggtatgtgtgcagaggagaggtgggaaggaagacagagggaagaacggtggggggcagggagaggaggaggagggagcatgggagagtaggaagaaaggataaggtggagggggaatgaggaaaggatgaggtggagggggaaggagggaggttggaactggtggggaggaaaggagggaggtcaggtgagagaaagagcgggaggcttgccgggaagttgggaaggagaggtaaggagggtggtgggggacggagagggtcgtgtgtgtgtgtgtgtgtgtgtgtgtgtgtgtgtgtgtgtgtgtgtgtgtgtgtgtgtctgtattgggctaggagaaagaaagaaattatatagtgtgtggtgttttaaaatctacctctttgcag

SEQ ID NO: 11740 - DNA, 932 bp, Artificial sequence
  DNA replication origin
agcccctctgcccggccagccgccccgtccgggagggaggtggggggggtcagccccccgcccggccggccgccctgtccgggagggaggtgggggggtcagccctccgcccggccagccgccccgtccgggaggtgaggggcgcctctgcccggccgcccctactgggaagtgaggagcccctctgcccggccagccgccccgtcccggagggaggtggggggggtcagcccccctgcccggccagccgccccgtccgggaggtgaggggcgcctctgcccagccgcccctactgggaagtgaggagcccctctgcccggccagccgccccgtccgggagggaggtggggggggtcagcccccccgcccggccagccgccccgtccgggaggtgaggggcgcctctgcccggccgcccctactgggaagtgaggagcccctctgcccggccaccaccccgtctgggaggtgtgcccaacagctcattgagaacgggccaggatgacaatggcggctttgtggaatagaaaggcaggaaaggtggggaaaagattgagaaatcggatggttgccgtgtctgtgtagaaagaagtagacatgggagacttttcattttgttctgcactaagaaaaattcctctgccttgggatcctgttgatctgtgaccttacccccaaccctgtgctctctgaaacatgtgctgtgtccactcagggttaaatggattaagggcggtgcaagatgtgctttgttaaacagatgcttgaaggcagcatgctcgttaagaatcatcaccaatccctaatctcaagtaatcagggacacaaacactgcggaaggccgcagggtcctctgcctaggaaaaccagagacctttgttcacttgtttatctgctgaccttccctccactattgtcccatgaccctgcc

SEQ ID NO: 11741 - DNA, 1959 bp, Artificial sequence
  DNA replication origin
ccctcccggacggggcggctggccgggcagaggggctcctcacttcccagtaggggcggccgggcagaggcgcccctcacctcccggacggggcggctggccgggcggagggctgacccccccacctcccttcctgacggggcggctggccaggcggggggcttacccccccacctccctcccggacggggcggctggccgggtgggggggctgacccccccatctccctcccggacggggtggctggccgggctgaggggctcctcacttcccagtaggggcggccgggcagaggcacccctcacctcccggacggggcggctggccgggcggggggctgacccccccacctccctcccggatggcacggctggccggtcgggggggctgaccccccacctccctcccagatggggcggctggccgggcggggggttgaccccctcccacctccctcccggacggggtggctgctgggcggagatgctcctcacttcccagatggggtggctgccgggcggagaggctcctcacttctcagacggggcagctgccgggcggaggggctcctcacttctcagacggggtggttgccaggcagagggtctcctcacttctcagacggggcggccgggcagagacgctcctcacctcccagacggggtctcagccgggcagaggcactcctcacatcccagatggggcggcggggcagaggcgctccccacatctcagacgatgggcggccgggcagagacgctcctcacttcctagatgtgatggcggctgggaagaggcgctcctcacttcctagatgggatggcggccgggcggagacgctcctcactttccagactgggcagccaggcagaggggctcctcacatcccagacgatgggcggccaggcagagaggctcctcacttcccagacggggtggcggccgggcagaggctgcaatctcggcactttgggaggccaaggcaggcggctgggaggtgtaggttgtagtgagccgagatcacgccactgcactccagcctgggcaccattgagcactgagtgaacgagactccgtctgcaatcccggcacctcgggaggctgaggttggcgggatcactcgcggttaggggctggagaccggcccggccaacacagcgaaaccccgtctccaccaaaaccagtcaggcgtggcggcgccattgcaggcactgggcaggctgaggcaggagaatcaggcagggaggttgcagtgagccgagatggcagcagtacagtccagcttcggctccgcatgagagggagaccgtggggagagggagacagagggagagggagagccggaaaagtttcttgtatagccccggctcttagagccaggctggcaacctttgatatgtaaatgcaagccattagaaactaggtccacccaaacatggtgattcccctgccttcttgccctttccccacctattttgtattcttttaaatagtgctgaacattgttctggcatgcagttagttaagttgcttggattcagtttgatccttctgaggcctgccttaagcttttttagggtgaatccagggtaccttttggttcaaatttaacttatgcccaatactaagcggacactcttctgaggattttacccaatgctctatgtatttcaaggtctttctcctttggttggtggaaacattgagtattttccaccctgtgtgagtgtttagaatttttctgtctgctgttttttaaaggggttttctccagtctcagatagttttctgtcgcgtatgctcacatcagtactcagacaatgactgaggtgctcctctgcagttcttgaatcctctctgtgtagctccctcctctctgcctcacagattctagctgttttggcctttctcaactcagatctcttcttctctactctgtgagataccttggctctggg

SEQ ID NO: 11742 - DNA, 1054 bp, Artificial sequence
  DNA replication origin
gctgctgggacgcggcgcggacccgcatcattgcgcgcagcagccgctgcagcagccgccggggaccgcggagccgggacgcccccgctcggcccgcgccccgctccccgccccacccccgcccgccgggcccagcaacgcagggtgcctaggagccgcgggctgcgcagggaggcgggcagcggccctcgcgcgcttctgccgcccccggagccggcgcgcggcgagcgcagggcgagcgcgcgtcgggcggcggccgcgctggggggcgtgaggcgagcggcgcggagagcggcaggggcgaaacttcgcgggccagatgcccgagggcgcggcggcgctgccaggctgccgctgctgcccctgcgggccccgagcgcgcctccgcaggcggcactgcccgcggcgcggcgtgtgcaccgagcgagtgaaggtatgtgtggcgggcgcggctggagctgccgccgccgccgccgccgcgccagcaggtcctaatgcctgtcacttcccaggacgctggcagcagcagcagcccggagcccccgagccctcggcaggtttgcgtgtccttccccgcgatctgattggataaagtgggggctcgacggtggccgacgtgggacagtctggctgtggcaggggtctcggaaaccatgggttattgcagtggcaggtgcacgcttatctttatctgtggcatgcaactggtaagtgacacttgggtccccttattctgtaatgtgtctttgagatagtgggcaggggagtgcagcaaagggtctgccattgactagaatggacgaaaaagataaaagagaaggtgacagatatattgcctatattgaagatgatttcagggagacgcactctggggtacaggagaggtgagcctttccgttcccacctatttctgtcccttttaagacagtttggcaggtgcgggttaaacttgtctttaatttctttaggaaaagcaagatgtagctcttgttctttatgctttgcattcctattcatgtaacaacgtgattgtcacctacaatttaccgtacag

SEQ ID NO: 11743 - DNA, 789 bp, Artificial sequence
  DNA replication origin
cccgcgggcagcgggggcagtggctcggctcgactcgcggctccgcttctgcttccgggtccttcctcctgggctgggacgccccaagtcccctccggggagcccgtgctccgaggctgcggcgcgtggggagcctggcccggcccgccgctcctcctcgtactctggcgcggcggggcaccgcctcgggggcgccgagggccgctcgctctgggctcgggcgcgcccgccccacatgcagctcggggcggcgccgcagccccagcgagccccaggcgggacagaggggtctgggaggagacggccgtcagtcccgcgccatcaccggtcccggctgccggacgcgcggcccgagggcggtggtcaaagggtcgaggggcctgtggcgccgccgcggcgcgcaccaggaggtgcagccggagcgctggccagccgcagggcccctgggggagaggccggagcgggcgacctccctctccccgcgcttcacctacagccctcctcgccgcccctcaccccacccctttggcgcacacctccccacacgtacacacgcgcgcaggcacccgcgcacacacacacgcacaccctgagtgggtgtgatctaagagctgagatgcgctttctcgcccggagttcacactcagcctcaacaaaaccctcagagcaggcaggctcccctttggtctccgcattcagtagaacttcctacaaaactacactcagctctggaattagtaaacgctggctatttaggatgtcgagttcagagaaataatgctaaggatt

SEQ ID NO: 11744 - DNA, 1634 bp, Artificial sequence
  DNA replication origin
gcgcccccgaggcggtgccccgccgcgccagagtacgaggaggagcggcgggccgggccaggctccccacgcgccgcagcctcggagcacgggctccccggaggggacttggggcgtcccagcccaggaggaaggacccggaagcagaagcggagccgcgagtcgagccgagccactgcccccgctgcccgcgggcgccgggtgggggtcccggcggctggatgggcagcggcggcgcgggccgcgggcggcgatgggcgaggagcagagcacggtgagcggcggcggcgggccccaggagtcgcagaccctggccagtggcactgcgggccaccctgagcccccgaggcctcagggggacagcgcccgggcgcccccgctgcgcgccgcctccgcggagccgagcggcggtggctgcggaagcgactggggctgcgcggacaccagcgccccagagcccgcgaggagcctggggcccccgggctggagtaagagccgagcaccggcgcagcctgcgggactggcactcaccgggcctctcaatccccagaccttgccactgcagttggagctggaggaggaagaggaggaagctggggatcgaaaagagggaggggatgaacagcaggaggcgccccccggcgaagagctggagcccaggacccgcgtgggggccgccgacggactggtcctggacgtgctgggtcagcggcgcccgtccctcgccaagagacaagtcttctgctccgtgtactgcgtggagagcgacctgcccgaggcccccgcctcggagcagctctcgccgcccgcgtcgccacctggggctccgccagtgttgaaccctcccagcacccgctcttccttccccagcccccgactgtccctcccaacggattccctctcccccgacggcggcagcatcgagctggagttctacctggcgcccgagccgttctccatgcccagcctgttgggagctccaccctactctggcctgggcggtgtaggggatccctatgtgcccctcatggtgctgatgtgccgggtgtgcctggaagacaagcccatcaagcccctgccttgctgcaagaaggccgtgtgcgaggagtgcctcaaagtctacctgagcgcccaggtaacttcacccccttctcttccccatttatcattccaaatcactggcgaggaggtcctgctctcgatctgatctccctgctcgcgcgaagaggtgaccgacacacttactgaggatctctgttagtttctcacgtctcagttgttatttaagtgtattatgacctcactggtttacttaactggaatttaactttgctgtgaacttcaggctatggttggcatgtgtagaaggcacaagatacaagttgttgccctcctcttatttcttatacaggattgcaagcacaagcttgctcaaaggaggagaggaagagactgcctcatcggcctggtatcccagaaactaacaagcagtgggcatagaataaatatttatggagctggtggagaaaagaattggaataaatatttcagacccataatacatgaatttgtaattttgcttcatttgtatattccaggaaagagtgaatgtttaaaaaaatgtatcccttggc

SEQ ID NO: 11745 - DNA, 969 bp, Artificial sequence
  DNA replication origin
ggtctcctgcttgccagtctgcggttcctgccatggggaaattctgttatctttgaagaaaataataagtaagggaagagagagatgccctttcacaactgcaaaattctctcctccccagtttccagctcccatcatcaacaaagaaaaccacgaaaacaaaaacaaatccggattgcctttgtccacagtatagagggcgggggcgggggcgggggcgagggcgaaggcgagggcgtcggcggggctgcagcctccacgcagagaccactgatggctccgcgccgctcagttgatcccttcccactgcacggagcgggagactaaaggcccactgcccatggctgcgaaaaccttccttcgggaacgcggagctagtgcacgggggcatgttcttcccccgcagccctggcaagcagaggccggcggcctgtggcgcggggcagttgtgctggctgccgggcggggctgctctgggtctgggtgcacggagaggagcgcggagtgaagcgcacggtgcacactgcggggcgctgcttgtcacctccctgcccctccctctgccctcccccgctgtccggagcacagtcccgggagggcggatgtcccctgggaagatgcgcgaggagagcgactgggaggcagctagcagcacctgcgtgtgggcaacacgacccgaggctgtctccattgcctgcgtgctgaaagcataaaagcttttttttttctttttttgaggaagtaaatgtgtaaattaaattactttggtgggggttagaaaacagttttcctcagtgtcatggtgacatcttccatctgccagttcacttttcataaacctgctgatacattttctacatctcattaaaaaggtaacccaaaagaaaagtaacggggggagaaggagatgaaagggagagagaaaggaaagacaaaacgaagagaaagttaaaaaaaatagactaggaa

SEQ ID NO: 11746 - DNA, 912 bp, Artificial sequence
  DNA replication origin
cgtccgggaggtgaggggcgcctctgcccggccgcccctactgggaagtgaggacccctctgcccggccagccgccccgtccgggagggaggtggggggggtcagccccccgcccggccagccgccccgtccgggagggaggtggggggatcagccccctgcctggccagccgccccgtccgggaggtgaggggcgcctctgcccggccgcccctactgggaagtgaggacccctctgcccggccagccgccccgtccgggagggaggtggggggaacagccccccgcccggccagccgccctatccaggaggtgaggggcgcctctgcccggccgcccctactgggaagtgaggagcccctctgcctggccagccgccccgtccgggagggcggtgggggggtcagccccccgcccggccagccgccccatctgggaggtgaggggcacttctgccgggccgcccctactgggaagtgaggagcccctctgcccggccacgacccggtctgggaggtgtgcccagcggctcattggggatgggccatgatgacaatggcggttttgtggaatagaaaggcgggaagggtggggaaaaaattgagaaatcggatggttgccgggtctgtgtggatagaagtagacatgggagacttttcattttgttctgtactaagaaaaattcttctgccttgggatcctgttgatctgtgaccttatccccaaccctgtgctctctgaaacatgtgctgtgtccactcagggttaaatggattaagggcggtgcaagatgtgctttgttaaacagatgcttgaaggcagcatgctcgttaagagtcatcaccactccctaatcttaagtacccagggacacaaacactgcggaaggccgcagggtcctctgcctaggaa

SEQ ID NO: 11747 - DNA, 1248 bp, Artificial sequence
  DNA replication origin
ctcccccctcccggacggggcggctggccgggcggggggctgacccccccacctccctcctgggcggggcggctggccgggcagaggggctcctcacttcccagtaggggcggccgggcagaggcgcccctcacctcccggacggggcggctggccaggcggggggctgaccccccacctccctcccggactgggcggctggccgggcggggggttgacccccccacctccctcctggacggggcgactggccgggcagaggggctcctcacttcccagtaggggcggccgggcagaggagcccctcacctcccggccggggcggctggccgaccccccccccccggcctccctcccggacggggcggctggccgggcagaggggctcctcacttcccagtaggggcggccgggcagaggagcccctcacctcccggacggggcggctggccgggcggggggctgaccccccccacctccctcccggacggggtggctgccgggcggagacgctcctcacttcccagacggggtggttgccagacggaggggctcctcacttctcagacggggcggttgccaggcagagggtttcctcacttctcagacggagcggccgggcagagacactcctcacctcccagacagggttgcggcccagcagaggcgctcctcacatcccagacagggcggtggggcagaggtgctccccacatctcagacgatgggcggccgggcagagacgctcctcacttcctagatgggatggcggcggggaagaggcgcttctcgcttcctagatgggatggcggccgggcagagacgctcctcactttccacactgggcagccaggcagaggggctcctcatatcccagacgatgggtggccaagcagagacgctcctcacttcccagacggggtggccgccgggcagaggctgcaatctcggctctttgggaggccaaggcaggcggctgggaggtggttgtagcgagccgagatcacgccactgcactccagcctgggcaccattgagcactgagtgaacgagactccatctgcaatcccagcacctcgggaggccgaggctggcggatcactcgcggttaggagctggagaccagcccggccaacacagcgaaaccccatctccaccaaaaaaaaacgaaaaccagtcaggcgtggcggcgcgcgcctgcaatcgcaggcactcggcaggctgaggcaggagaatcaggcagggagg

SEQ ID NO: 11748 - DNA, 931 bp, Artificial sequence
  DNA replication origin
aagccggaccaggtgtgaggaggggaggtgataaaaagattatagggtggaggagcagaggctgaggaagaattgggacctagctcggcctggcgaggagcagcctggggaggaagggagaggtcagatgggtctgtagaaaaggaagattagaaagactcagtgacgcttggggttggtactgaggggacaggtgggagggaaagaaggaagatttgggatgagttgcactgggcccagagactaggaagggactgatatgtaaaagaatgcctggacgtcaggcacctcagactgtttgcctattttacgacaagaattatttagattttgcaggatggaaaaattcaaagttcaattttctggctatttggaactactgtcgagtttgtatcagggtcaagtggtattgcagaagaaaataaggcatttaggttttaggtcaggtgtgagttaaagaggttttaagtttttgagaacacaggccaagggagtagaaggaggaatggagggtagaaggttgcccatagtgaaggaagcaagcctagagaaaagggagagtagagaaacgaagggaaggggtttgggggttcttaccttccagaaaagtgggaaaaggggttggggtgcagagataagaggttggggcatggaaataagggatggggcgcagaaataaggggtcggggcacggaaataagggattggggcacagagataagaggtcggggcacggaaataagggattggggcacagagatatgaggttggggtacttgcccctcctctagaaaagcgggacttgccactaagagtgaaggagaaggggttgaggggtacttgcccctctcccagaaaagcgggacttgccgctaacagtgaaggagaaggggttgaggggtacttgcccctctcccagaaaagcagagaa

SEQ ID NO: 11749 - DNA, 942 bp, Artificial sequence
  DNA replication origin
cagttgctacttaattgccagcaaatcgtttccctctgcaatttttcgcaatcataattaaatacactagtatagtggcaaagaactgttagatttttttttttcagtgatgatctcaggttttgcctcaggcgtttggacgcgcccgctaattgcccgtgtggcaaacatgagttgcacctgcaggcatttgaattcagaaaaacgtgcagccctcacggaaagttgtgacggtcgagcttgagcctggcgggccgcggagcgttcacctgcggccgggaggtactggcccagggcgctcggggcgggaggtggcaggcgaccggcgcgcgtcaggctcgtcacccgctggattgcggggccggagcggggacggggtctgggtcctggcccgccctcgtgcagccgatcggaggccccgaaccccgcgccgacccagccatccgccctgaggccgacaggggagctggggttcaccgacccccgcggccccgccgtcgggcgcggaccccatccagccccacctggccccgccgagtgtgtgctttgcctggggttaagtttcagaagccaagatggaacgattcgggtttctattcacaaggttattgaaggcatggcggtggggaccgcgcaaaagagatgagagtgtggggggaaaggggtttctgttctaataagggcttagcacgctggccgcaggtcctccgcgccgaccgggctccttcccgctctcccccgggccaaaccccgccagggtcccgtctttcccagtcgcgtcctttcctcttctccccgccccgcgccgggcttgtgtggacagagaacggagtgtcaaagggacgccctgggccgatccccaggaagctatgaatccctccgtgacggaggggtctggggatcgatagacggccctttctcagaggctctctccactactga

SEQ ID NO: 11750 - DNA, 1034 bp, Artificial sequence
  DNA replication origin
ggggccacctcacccgcccccgcgcaccggcccaggccttccgcccggcacctccccctcgctggtcggcgtggctcgcgattggctgggccagggggcggggccgcgctcgccaatgcccgccgcaaggctccagccgaggcgtgggaacgcggccgcggacctggtaccccagagcagcgagcgggtggggagcagccggggcgagaatgagcgcaatcttgctaacccctgcggagggagcgcgcgggcgccaacgcgggcgcgcgggggcgggccctggacctggaccttgggtttcggccctcctccgcgccccgcggtctcgcgggcgaagtttcagtcctgagtgtaaagaataaccccaagcgcgtggctaagtgcgagcaggcgcgtgtgacgtcgggaggcgccgcggctcctcggccgccccactcggtggtcccctgtctggatccaaactgctgactggctgacccgagtggtcacatttgccctctggggcttttgaaaaccttaaatcaaaattgcttttgaatctgacaactcctgaggctactttcgcggcctcggggctgtttcatataaggacgcgagttttcctgatcaggtctgtcggccacgttacgatttccaatttgcgatccatcagttacttccattgggtcttcagcccccagggactgtggatcctagaccccgcggagaagcccgtggactggagctgtgtcagctctgatggtaggaaagactagatcaatgacgcgggcatttcaggacataatcgtatattttcaagttcgagtttttcgggcttggattatccagataattgcctccagtctcctccagtccccctggtgtatgcactcgcagccgcagagttagagtccgggaggtgaagattggcgcttggaaattagatttggtttctaaagtatgaattcgtgtccaacagttcgtgccttggacaacgtgggttgtataaaactcaagctgtgtgtttaaaacaggttttctagctgctggttctc

SEQ ID NO: 11751 - DNA, 1309 bp, Artificial sequence
  DNA replication origin
ccgcgttggcgcccgcgcgctccctccgcaggggttagcaagattgcgctcattctcgccccggctgctccccacccgctcgctgctctggggtaccaggtccgcggccgcgttcccacgcctcggctggagccttgcggcgggcattggcgagcgcggccccgccccctggcccagccaatcgcgagccacgccgaccagcgagggggaggtgccgggcggaaggcctgggccggtgcgcgggggcgggtgaggtggccccacccgctcgaggggggggcgtggccggcgccggctcttgcggccgagcagagttgcggcgtgggaaagagccgctaggagcagaccgcgccgccgccggagccgcgcctgcccaggcccggggagggaggaggcgggcgtcagggtgctgcgccccgctcggcgtccgagcttccggccgggctgtgccccgcgcggtcttcgccgggatgaagcgcccctgcgaggagacgacctccgagagcgacatggacgagaccatcgacgtggggagcgagaacaattactcggggtgagcgcgggctccgcgggagcggcccgcagctcgggagcttggggtagctttgtgaatgcgtggctccctggaaatcccgaggctggtctccgcagcatctaggtagagagggaaagtttggcctgagaaagtttgagtggtgggcgctcgcagagcgtgagttgggatggggcaagggatgtggattttcaccgtaggggtggagtagccaggatgggagacgccactgaaaggcagagcgcaggagttggcgagggagggtcctggctgtcacagttggacgcgcgaacggcagcgtctgggcgacaggcgatgtcccagccactgaaaccgtatttgggggcactttcaaaatagatcaggagaaaataaaaacaatttgatttttgatttttagagataccaaaatcacaacttgatttttggaggaattaaagcaacctgcgatgtcaaggctacgtaggttgaactttgcaggttgaccgtgtgtgacttggctaacgcaagagtgagtgacagatgtaagcatcggaaagggcatcatttctttgactgcttgttctcaagtctggaagagatcggcgtcgtaatcacagaagccagacctccactttcctgtgacagagggagattaccgaggcattttagagccaaggcgggtcaaatgataattgcttctaattggcatccccagaagcaccttaattatttatctgcagctgtcactcaaagagggaaattcttcctaccttt

SEQ ID NO: 11752 - DNA, 1120 bp, Artificial sequence
  DNA replication origin
gagtggacacagcacatgtttcagagagcacagggttgggggcaaggtcatagatcaacagcatcccaaggcagaagaatctttcttagtacagaacaaaatggagtctcctatgtctacttctttctacacagacacagcaacaatctgatttctctatcttttccccacatttcccccctttctattccacaaaaccgccatcgtcatcatggcccgttctcaatgagccgttgggtacacctcccagacggggtggcggccgggcagaggggctcctcacttcccagcaggggcggccgggcagaggcgcccccacctcccggacggggcggctggccgggcgggggctgccccccacctccctcccggagggggcggctgccgggcggagacgctcctcacttcccagacggggtggctgccgggcggaggggctcctcacttctcagacggggcggctgccgggcggaggggctcctcacttctcagatggggcggccgggcagagacgctcctcacctcccagacagggtcgtggccgggcagaggcgctcctcacatcccagacggggcggcggggcagaggctctccccacatctcagacgatgggcggctgggcagagacgctcctcacttcctagacgggatggcggccgggaagaggtgctcctcatttcccagactgggcagccgggcagaggggctcctcacatcccagactatgggcggccaggcagacgctccttacttcccagacggggtggcggccgggcagagactgcaatctcggcactttgggaggccaaggcaggcggctgggaggtggaggttgtagctagccgagatcacgccactgcactccagcctgggcaacattgagcactgagtgaacgagactctgtctgcaatcccggtacctcgggaggccgaggctggcagatcactcgcggttaggagctggagaccagcctggccaacacagcaaaaccccgtctccaccaaaaaaatacgaaaaccagtcaggcgtggcggcgcgcgcctgcaatcgcaggcacttggcaggctgaggcgggagaatcaggcagggagattgcagtgagccgagatggcagcagt

SEQ ID NO: 11753 - DNA, 878 bp, Artificial sequence
  DNA replication origin
ctgggaaatgaggagcacctcttcccggccgccatcccgtctaggaagtgaggagcgtctctgcccagccgcccatcgtctgagatgtggggagagcctctgccccgccgccccgtctgggatgtgaggagcgcctctgcccggccacgaccctgtctgggaggtgaggagcgtctctgcccggccgccccatctgagaagtgaggagcccctccgcccggcagccgccccgtctgagaagtgaggagcccctccgcccggcagccaccccgtctgggaagtgaggagcgtctccgcccggcagccgccccctccgggagggaggtggggggcagcccccgcccggccagccgccccgtccgggaggtgggggcgcctctgcccggccgcccctgctgggaagtgaggagcccctctgcccggccgccaccccgtctgggaggtgtacccaacggctcattgagaacgggccatgatgacgatggcggttttgtggaatagaaaggggggaaatgtggggaaaagatagagaaatcagattgttgctgtgtctgtgtagaaagaagtagacataggagactccattttgttctgtactaagaaagattcttctgccttgggatgctgttgatctatgaccttgcccccaaccctgtgctctctgaaacatgtgctgtgtccactcagggttaaatggattaagggcggtgcaagatgtgctttgttaaacagatgcttgaaggcagcatgctcgttaagagtcatcaccactccctaatctcaagtacccagggacacaaacaccgcggaaggccgcagggtcctctgcctaggaaaaccagagacctttgttcacatgtttatctgctgaccttccc

SEQ ID NO: 11754 - DNA, 1059 bp, Artificial sequence
  DNA replication origin
gccccgcgtccggatcgggtgtgcgcagccgccgcagtcggggtgtcttaggcctcttcccacgcgcgacgcctcgccagccccgcagctgcgccccccgtcagggcatgggccgctacggggtcccgggcccggctgaaggcgggcagtcacgggtggcgcgacgctgtgcagacgcccgcctctagctcctcccggccagtggcgcgcgctgcgcctcacagcggttgcgggggcctgggagctcgcgccgggctctgccgctcggactgcagttgcggcatcctccccgccccccgcgacctccgagctgggaggctgggcaccccggctacccgcggctgctgcagcctccgctgccgcgatcccggcggctccgccccggagagctgcgcgtgcggcctccgcaggcctcggccctttgtggcgcctcccgagtgcgggcgccttgctgccccagcgaaccgccgcctggcagcggcacctaggagggtcctcttacctcaccccgggccgcttcccccttacagttggcccgcctggcccctactcttcgtgggaagtaaggctttgacagcagagcaggagttagagcttttccccagctttaaagccctttgactttccttccagctcaggaccgatggccacaataaattcatcctgtgtcccttctggcgttgcgtttaacagaggggcccaccatctccttccccctcccgttcccggtacaccatcctggatgctgccaaattgcagtcattacagcaataagaacatagcagttgggccctccagccgactcttggcagagactcgagagaaccttggagggggaaggtttgcatcagctgcggggcctgtgcctgtgagctccccatccccagttgggtgctgttccctctgcggtcccatgaccagcactgcaacatgactaggaggatctggccgtggagttcattcactcttatacgcagaaaaatatcccaaggaagggcctgcaactactctgttaacagtgtgttacaggccttccacacagataaactagatagcagc

SEQ ID NO: 11755 - DNA, 1065 bp, Artificial sequence
  DNA replication origin
tgcccgccttcagccgggcccgggaccccgtagcggcccatgccctgacggggggcgcagctgcggggctggcgaggcgtcgcgcgtgggaagaggcctaagacaccccgactgcggcggctgcgcacacccgatccggacgcggggccccgcgggcgcgcgcctcggagctcccgcctcctcctcttgctcctcctcggcgtacggtcctcccctgacccctccttccacccgccgagaggatgcgctccccggcgcccagcagcagaggccaccgctcccagaaatgcatgcgaccgatccccttctcccggaccccaggagccggcgcccccgccctgtaggtaggtggtgaggcggggcccagccctcgccgccgcccgccgctgatgctgccgccgagaggccgcgagcagggtccaggaccggccaaacttgcctcccgccgggggctcggtggagcgctcggaggtgtgctaatggcgctgggcgtagccccctgtgaacctgaaaacctctgcttgagctcgggaggccgagcgggggcgaaggagagattgacccttccccgcccaccccttggggggctcgtgggggtgcgcgccagtacgagagtggggaggacaggttggcatggggcttatttggggagaagaccgttggattttcagcagctcaggtggaaatatgtcactgtgtttttccggctggattagcagatgcgttcttcccatctttctagccaaaacatgtagacaggcaaagggttattagtggcatgtagaagtcgctgtggatttttgtgtatttcagagctagctagttggtatataaaatcgatggggcaaacccttaccgtcaacacgttagggccaatttagagaaggtccttctagaagtcagattattctggagatcgatgaggctgggatattgttgtgctgagtatttaggagcctctgcttacgtgaagggatgtgttttaagagtggcaactttgatacaggtgtcgggagttgagattctgctggaaagatgtaccgggtcagccagcagaggcagcct

SEQ ID NO: 11756 - DNA, 825 bp, Artificial sequence
  DNA replication origin
tggggcgggtggacagggaaaccaactattgtactttcaaattatccaagcactgaactgcggcggcttcgctggggtggctggcatcgccgcgaaccggggttccaggagccgccggggcggccgcaggtagcatgttgtgcggcaactgccgcaggcgggatccgggcgggcgagcggcggcggcggcggctgcagcggcggccccttgggctcagaagctgcggcggctgcggctgcagcggcgggggcccctggagcgcaggggagcgggcgccgtcggcacagcggccatggccaaggggcggcggagagaccccgagctgcttctggcgtgcgcgagcaggagacgctccagtgttgggctgggctcccgggagcaccacataggggaggaggaggaggagggcagggaggggggagggagaggagggcagggagggggagaggaggggggatggctgtggggggcgggggggagctcgggggcggggaaggaaactgctggagcaacaaccctgagcgacctcaataactttcaatttcaagagggaaagagggagctggaaaagtacaggcgttgcgctttggcagagggacgggaagaggcgcctaaggggtcccgggtctacagcgcagcatctctggacactgcagtgacggccggagaattccagccagaagaatggggaaagcagtgcgtgcgaagagcccctccagaagggcagctctggcggggagacttgggcgcactggggctggcaggcagtgttgaggccgaagaccccccacccatcccagttcggctcctctccgcggcctcaa

SEQ ID NO: 11757 - DNA, 974 bp, Artificial sequence
  DNA replication origin
gtcctcccgccctgcgcctcgcagaggagatgcaggttcgggctttgggggtatggacggcgtctttcacccttgcctctcggcgcccctgccttccgcagcatcctagccggtgcgaggggcgggcggacgcggcgctaaggtggctcccgccccatggtaacttcaggttcgcgggaaagttcggtcctgggttagactcgcacccgggatttgtgctttccttttgaggatcggacaggggcacccagccgaaggcacttgggactcccagacgcaggatgcctctgaccgctgagtaaatgacaagggaggcgcggccgcggtacccgctcacctagcgcaaccgcctcgcgcggggagacctcggctgggcccttaggctggactccggtagccgaacgcccgctacccggccaggaagccagggagcgagcgcctgcgcggccgcatccccgacacgcaccagcggagccaaagggcgcgcgaggcgatggggttcgcgtgtctgcgcgtttgcagagctgccggacgtcccccgcccgagggttgaagacagcaaaaccccagctgtggggagccggaggtgcggagtttccaggttctctcttgtcacatgtgagcgtctgtaccatctctggccctttcaagtgtgtcccctgggacacacacgtacagagagtggggtctccctaaagattcgcctcctcgctgcccttaatgctgttatttggagggttggattgtgatggcttcttaagacggtgtcctagctggaattaagcggacaccaccacggcagcctcaacctgggttggtctgtctgaaaggtagaatcttcccaagatgaagggacagatgcgaaggtgtcacctctcctcgctccagggtagcctggcgccctcgctgctctagtgtctgtgttcccatggggagtcctttcgcagatctcagagcaggggcgaccctggctc

SEQ ID NO: 11758 - DNA, 883 bp, Artificial sequence
  DNA replication origin
tcggagcgaggccctctcgggggagcagggtgaacgccggccactctaggatcctcactcggggagaggaggcatagctcgcggtgtcacctccagccgcaacgtactccgggtcggccttgcgctcggggcctgagaggggcggcggcggggtcaggggccggtacgtagatggacgcccttgggctggcgcggccccggctgtccgcgcagaggcgggatgggacagttcagccctttccgccacccccgccttggctgctggggcaggcaagacgaccgtgacagcccctgcgctgcccgagggcgccgcagcccctgccctgggtgacggccggagctggtctcggtccgggtgcgaggggcggagcagcggccattactgcgcagcctcttccgcctgagcccgcttcgctgcctcgggtggcaggcgggtccctctcctcccctctgggccgtggttttaggcctttacccggggaccttctggcctcgaggtgtaggggcggcgatggtttttcggcggtagcctgctccatgttttcccgtgtggggtcagacagtttgggccttgggtcagatcgaagccagggcgtacagtctgcatttttgccttttcccggagtgtctctggctgctgctttctcttctctcgctcttcctccttttttttctcctgctcagtgtctcggtcttgcctaaaacgaagagagcaatccctgcaccttgtcctagtgaagcccagcgctgcatattcttagttgtttttgacggctgttgaagcatcggaacaattaagagatctcagaatatcccttgagcctccaaaccctctgcatcttaaaagctgaggctgttgctttgttctgattgttgggtgggg

SEQ ID NO: 11759 - DNA, 832 bp, Artificial sequence
  DNA replication origin
caaaatgatctcaatattggtgtaaaatcacctcccctttcaagggtcttccaaagcacttcctgtctgcggcatacaaaatgtattggcacggaattttaagcttactgagctttataaacacgtcacattcacacattcaagacacacactggatattcggataaaaacaaacaaacaaaaaactggctaaatacccattcccctcaataacttggataagatacctaaaaaaggtcgaccttcggtacctttctgtcttctcccctctcgctatttgcctacactggcttcctcacctccactttttctcacgtttatctgagcgaaaacaagcacggttcggcagcctcctttcccagccctacctttgtgctgcaaaagcgaaaattcaaaagccaagtacaataggagaccgcccaccctggctccctcgtgacacgagggagcgcgaagcggagggcgcctcgcggcaggagcgggatttccggggtcacgggaaccggcaggggaacgggataaagttcccggagaaaggaaaggagagcgtgggatagtaaaagagaagacgcggagaagaggagaggacctacaagaacggaggacaggggcgcacgatggtcccggggggagcggaaacaaaggcacgcaaaacggaaaagcgtgtgtaggggagcggaaaaggaagtcaccaccgtggcctgcgacggtaagtggtcgtaagggttggtcttagcgcttcagtttagtgttgtcagtgggagaatcctaaaatgtcgccgtggaatggactgtaccgctcgcttctccaaacgtgtcccagacggcgagc

SEQ ID NO: 11760 - DNA, 905 bp, Artificial sequence
  DNA replication origin
aatctgggcctccgtttctctaattataatggtttgtcacacttcttcctggagagaggtagagtaagagaacgagagagggcctaaagtgggcctttttcccccagtttcctcttctgtactcagctccttgtcactcctgtctcgtggagagagagggcaattaaagctgagaatttggaattggaatggggtgtgtacggtgtgtgtcggaagggctggaagcgagtttgattttgacacgcggcctgtcaccgcctcagaacgagatcgatgagctgagaaccgagatggacgagatgagggacactttcttcgaggaggatgcctgtcaactgcaggaaatgcgccacgagttggagagagccaacaaaaactgccggatcctgcagtaccgcctccgcaaagccgagcgcaaaaggctccgctacgcccagaccggggaaatcgacggggagctgttgcgcagcctggagcaggacctcaaggtctgcggcgcgggggctcaatggcgcgcggcaggggcggtgggtggggactttggccaagggctctttaggctgagaagtcttcagtggcgactggcaaggagccttagggacacagtttcgtagcgctaaccacaaaatactagggtctcagaagggagagaactggcaggtggctctaaagagtgcagagtgtgtggagggcctggcagcaaacgagctaagtgtgctctcctgggagcaaaggtggctcttcaagaggtgatgagaagaaggctcccttctgggcagaagcaagggcgtggcagagcgcaggctctagcctttgatctgcccttcagtctgtctactgagagaagtccggtggaatcgggcagtcaggagctgcactaaaaggactcctctgggggagttgaa

SEQ ID NO: 11761 - DNA, 1174 bp, Artificial sequence
  DNA replication origin
cggggaaagggaggggggcgctccgcagccgccgccgcccaggggctggcgagggaaaggcgtacgcgctcagcagaggggcggcagcggcggggagggggcctccccttctccatcctcctcttctgcgggcaaaaccccaggaaccggcagcagaaactccggaagcggcgttgcggggggcggcagcggtggtggagggagctactggaaagaaggatgtctgcagtctgagctcatccagttccatctcaagaaggagcgggcggcagcggcggcggccgcggctcagatgcacgctaagaacggcggcggcagcagtagccgcagctccccggtgtctggcccccctgccgtttgcgagaccctggccgtcgcctccgcctccccaatggcggcggcggcggagggcccccagcagagcgcagagggcagcgcgagcggcgggggcatgcaggcggcagcgcccccttcgtcgcagccgcacccgcagcagctccaagagcaggaagaaatgcaagaggagatggagaagctgcgagaggaaaacgagactctcaaggtgaggagggtggggggacccggctgggggatgggaagagtgggcctgggaggattagggcgtgtaccggcagggatcagaggctgctaacctgttagggagccttgaagagggaggagaacaagaaaggagggagggggtttcctaggccttgccggaatttgaatctgctctcagtaacgcgaggttttcatttaaattcaaatctgggcctccgtttctctaattataatggtttgtcacacttcttcctggagagaggtagagtaagagaacgagagagggcctaaagtgggcctttttcccccagtttcctcttctgtactcagctccttgtcactcctgtctcgtggagagagagggcaattaaagctgagaatttggaattggaatggggtgtgtacggtgtgtgtcggaagggctggaagcgagtttgattttgacacgcggcctgtcaccgcctcagaacgagatcgatgagctgagaaccgagatggacgagatgagggacactttcttcgaggaggatgcctgtcaactgcaggaaatgcgccacgagttggagagagccaacaaaaactgccggatcctgcagtaccgcctccgcaaagc

SEQ ID NO: 11762 - DNA, 1105 bp, Artificial sequence
  DNA replication origin
gtcacccccggctccgcccccgtccctccccgagcaaagtaactcttgactaacaggagcagcctccgccgagcatggagagctgccgccgcggccggccggcgacgctggcgacgctttcgcccctgaggtagtttggcgaccgcgaagaaggaaaaagggcgggcgggcggctgtcctctcaccgtcctcaccccgcgaggcccggcccgctcctccgtcgtggatttcgcggcgatccccccggcagctctttgcaaagctgcttgaaacttctcccaaactcggcatggatacgactgcggcggcggcgctgcctgcttttgtggcgctcttgctcctctctccttggcctctcctgggatcggcccaaggccagttctccgcaggtgagtggccggggggcgtccccgacgaacgcctggagtcctgggctcacgaggggtgagccaggtccccgctagggctggggacaaggatcgtggggagctctctctgtccgggggtggggaacacagggtagagggagggctgtccccagagttcgtgccaggtgggacgcggggcacccattgttcctctccgaagcttgctcggggctcaggctggcacggtctagccggagagtgtggggacctgctggcttcggcgtctcgcgtggcctgcgccgggctagtggggaagagagaaagaaaaagtagttacgactcccgtgacggcactctgttgcttgtggtgcgggtttgttgctgtctgccacttgggtgtttaaacaaattccctgggaagccattgtcagaaatgtggagattcgaagggactgacctcggcgcgctttgccaggtgctttttgtcccgggaataacctcccctgactattgtctaactacttccccgtccctcccggagtccccttttctcctcccccagctctgggttgctcccgggcttgccctgtgcgctcgggcactgcttggagcatgttctgtgtgtgtgttggcggagccctgtaagatgtgttgaaatgcggttctaaggacccactctgagcgttcatgggcatcgaggtctgggcgcctggtggaggaagcctgactcgcgcgtg

SEQ ID NO: 11763 - DNA, 1157 bp, Artificial sequence
  DNA replication origin
cgccgccgcagtcgtatccatgccgagtttgggagaagtttcaagcagctttgcaaagagctgccggggggatcgccgcgaaatccacgacggaggagcgggccgggcctcgcggggtgaggacggtgagaggacagccgcccgcccgccctttttccttcttcgcggtcgccaaactacctcaggggcgaaagcgtcgccagcgtcgccggccggccgcggcggcagctctccatgctcggcggaggctgctcctgttagtcaagagttactttgctcggggagggacgggggcggagccgggggtgacgtcgccccgcgggctccgggcgcttctgaggaatgcgggctcgggcgcggcgccgccaccgcctcctgccggagagacgcgcgccagccccggccgcgcgccccgcgccgcctttgttcgcagcctgggccccgccgccagccgctgctcggagggagcgagcgagaaaggggagccggcgcagctcgctgccctgttccagaactcagaatttgagaggcgagagttcggtaagccgtgcgaccagacgaccgaggacgcgcgcagagaaacccccgccgtccgaggagaggcgtcctggggttccgtcccaaggtggaggtccccccgagcggttgctgattgaaaggggagtgtggaagcgccctgaggaaacacccgcctgccttgaaaactccccgttccttattcttgtaataaggaataagacaccccacccccatcgaaaacttgtcccttattcatagaataaataaaacttgaaccagaataaacgatcagtaactttccagcgtgaacagctggcgtgtctcctttctggtttatttgtcattggccaagtatttggatttactctgcttcactgactttgcttgttgctctgaaaccctccggcccctttccagttctcacctaagaactgcatcagggcttattatcccttccttgcacctaggtctggtgtgtgtgtggttttgttttttttaatatctagtaggtagttaagacataagtatttaacaaaaggacttttacactgaccatgaaaacagcttcttcggaatgattcatctggcagaaaataatgctatattatgacagtaaaatatttcacagttaactactt

SEQ ID NO: 11764 - DNA, 891 bp, Artificial sequence
  DNA replication origin
agaacaaaatggagtctcctatgtctacttctttctacacagacacagcaacaatctgatttctctatcttttccccacatttcccccttttctattccacaaaaccaccatcatcatcatggcccgttctcaatgagctgctgggtacacctcccagatggggtggcggctgggcagaggggctcctcacttcccagaaggggtggccggtagaggcgccccccacctccctcccagacggggtggctggccaggcgggggctgccccctacctccctcctggacggggcggctggcagggtgggggctgcccccacctccctcccggacggggtggctgccgggcggagacgctcctcacttcccagatggggtagctgccgggcggaggggctcctcacttctcagacggggcggctgccgggcggaggggttcctcacttctcagatggggcggctgccgggcagaggggctcctcacttctcagacgcagcggccgggcagagacgctcctcacttcctagacgggatggcggtccggaagaggcactcctcacttcccagactgggtagccaggcagaggggctccttacatcccagacgatgggcggccaggcagagacgctcctcacttcccagacggggtggcggccgggcagaggctgcaaactcggcactttgggaggccaaggcaggcggctgggaggtggaggttgtagctagccgagatcacaccactgcactccagcctgggcaacattgagcactgagtgaacgagactccgtctgcaatctcggcacctcgggaggccgaggctggcagatcactcgcggttaggagctggagaccagcccggtagatgatgatatttcatttgcaatagctaa

SEQ ID NO: 11765 - DNA, 1204 bp, Artificial sequence
  DNA replication origin
gtgctttgggaagcgaggcggcgcgggcccgcggcggccgtccgcgcgggagagggcgcgggccgcgggccgggccgggagcccgcgccgtcgcggcgttcgccccgcgccgtgccgcgccgcgccggcccgggtgcgggcgcgggcgcgggcgtgtgtcgggaggcggcggcggcggtcgcggcggcggcggccgcgccggggcggcgggcttgtggggggagggtgggggcggcgcggggctgcttttcctgcaacttgtttacgcctgccttattctggggaggaaaagaggggtcggggccggggccggcgccggggccaccgcccgcctcgcgccgcgtgtgtgtgcggttccggaataatgggctttgcacactcgcgtcctgggccccgcgggccgtcctcgcgccgcggcggcggggcggggggaagtagaggccggcgggggtggggatcgggaagcgcaggagccgaggcatccgccgcgcgccccgcgagctggtggagtgtgggggccgccgggcggggagaaaaacttgagagccctggaaggggaggagggcacggtggcacgggcggggggagggcgcaacttttggactggtggtaaaactttaattacctttaaagaaaaaaaggccctgcgattcccccctcccccagtcccggtcaaagcacagcccgcagcgcgaccgtgagagaaagtttaaaagcgggcgtgttcctcccgggtccccgcggagggctgggggcgtcggtctgtccgtcgcgctcagagggaggtgggggtaactagccgctttccagggcgcggggaccgcggctctaccccacccttccacgggagacggaggtaaacgttgcttcggtttcccttctgagtccccctgctgccaccaccccgcttccttttcctccccctccccgccgattttttgaggggacccgaaaaacggagtccctttccttaggcaacttcctcgggcgctgtgagcacggccctccccctcaccgcccccacccccaacgcctcgcatcccttggcccgcttctccacctcggggccaccgccagaaaaatgcattcgagatcattcagagtgcacagaaacaaaaatagatttttaattgttaggttaggggaaactgagatgagaaataagaatttggggtgggggggcgcggccggggcgagtgcgtcc

SEQ ID NO: 11766 - DNA, 839 bp, Artificial sequence
  DNA replication origin
ggtaaacgttgcttcggtttcccttctgagtccccctgctgccaccaccccgcttccttttcctccccctccccgccgattttttgaggggacccgaaaaacggagtccctttccttaggcaacttcctcgggcgctgtgagcacggccctccccctcaccgcccccacccccaacgcctcgcatcccttggcccgcttctccacctcggggccaccgccagaaaaatgcattcgagatcattcagagtgcacagaaacaaaaatagatttttaattgttaggttaggggaaactgagatgagaaataagaatttggggtgggggggcgcggccggggcgagtgcgtccagttctccttttggttttcctagagcgttgtttgtgatgtctttattggtttagggagtccgagaggctctatgctggctatctcggtcgcgtggatttttgcgcaagtttttagaaaaacactgactcgagtagagagcatttctccggaaagtttcaagtgcagcaaaatagcgaacgtgcaaaactggccaaggggagacctctagtggttgaacgcgtcttttaagttcggaaggccgagagcaaagtttggcctttactcgtagctacgtagtccgttcagacgtggaagtaattagaggacctgagcgagcagccagatgttgtgtgaaaggatgctgatcagaaattgaaagtttagtaaatcgaagcaatgaattctgaggactcagaccctgtaacttccatccgacatgagttatatgggaaagacactttgcttttattcagagatttgagattgatcgctccctgaattggaaacaat

SEQ ID NO: 11767 - DNA, 1173 bp, Artificial sequence
  DNA replication origin
gtagggtttgagggccagaatttaatttttggagttttatttaatgtcaggagcagattgggtaataaaatgtatattgagaataagacagccttttgaccttttagggtctagggctgtaaagtgtctcagggttgctaccgaacaagccatgaactgggctgggatttttatatttgacgaaaaagagtctaaatgctaactgatttgggagaggtcggataaagaaaaaggagcattaaccttgactatacctttagctccagccacctttttaagaggaaattgctgggcaggtgggggagggctagtcgcagaatgaaactgtaagccagactgggtgtgaggaggggtggtgataaaaagattatagagtggaggagcggaggctgaggaagaattgggacctagctcgacctggcgagaagcagcctggggaggaggggagaggtcagatgggtctggagaaaaggaagattagaaagacccagtgacgcttggggttgggactgaggggacaggagggagggaaagaaggaagatttgggacaagttgcattgggcacagagactaggaagggactgatgtgtaaaagaatgcctggacatcaggcacctcagaccgtttgcctattttacaacaagaattatttagatcttgcaggatggaaaacttgaaagtgccattttctggctatttggaactactgtcgagtttgtattggggtcaagcggcattgcagaagaaaataaggcatttaggttttaggtcaggtgtgagttgaagaggttttaagttcttgagagcacaggctaagggagttggaggaatggagggtggaaagttgcccatagtgaaggaggcaagcccagagaaaagggagagtagagacacagagggaaggggttcaggggttcttaccctccagaaaagcgggaaaggggtcagggcacagaaataaggggttggggcacagagataagaggtcggggcgtggaaataagggatcagggcgcagagataagaggtcagggcacggaaataagggattggggtgcagagatgtaagaggtcagggcacagaaataagggatcggggagcagagatatgaggttggggtacttgcccctcccccagaaaagtgggacttgctgctaagtgtgaaggagaa

SEQ ID NO: 11768 - DNA, 941 bp, Artificial sequence
  DNA replication origin
gaggacgcagacaggatctgctctgcaggagcccaggccggccgatccgcgtcccggccacaaagttgcacttcgagagcccaaatcacccgcagacaaaacccatctttgggaacaaagtacccgcttgcaggcgctcttcccgggctggaaggctggcgtgcggaaacggacacacccacccgtggggcccgcctctagctaccgcgggaccaccggttaccgagccagggacccggctcccccagttctccggagcggctggggagctccagccgactcgcagtattcccggagcaggcaccgcaggaccctggctccacgcccctcggacgctttctcctcagatgccgcccggcgggccggggtccccctggcgggctgcgcgggcgctgcgcgagctaaaccaaacctggccggaaaagacgcggccaaggcccgctccgtccacgcttcccgccggcccggcaaggggttccggagaacggcttgggggggcgagaaccatgggcgggggaaatggaagacagagggaactgaagcacgggggtcttcgatgagcagtgcggatgttcgactccaaacatcaaagccaacgagaggttcaggttactcctccttgaccccaaacatccagtgagtggagactggcctgttcacagagtaaaatatgtcgtctctaattcggcaaagacggtgatgactgtatatatgcaggccaattccgtaagtaaagtttcatgtaaaactaattaccggatattccaaccaccccctgtgcaggccagccgcatgcacaaggtgtgtgctatgcttgtgtcccctggatctgttttaagtgatagaaggcaagtatgatattctggtgcagtgtatttgtttatttcggcgtgtgatctgtttatctcgttttcaagaaaagtttgcttctgggggggtat

SEQ ID NO: 11769 - DNA, 1299 bp, Artificial sequence
  DNA replication origin
gatcccaaggcagaagaatttttcttagtacagaacaaaatgaaaagtctcccatgtctacctctttctacacagacacggcaaccatccgatttctcaatcttttccccacctttcccccctttctattccacaaaactgccattgtcatcatggcccgttctcaatgagctgttgggtacacctcccagacggggtggtggccgggcagaggggttcctcacttcccagtaggggcggccgggcagaggcgcccctcacttcccggatggggcggctggctgggtggggggctgacccccccacctccctcccagacggggcagctggccgggcggggggctgacccccccacctccctcccggacggggtggctggccgggcagaggggctcctcacttcccagtaggggcggccaggcagaggcacccctcacctgccggatggggtggctggccgggcggggggctgacccccccacctccctcccggacgaggtggctgccaggtggagacgctcctcacttcccagatggggtggctgctgggcggaggggctcctcacttctcagacggggcggttgctgggcggaggggctcctcacttctcagacggggcggttgccgggcagagggtctcctcacttctcagacggggcggccgggcagagacgctcctcacatcccggacggggcggcagggcagaggtgctccccacatctcagacgatgggcggctgggcagagatgctcctcacttcccagatgtgatggcggctgggaagaggcgctcctcacttcctagatgggatggcggccgggcagagacgctcctcactttccagactgggcagccaggcagaggggctcctcacatcccagacgatgggcggtcaggcggagacgctcctcacttcccagacggggtggcggccgggcagaggctgcaatctcggcactttgggaggccaaggcaggcggctgggaggtggaggttgtagcgagccgagatcatgccactgcactccagcctgggcaccattgagcactgagtgaacgagactccgtctgcaatcccagcacctcgggaggccgaggctggcggatcactcgcggtcaggagctggagaccagcccggccaacacagcgaaaccccgtcatggtccagaaggtaagatttggctctttcaggctcttctttgtctcccacgttggcctttcagtttctctgctttttctcagttccagctcctttctctttcacggtacctcagttgcttctactttatcggatagt

SEQ ID NO: 11770 - DNA, 957 bp, Artificial sequence
  DNA replication origin
ggatgtgaggagcgtctctgcccggccgccccgtctgagaagtgaggagaccctctgcccggcaaccgccccgtctgagaagtgaggagcccctccgcccagcaaccgccccgtctgagaagtgaggagcccctccgcccagcagccaccccatctgggaagtgaggagcgtctccacctggcagccacctcgtccgggagggaggtgggggggtcagccccccgcccggccagccaccccatccggcaggtgaggggtgcctctgcctggccgcccctactgggaagtgaggagcccctctgcccggccagccaccccgtccgggagggaggtgggggggtcagccccccgcccggccagctgccccgtctgggagggaggtgggggggtcagccccccacccagccagccgccccatccgggaagtgaggggcgcctctgcccggccgcccctactgggaagtgaggaacccctctgcccggccaccaccccgtctgggaggtgtacccaacagctcattgagaacgggccatgatgacaatggcagttttgtggaatagaaaggggggaaaggtggggaaaagattgagaaatcggatggttgccgtgtctgtgtagaaagaggtagacatgggagacttttcattttgttctgtactaagaaaaattcttctgccttgggatcctgttgatcggtgaccttacccccaaccccgtgctctctgaaacatgtgctgtatcctctcagggttgaatggattaagggcggtacaagatgtgctttgttaaacagatgcttgaaggcagcatgctccttaagagtcatcaccactccctaatctcaagtacccagggacacaaacactgtggaaggccgcagggtcctctgcctaggaaaaccagagacctttgttcacttgtttatctgctgaccttccctccactattgtcctgt

SEQ ID NO: 11771 - DNA, 1019 bp, Artificial sequence
  DNA replication origin
agggatggggtgcagaaataaggggtcggggcatggaaataaggggtcggggcacagaaataaggggtcggggcatggaaataagggattggggtgcagagataagaagtcagggtgtggaaataagggactggggtgcagagatataagaggttgtggcgtggaaataagggattggggcacagagatacgaggttggggtacttgcccctcctctggaaaagcgggacttgctgctaagggtgaaggagaaggggttgaggggtacttgcccctcccccagaaaagcagagaaggggtagagacaaggagagaaagagttggggtacttgccccttccccagaaaagcaggacttgccgctaagggtgaaggaccaaggcaggtgtccctgagtggtctgacacctttgaaacatgggtgaataatcagagaggtgtccctgcaatgattaaacaccaagggaaggctgccttcctagtccgtgactggcgccggagttttgggtccacggataaaaagtgtctcctttgtctctaccagaaaatgaaaggaattgaaattaacagaaggcagagattgaagtgtggcgccaagattgaaaggagaaagaggttgagggatagtgagggaggttggagaagagagtaaaaagaggccgcttaccggatttgaaattggtgagatgtttcttgggctggtcagtctgaggacctgaggtcgtaggtggatctttctcatggagcaaagaacaggaggacaggggattgatctccgaagggaggtcccccgatccaagtcacggcaccaaatttcatgcgcgtccgtgtgaagagaccaccaaacaggctttgcgtgagcaacatggctgtttatttcacctgggtgcaggtaggctgagtcggaaaagagagtcagtgaagggagataagggtggggctgttttataggatttgggtaggtaaaggaaaattacagtcaaagggggtttgttctctggcgggcaggagtcggggtcga

SEQ ID NO: 11772 - DNA, 855 bp, Artificial sequence
  DNA replication origin
gagttgcactgggcacagagactaggaagggactgatgtgtaaaaaatgcctggacgtcagtcacctcagaccatttgcctattttacgataagaagtatttagatcttgtagaatggaaaaattgaaagtgccgttttctggctatttggaactactgtcgagtttgtattggggtcaagcagcattgcagaagaaaataagacatttaggttttaggtcaggtgtgagttgaagaggttttaagtttttgagaacacaggttaagggagtagaaggaggaatggagggtggaaagttgcctatagtgaaggaagcaagcctagagaaaagagagagtagagaaatggagggaaggggttcgggggttcttaccttctagaaaagtgggaaaaggggttggggcacagagataagaggttgcggcacagaaataagggatggggtgcagaaataaggggtcggggcatggaaataaggggtcggggcacagaaataaggggtcggggcatggaaataagggattggggtgcagagataagaagtcagggtgtggaaataagggactggggtgcagagatataagaggttgtggcgtggaaataagggattggggcacagagatacgaggttggggtacttgcccctcctctggaaaagcgggacttgctgctaagggtgaaggagaaggggttgaggggtacttgcccctcccccagaaaagcagagaaggggtagagacaaggagagaaagagttggggtacttgccccttccccagaaaagcaggacttgccgctaagggtgaaggaccaaggcaggtgtccctgagtggtctgacacctttgaaacatggg

SEQ ID NO: 11773 - DNA, 1197 bp, Artificial sequence
  DNA replication origin
gggtttgagggccagattctaatttttggagttttatttaatgtcgggagcagattgggtaataaaatgtatattgagaataagatggccttttgaccttttagggtctagggctgtaaagcgtcacagggttgctgccgaatgagacatgaagtgggctgggtttttatatttgatgaaaaagagcctaaacactatctgatttgggataaagaaaaaggagcattaaccttgactatgcctttggctccagacacctttttaagagtaaatcgctgggcaggtgggggagggctagtcacggaaggaaactgtaagccggaccaggtgtgaggaggggaggtgataaaaagattacagggtggaggagcggaggctgaggaagaattgggacctagctcagcctggcgaggaggggagaggtcagatgggtctgcagaaaaggaagattagaaagactcagtgacgcttggggttgggactgaggggacaggcgggagggaaagaaggaagatttgggacgagttgcactgggcacagagactaggaagggactgatgtgtaaaagaatgcctggacttcaggcacctcagaccatttgccattttacgacaagaattatttagatcttgtaggatggaaaaattgaatgtgccattttctggctatttggaactcctgtcgagtttatattggggtcaagcagcattgcagaagaaaataagatgcttagattttaggtcaggtgagaattgaagaggttttaagttctgaagaatataggctaagggagaaggaggaggaatggaaggtggaagcttgcccatagtgaaggaggcaaacccagagaaaagagtagagacacagagaaggggttgggggttcttgccctccagaaaagcagagaaagggttggggcacagaaataagggattggggtgcagagataaaggttggggcatggaaataagtgattggggggttcttgccccctaggaaagcgggacttgccgctaagggtgaaggagaaggggttgaggggtacttgcccctgccccaggaaagcgggacttgctgctaagggtgaaggagaaggggttgaggggttcttgcccctgccccaggaaagcagagaaggggtagagacaaggagagaaggggttgaggggttcttgcccctgccccaggaaagcagag

SEQ ID NO: 11774 - DNA, 1288 bp, Artificial sequence
  DNA replication origin
aaaggagcattaaccttgactatgcctttaactccagccaccttttaaagagtaaattgctgagcaggacggggagggctagtcacagaatgaaactaagccggaccaggtgtgaggaggggaggtgataaaaagattatagggtggaggagcagaggctgaggaagaattgggacctagctcggcctggcgaggagtagcctggggaggaagggagaggtcagatgggtctgtagaaaaggaagattagaaagactcagcgacgcttggggttgggactgaggggacaggcgggagggaaaggaggaagattcgggacaagttgcactgggcacagagactaggaagggactgatgtgtaaaagaatgcctggacattcaggcacctcagaccatttgcctattttacgacaagaattatttagatcttgtaggatggaaaaattcaaagtgctattttctggctatttggaactactgtcgagtttgtcttggggtcaagtggcattgcagaagaaaataaggcatttaggttttaggtcaggtgtgagttgaagaggttttaagtttttgagaacacaggccaaggcagtagaaggaggaatggagggtggaaggttgcctatagtgaaggaagcaagcctagagagaagagagagtagagaaacggaaggggttcgggggttcttatcttccagaaaaggggttggggcacagagataagaggtcagggcatggaaataagggattgaggtgcagagatataagagggtggggtgcggaaataagggattggggtgcagagatacgaggttggggcatggaaatacgggattggggcagagagataagaggtcagggtgcggaaataagggattggggcacagagataagaggtcggggtgcagaaataagggattggggtgcagagataagaggtcagggcacagaaataagggattggggtgcagagatttaagaggtcatctgggcatatccgtgcaagtcacaggggatgcgatggcttggcttgggctcagaggcctgacagttatcatctttcagatttttctagggataaggagggtatgcagagctggctgggattggtaataataataatgacaataatagtgtgagaggagtttgaaccagagcaactccatcttgaataggggctgggtaaaatgaggttgagacctactgggctgcattcccagaggttaaggcattctaagtcacaggatgagataggaggtcagcacaagatacaggtcataaagacctt

SEQ ID NO: 11775 - DNA, 913 bp, Artificial sequence
  DNA replication origin
gggctgcgggtcttaccggtgcacacgccgatcttgcggttggccggggagccgaagtgacagaataggcccttgtgcgggtcgcatgggtcgcgctcggtgcacagctcgcccagctgcttggcgcagacgcggcagcagccgcagccgtccagcacgaggctcacgcccgccgggcagcgcggcgccggctcgtccgggcaccggcacggcccgctgcagttctggccgacggccggctgcagggaggacagggcggtcagcggcgctcggtcggcgcgcacgccctccccggccggccccgagtccctccctggcagccgccggccgcagcgggggctcccggcgcttacccggctgcagagggcgaggaggaccacgaaggcgacgcggacggggcccatactggcggcggtcatggttggcactgcgggcggagcggagggcgcggtggcggcgagcggggagcggcggggcctggagcgctggcggtggtcggaggtggggaccgggacgcgccgggctgtcgtctcggggctgtcggccggggcggctgccgtcgagctggagggtggagtcgcactggctgtctcctctcagcggggaagagttgttgtgtgagtttggggcgggcggcccgaggcttttatacgctccgggcggccgcggctcgccaatgagctgaatggagtcctacacaaacagggacattcctcgcattcctccccaccttcctgcctcatcaactcacaccggattgatcctgaccccttgacactcagcattcctccgtctgaaaaagctggcacactccagctcacagaaaaaaaaaaaaaggaaaaaaaaaagcgcagtatttccagcaccaaatagaatttttttttccctatcctcttcgcaccactcctgattc

SEQ ID NO: 11776 - DNA, 932 bp, Artificial sequence
  DNA replication origin
tcctcactccccagcggctggaggccggtaccggcgggcaggaggcgcccgaggatgtgctgctggccgctgctcctgctgtgggggctgctccccgggacggcggcggggggctcgggccgaacctatccgcaccggaccctcctggactcggagggcaagtactggctgggctggagccagcggggcagccagatcgccttccgcctccaggtgcgcactgcaggctacgtgggcttcggcttctcgcccaccggggccatggcgtccgccgacatcgtcgtgggcggggtggcccacgggcggccctacctccaggtaagcgcgtctcctcccggagcccgcccggccgagcccggtcccgtccggaccccagagagggcgcaggtgcgggtcgtccccggggcccgcagctctctctcacctggcgcagccccgcgcccccggccacgctcactctcgcctccgcgggcagcgcctgctctcccggagccccagaaggcgcgcggtagggaagccgagcacggatgaccccaggcaggtttccttctttgaacactttcctgtccccagcgccccacttaatagacgcccccccgcctacacacctgcaatacaccccgcttcatccctgatgggaagggagaaggacctaggctttggctttggggacctaatgggacagctctcagaggagggaagggacagagcgctttagtacgtcgcggacttgctgtctaggagtggaaatctcagaacttcccaaatcgtggctatttgggagcctccaggcgcggggctgatgtcagctacaccattctccagaagaatgaagggcccctaagaatcgcttagggactttcctattccgagagctgttcaggaagccacatttagagaccaaaatcgaaggtccccaggcaaaatatcct

SEQ ID NO: 11777 - DNA, 929 bp, Artificial sequence
  DNA replication origin
cggtgggcgagaagccgaagcccacgtagcctgcagtgcgcacctggaggcggaaggcgatctggctgccccgctggctccagcccagccagtacttgccctccgagtccaggagggtccggtgcggataggttcggcccgagccccccgccgccgtcccggggagcagcccccacagcaggagcagcggccagcagcacatcctcgggcgcctcctgcccgccggtaccggcctccagccgctggggagtgaggagcagaacgaggagcggcagcggcggcgagcgggagcccagggaccgcccctcgggccggccgcgcgcccgcccgggaggggcaggacccgctctccccgccccgggccgcctgcagggcgcgccgcgtcccgtccggtcccgtcccgttccgtcccgtcgggtcccagccccgccaactctcaccctgcccggcccttccagcggatccacttgcagcccccgacccctgacttggtccccgaggtcggggctcggtgggaaggaaagcgaggggcttcccggaaagaaagggaggaggaggcaggaggaggcagacgccgagagaggagaaaaggaggccagaggcagagggaaaaggaggagggcaagagaatcctagagcgggaagagcgtgggctctgcgggacgtgggcgagaggttaccagggaaagaatggacattgacggcagagagcaagtttagcctggagaggaggaattgagtgagcaaagggggtagtctggggtgcgatgcacagaaaggcccgtccagggtaaccttcacgtctccgtatccgttgctgtcgactttccagagcctttgttcccagtgacgtccctattgcaatggagggacacacttcactttccccagccccccacctcgagaatttctctcaccctcccaccctg

SEQ ID NO: 11778 - DNA, 929 bp, Artificial sequence
  DNA replication origin
ggtgggggggtcagccctccgcccggccagccgccccgtctgggaggtgaggggcgcctctgcccagccgcccctactgggaagtgaggagcccctctgcccggccagccgccccatccgggagggaggtgagggggtcagccccccgcccagccagccgccctgtccgggagggaggtgggggggtcagccctccgcccggccagccgccccgtctgggaggtgaggggcgcctctgcccggccgcccctactgggaagtgaggagcccctctgcccggccagccgccccgtccgggaaggaggtgcgggggtcggacccccgcccggccagccgccccgtccgggagggaggtggggggattcggcccccctgcccggccagccgccccgtccgggaggtgaggggcgcctctgcccggccgcccctactgggaagtgaggagcccctctgcccggccaccaccccgtctgggaggtgtgcccaacagctcattgagaacgggccaggatgacaatggcggctttgtggaatagaaaggcgggaaaggtggggaaaagattgagaaatcggatggttgccgtgtctgtgtagaaagaagtagacatgggagacttttcattttgttctgcactaagaaaaattcctctgccttgggatcctgttgatctgtgaccttacccccaaccctgtgctctctgaaacatgtgctgtgtccactcagggttaaatggattaagggcggtgcaagatgtgctttgttaaacagatgcttgaaggcagcatgctcgttaagagtcatcaccaatccctaatctcaagtaatcagggacacaaacacttcggaaggccgcagggtcctctgcctaggaaaaccagagacctttgttcacttgtttatctgctgaccttccctccactattgtccc

SEQ ID NO: 11779 - DNA, 996 bp, Artificial sequence
  DNA replication origin
ccagcactttaggaggctgaagtgggcggatcacccaaggtcaagagtttgagaccagcttggccatgatggcgaaaccccatctctactaaaaagtacaaaaattagctgggtgtggtggtgtatgcctgtaatcccagctactcaggaggctgaagcaggagaatcacttgcacccaggagacggaggttgcagtgagctgagattgcgccattgcactccagcctgggcgacaagagcaaaacagaaaggaaggaaggaaggaaggagagaaggggaggaaaggggagggaaggggagggaagaggagggaaggggagggaaggggagggaagaggagggaaggggagggaaggggagggaagaggagggaaggggagggaaggggagggaaggggagggaaggggagggaaggggagggaaggggagggagggagggaggaaaaaataaaagaaaagaaagaaattaggggtatttgggcaatgtactccttttttcctataaaggaatgcctgagactgagtaatttctagggaaaagaggtttctttggctcacggttctgaaggctgtacaagcatggcacccacaactactcagcttctagtgagacctcaggaagcttttactcatggcagaaaatgaagaaggaacaggcgtgtcacatggcaaaatagggagcaagagagagagagaggaggaggtgccaggctcctttaacaaccagatctcatgtgaactaataaagcaagaactcactcattaccaaaagggtggcagggatctgtccccacgacccaaacacctcccactaggccacctccaacattgaagatcacattttaacatgagatttggaggggacaaatatccaaaccatatcaggcagaataagcagaatgaagagaatcaatataaaacagagcatattagcccagtttggatgaagtatacaagtgaacattttgagccagctctctttctctcagtagct

SEQ ID NO: 11780 - DNA, 1393 bp, Artificial sequence
  DNA replication origin
gtgacgggagcagtgagagccggaaatgagtggctagcgaggcacccaggagcgccctgtccggcggcgctctagccctcgcgcactgtctctatgctccccagcgtctagtctatttattgtcgcggggaagctgcggccgcctcgcacccggaacaacaaagcaaggaagacggagtccgagcctcgggggctcctagcaacgggccggggcgggagttccatggagactggggagcgcgcccgtctcatcctcatccttgtcctccagcttctccttcgcatccgacgcaaccggcagcagcgctgccgccgcgtcctcagccaccgctccctcttcccacggtaaccccctaggcgaccctgggcacagggagcgcgggcggctgagcggcctgagcaccgggtgcggggcgtctgggcgcggggtgggcatgtgcggagcccgggccagacttggggtgggatgtgtgggggcgggcgactggagggcagccgctgaggtgggggaaaccggtccggtggccgagggagggctcagttctgaagaggaccgggcgatatttggggatctctttagggataacgggttgggggtggggcgtccgtacctgggagcgttaccgagcctggtgtaggataagaaaagaagggttatctttcgtttaagccaccactgggaaagacggggaaaagagattcctcatctgtctcggagccatcacccaggggaagagggaccgtgcaaagatgctaggggtccgttgcttctcagaaaacttacagcggcttctctaatagctcccaaaaagcggcttcgtcggtttctgattctggcaatgccggcagcctcgctttattttattattatttttgaccaaaattaggattgatggagaaggatctagaactgaagaagagaaaatgaattgtgggtagggctaagcagggatgagagtcgggataagtgataaaaatagccaataaaagccctaaaagtaaatctaatagggcatgagggcttaaaaagaaaatctctcctgccgagatgtgcatctgcaggctctgtcaatgtgctcattgcaataagactcaaactgcagtcaatccacatctgtgagctctctgactgcatctgtcacctgcagttccaaagcgacactggcagtaagtgcatgagcttctgtatttagggtttagaacagtgccttaaaactgtgacttaagaaaagggagcaggtttgcgtgtgtgtgtgtaagcaatgtggattctctgggaaaatataaaaagagacataagaaggttcagccatcctggcataatttcgcagtctctttgagaaaatggcagttccttcctattgagaagtgactgttagcactatctggttga

SEQ ID NO: 11781 - DNA, 1157 bp, Artificial sequence
  DNA replication origin
ggactgggatagtcagtaacccagccagcctgccaagctgcagaccccctgtctcatggaggctatcttgagggaggggaatgtgtgcagagcaggaggcagagggtgaacatttggtgctgggagcagcagcaatgatagatgttgaagaatggaacattgtacaagagacaacacaactgtccagtgatagtttgtgaacagaggaaatgatggaaccagaaccctgtggggtagggaagagcgggagggttgggagcctgcagggcaagctccttgttattagtgtcctgtctgaggagggggaaatagaccgagtggtgggaacaggtagggttgggtgagcaaccccaggcggcctcaggtggctgcccagggaacctgggcctcacctgaacaacccgtgactctacatctccatcactgcaatgtgtactcagagcccaggctgagggcaagggagctggggcccctgtgaaaatggggtaggggtctcaaaccctgcctgccttcctgtactacaaagggagctgtccaacctggtgcaggaactaggaaaggtgggggaagatgaaagatggatgtgtgagccccacgtggtgacaaagacacaggttggctgggggcattctgggagcacccccctccaatggccacaggtgctgcctccaggacaatagagtgggacatgccagaatgagatggggcttgggcctcttttatggccggggagccctctgggaagtcagaggaaacagtggaggagccgagaaggagcccccaaagcagaaacccagaaagcaaagtccccaccaacaagggagtggggccgcagcaggtgcagcagcgtgaagtgggctgttaccctcgtccaggagggcaagtgtgtgcgtggctgggaactgaagccagaggaacactgctgtcactgggccaacaggggccctgccgcggtggtgaggacgcaggtgggcggtgcaggtgacggtggcctgggggaaggacaggggcaatgggggtgagcaaaactgtccggtcccagaaggaagtggctcctcccgggaggactcccgagagatgctccctcttcctccttcccagtgttttgggccggccctttgctttccctcctggagctgtggtggttttccgggtcg

SEQ ID NO: 11782 - DNA, 1035 bp, Artificial sequence
  DNA replication origin
gcggcacttgaggagcccttcagcccaccgctgcactgtgggagcccctttctgggctagccgaggccagagccggctccctcagcttgcagggaggtgtggagggagaggcgcgaacgggaacgggggctgcgctcggcgcttgcaggccagctggagttctgggtgggcgtgggcttggcgggccccgcactcggagcagccggccggccctgccggccccgggcagtgaggggcttagcaccctggccagtggctgcggagggtgtactgggtcccccagcagtgccggcccactggcgctgcgctcgatttctcacctgggccttagctgccttcccgcagggcagggctcgggacctgcagcccgccatgcctgagcctcccaccccctccatgggctcctgtgcggcctgagcctcccagacgagcgccgccccctgcttcatggcgcccagtcccatcgaccgcccaagggttgaggagtgtgaccgcatggcacaggactggcaggcagctccacccgtggccccggtgcgggatccactgggtgaagccagctgggctcctgagtctggtggggacgtggagagtctttatgtctagctcagggattgtaaacgcaccaatcagcaccctgtcgaaacaggccacttggctctaccaatcagcaggatgtgggtggggccagataagagaataaaagcaggctgccccagccgcagtggcaacccgctcgggtccccttccacactgtggaagatttaatcgtttgctctttgcaataaatcttgctactgctttctctttgggtccacactgcttttatgagctgtaacactcaccgcaaagatctgcagcctcactcctgaagccagccagaccacaagcccaacggaggaaggaagaactccagatgcgctgccttaagtgcagtaatactcaccgcgaaggtctgcagcttcactcctgagccagcgagaccacgaacccaccagaaggaaaaaactctgaacacatctgaacatcagaagg

SEQ ID NO: 11783 - DNA, 957 bp, Artificial sequence
  DNA replication origin
ctgcctgccagtcctgagccatgcgctcgcactcctcagcccttgggcggtcgatgggactgggcgccgtggagcagggggcggcgctcgtcggggaggctcgggctgcacaggaacccacggaggcgggggaaggctcaggcatggcgggctgcagtcccgaggcccgccccgcgggaaggcagctaaggcccggcgagaaatcgagcgcagcgccggcgggctggcactgctgggggacccagtacaccctccgcagccgctggcctgggtgctaagttcctcattgcccggggccagcagggccggtcggctgctccgagtgcggggcccgccaagcccacgcccacccggaactccagctggcccgcaagcgccgcacgcagccccggttcctgctcgcgcctctccctccacacctccccgcaagctgagggagtgggctccggccttggccagtccagaaaggggctcccacagtgcagcggtgggctgaagggctcctcaagtgccaccaaagtgggagcccaggcagaggaggcaccgagagcgagtgaggactgtgaggactgccaacacgctgtcacctctcactatcttaacaaaaggtaataaatcatgaggaagtgataagaggaggagtgtgggcatctaggggtggtaaatttgcttaccaaagttgaggaggtaggggctggtcatttaaggaacattaaactctctctatggaaccaggtggagggcctacaggaataagtgtctgttgtggtgtgcttgtgtggacacttaatctgagtgtggggatttgggaagcctccttaccttccctcattttgtattcttctcctcctcttccattttcttctcctccttctccttatttttattttttggtatgttttacattgtaactttatttatctacagatctctgggtttttaaaaatatctgcacca

SEQ ID NO: 11784 - DNA, 845 bp, Artificial sequence
  DNA replication origin
ggcgaagtttctcaggagaaagaggaggaggaggtcacggaggaggaggagaaggaggaggaggaaacaggttgatattaaagtgtaaactctgtaaacagagatgccatcaaacaaagagctttggacactccccctcccgccaaatctggcgcccctgcagtgcgcacgcgccctgcccgccgcctccgcggtcgccctggctgccgcccgcggggctgccgggctggccgggtcgccgctcccattcggcgctcgcgccgccgcggtgcgcctagcgcgccgcgaggcccgggaggcgcgcgggcagggagcccggggccagggaggggtggccgggggccgcgacggcgccttttcctgagcaaaccccgctcccgggtcgcggcggcgccgacccgcgcccagtcccgccgcctcccctcctccctggctgccgcaccgcggtcgcccggctccgcgtgctcccgggcagcgggaccagagctcctccagctcccactcactgtcgcgggggcggcaagcggtggggggaaattcccgcacagaagattggattttcgtcaaggtttacaactgtgccctctggagacggggaaattaggagttggaggagtaggggatgtgagcatatgtattcataggctgtttggctagggttttttttccttcttcttaaataaataacatctctaatttaacttgttagtgacaaaggacgcttcaatacaagtgggcggcaaccatcaccgctcactaatggagcgccccagcggagctttcactcccctcccggatcctgcagccgccaccgtcgtattgtcacatgtccttcactctcaccc

SEQ ID NO: 11785 - DNA, 1001 bp, Artificial sequence
  DNA replication origin
aaacttcgccccagcggtgcggagcgccgctgcgcagccggggagggacgcaggcaggcggcgggcagcgggaggcggcagcccggtgcggtccccgcggctctcggcggagccccgcgcccgccgcgccatggcccgaagaccccggcacaggtaacggggagccgggcgggcggccgagggcgggggcgcgcgggggcgcgcggggcgccaggctcccgggagcaggtgggaattcgttccgggatcatctgaggggctgtcagaccctccgaggacctggagcccctgcctcggcagcagaagccgctccagagactgatgaatggaagagtctttgcgggaaatgtatccggacgttgggaagcacgccctgcggctcattttgcaagttgcatggggatacatttttctttagggggaaaaagaaagcacgttccagccgagggcagagcggtgcccaccagccccggggagcccaccaggtgcctggcttgatgccgcgggtgtcggcgagggatccgcagcgtaattgctggatgcattgagatatgtttggacttggaagtgcagagcatatggcagatacagggaaaatgctggattgtttagtagctgcaggtagttcatttaaatttcattcattctttatggaggcgaggaccagtgtcagctgacaggcggctgaaaagcagattttagggggataaaggggtctctacttttgcaaattgtcttaagacctggttttggaggttcgaatcatttttctctgaaaggcttttacttccactgcaaacattgcacgcgcacccacacgcgccgccgtcgcacatgtcactgcacttagggaggctcgccgggaagatgggtgcagtcccttcacatttttggccggacagatgggaagagggagaggaggaggaggagggaaatcctcgtccgaactgtcagttgctcgttccccagtctccaccggcctctggactttcccagcagca

SEQ ID NO: 11786 - DNA, 948 bp, Artificial sequence
  DNA replication origin
agccgccctgtccgggaggtgaggggcgcctctgcccggccgcccctactgggaagtgaggagcccctctgcccggccagccgccccgtccgggagggaggtgggggggtcagccccccgcccggccagccgccccatccgggagggaggtggggggggtcagccccccgtccggccagccgccccgtccggggggtgaggggcgcctctgcccggccgcgcctactgggaagtgaggagcccctctgcccggccaccaccccgtcccggagggaggtgggggggtcaacccccgcccggccagctgccccgtccgggaagtgaggggcgcctctgcccggccagccgccccgtccgggagggaggtgggggggtcagccccccgcccggccagccgccccgtccgggaggtgaggggcgcctctgcccggccgcccctactgggaagtgaggagcccctctgcccggccaccaccccgtctgggaggtgtacccaacagctcattgagaacaggccatgatgacaatggcggttttgtagaatagaaaggggggaaaggtggggaaaagattgagaaatcggatggttgccgtgtctgtgtagaaagaggtagacattggagacttttcattttgttctgtactaagaaaaattcttctgccttgggatcctgttgatcggtgaccttacccccaaccctgtgctctctgaaacatgtgctgtatccactcagggttgaatggattaagggcggtgcaagatgtgctttgttaaacagatgcttgaaggcagcatgctccttaagagtcatcaccactccctaatctcaagtacccagggacacaaacactgcggaaggccgcagggtcctctgcctaggaaaaccagagacctttgttcacttgtttatctactgaccttccctccactattgtcctgtgaccctg

SEQ ID NO: 11787 - DNA, 1282 bp, Artificial sequence
  DNA replication origin
gcagaggcgcccctcacctcccggacggggcggctggccgggcggggggctgacccccccacctccctcccggacggggcggctggccgggcagaggcgcccctcacttcccggacggggcagctggccgggcgggggttgacccccccacctccctccgggacggggtggtggccgggcagaggggctcctcacttcccagtaggcgcggccgggcagaggcgcccctcaccccccggacggggcggctggccggacggggggctgaccccccccacctccctcccggatggggcggctggccgggcggggggctgacccccccacctccctcccggacggggcggctggccgggcagaggggctcctcacttcccagtaggggcggccgggcagaggcgcccctcacctcccggacagggcggctggccgggcggggggctgacccccccacctccctcccggacgaggtggctgccgggcggagatgctcctcacttcccagacagggtggctgctgggcggaggggctcctcacttctcagacagggcggttgccaggcagagggtctcctcacttctcagacggggcgtccgggcagagacgctcctcacatcctggacggggcggcagggcagaggtgctccccacatctcagacgatgggcggccgggcagagacgctcctcacttcccagatgtgatggcggccgggaagaggcgctcctcacttcctagatgggatggcagccgggcagagacgctcctcactttccagactgggcagccaggcagaggggctcctcacatcccagacgatgggcggccaggcggagacgctcctcacttcccagacggggtggcggccgggcagaggctgcaatctcagcactttgggaggccaaggcaggcggctgggaggtggaggttgtagcgagccgagatcacgccactgcactccagcctgggcaccattgagcactgagtgaacgagactccgtctgcaatcccggcacctcgggaggccgaggctggcggatcactcgcggttaggagctggagaccagcccggccaacacagcgaatccccgtctccaccaaaaaaatacgaaaaccagtcaggcgtggcggcgcacgcctgcaatcgcaggcactcggcaagctgaggcaggagaatcaggcagggaggttgcagtaggccgagatggcagcagtaccgtccagcttcggcttggcatcagagggagaccgtggaaagagagggagagggagaccgtgggga

SEQ ID NO: 11788 - DNA, 739 bp, Artificial sequence
  DNA replication origin
ttacttataatacctaatacaatgtaaatgctgtataaatagttgtcccgtattgtatagggaataatgacaagaaaaaagtctatgtgttcattacagatgcatttcttttctgaatagtttcaatccatggttggttgaatgcgtggatgcagaacccatggatgcagagggctgttaaataaaaacattataacgacaaagcagggaagggagttgcacctgaggagtagggttgggttgctgtttaaatggagtggtcaaggaaagcttcacaaagtagctgagaattaagcaaaattcagatgacgacaaagaagaagaaagagagggagggagggaggaaggaaggaaggaaggagggaggaagaggggaaggggagggagggagagggtgaaggggagggagggagggagaaggggaaggagggagggagttgggggagggagggaggaaggaaggaaggaaagggaagggagcttggaaaaaaggaagctaggaaggaaggaagctaggaagctgtaagttgtttgggagaatagcatccccatccaagatcctgaaacaggaatgtacttggtatgcattttgaacagcaaagaggtcagtatagctagattggagggaacaaggaggagagtagaaaacagtaagttcagagaggtagcagcaggcccagattgtacagaaccttgtaggaatgaagtgcagaactcagccccatccctagcactgcta

SEQ ID NO: 11789 - DNA, 971 bp, Artificial sequence
  DNA replication origin
ccggcagccccctccccgcccgcgcggccgcggcccggaacaaccggccctgcgcgccgcgcaccctgctccgagagcgccttcccccgcccttcgccgccgcggctcggccagcccggctcggccccggccggggttgcggccgccctcgggcgctccaccgcgactttcccgcaacaggtggaggcgagccgggggaggaaacggagagaccccggccgctgccctccccgccgcggcctcgggtctaattcagttgaatgggaaatcgtatcccccagaccaaaccagtggccagagagtcgtcggccaggtgcgactggcaggacgagcagtttctgggcacctcctcccgccttccctggtcgccccgggtgccgggggctcctcagcggggtcggtgtggggcaggaccgcggggtgagcggcccgccccccaatctggtgcccgcagtggcgacgaccgtcgtccgaggggaccgagctcgggagggccggggcccagtgcagcacggtgggggtttgcgagtgcgggcttgacgggatcagactttcgttgacttgtcggagttctcagagttttttgtttttagtctgtgcaggagcccaaaggaggattgttggctctgcagcccgggatttggtggtcaggcctctgtgttgaggatacccctcccccacaacctccaggggcacacttagggacaggggatcacgtccccaagaccagcagcaaggcttcccaagaccagcagcaaggcttcccaaccccgcccatctctccatagtatgaagccgatttttctccctcgtgatttttttttctccagaggctatcttgcaaatccgtccctctccactggttccctcttctattcttggccagtaagctgtttctatatcttcctacacttggggatgggggcagtgaggcagtttcttactttaaaaagaaattcaattcttagact

SEQ ID NO: 11790 - DNA, 866 bp, Artificial sequence
  DNA replication origin
ggccgcgcgggcggggagggggctgccggcgccgggtgatttcggtgccagcccgccggccccgctcgccgtcccctgcccgacgggacccccactatccccgctgtgcggtcacctgtttcgcttcgcactgcgccgtcgccgcccctgtggccgtcgccgccagctcctagctccgccatggtgctccgatgacgcgcccggagagccgctccgccctttcctcggcttggctcccgccggcccccgcctcccaggccagcggcccagacaggtgagcgcagtccggggatggcggagggcggggacagagagcgcggcagtcggctgcggcctgggcctggcgcgccccctcgcgggcaggtgcggcgtggcagccgctccgaccgccgctgccgagtctcggctggaagagcggcgggcggaaccagtacctcagtccggagcttccggtcgccgcggccgaccagctgagggctcccggagatatggagcggggtcagcgaggcctggtggcgcctcctggagtctgggacgagcggcggtccgaggagcagcccaggtggggcgagggtacggagacgctatttccctccgaactctgaagtagccaggtcagtgtcggctccgcgagggctggagttcacggtgacagccggcagagcatctgatgccacgtggagaggcgaagtacatgggtcggattccacgctgggagccggcctggatctgcgctttaggaagccactgcgggcgaccctatcttgtcgccaggacttcgcatctgatgagcctcagggcacacaagttagagaggcttgtgccggctgatgtggcttttctttttcttagtttccgtttagtaa

SEQ ID NO: 11791 - DNA, 1009 bp, Artificial sequence
  DNA replication origin
tgagggctcccggagatatggagcggggtcagcgaggcctggtggcgcctcctggagtctgggacgagcggcggtccgaggagcagcccaggtggggcgagggtacggagacgctatttccctccgaactctgaagtagccaggtcagtgtcggctccgcgagggctggagttcacggtgacagccggcagagcatctgatgccacgtggagaggcgaagtacatgggtcggattccacgctgggagccggcctggatctgcgctttaggaagccactgcgggcgaccctatcttgtcgccaggacttcgcatctgatgagcctcagggcacacaagttagagaggcttgtgccggctgatgtggcttttctttttcttagtttccgtttagtaaacgaccttgtgacttctggcttgctcaggaagaccagaaaaaaaggcaataggtaacgaatttttctttttttaaagaaacagattattggccgaggaaaaaccaatttcgctctaaaggataagcaacaaaatactgaggggggaaaaagcctacacaaatggaaacatacggcacaaaatcaaggagcgaccagttccgcatggttacactaaaatgcactgcactcccactctctggcttggctgaagataaccagcaagctctgaacagtttaaaagccttccaaggactgcagcagcactggacacacaagagagtcgagaacagtattggatttattgttagggttacaattttcacgatctttgcatgcaaaacttgccactctgagcccagtgaactatttttatttggtttacttactggctttctggatgactaggtagagctttaactaaagaacacttctgctgtggtctgtgatgatgaattttcccgtagtgtcatttctataatggaataggcaaactgaccatttagaatgtgatattcctaaatcacattcaaatcagtcttatcagagacttctaatcaataaaaataaagcacca

SEQ ID NO: 11792 - DNA, 1187 bp, Artificial sequence
  DNA replication origin
gagggcgagcggcgcggccacggaggcgccgaggaggagcgagccgccgccgggcagcggcgtgccctcgggggagagggcgccggagaggaggcggcggcgcggcggcgagggcgcggcgcgcgatggcagctgcttagcccggcgggcgcggagcagccccgagctgtggctggccaggcggtgcggctgggcgggggacgccgccgccgttgctgcccggcccggagagatgagcacggaggcggacgagggcatcactttctctgtgccacccttcgccccctcgggcttctgcaccatccccgagggcggcatctgcaggaggggaggagcggcggcggtgggcgagggcgaggagcaccagctgccaccgccgccgccgggcagcttctggaacgtggagagcgccgctgcccctggcatcggttgtccggcggccacctcctcgagcagtgccacccgaggccggggcagctctgttggcgggggcagccgacggaccacggtggcatatgtgatcaacgaagcgagccaagggcaactggtggtggccgagagcgaggccctgcagagcttgcgggaggcgtgcgagacagtgggcgccaccctggaaaccctgcattttgggaaactcgactttggagaaaccaccgtgctggaccgcttttacaatgcaggtgcgtgtgtgacccctttcccatcccgcgcggtcgggacccgcgtttaatctggcggtcttcggggcatttcatttttctgggcgggaagcatttacttcttgccccactttgggggcagcgagcgccgctgcgtgactgctcctgtcgctcgccgctccggagagagcgtgtgtgcttgtgcaagagtctgtgtgtacttgtgcgatagacctatggatccacccaccgcccagcgctggagccctgggtccatgcgatcgacttgaactgttctccagcagtgtgagatatttgccccagtcagtctttctcctttcagtgtctcggtttcgcttctgtgaggtttggtccctgttttctttctgcatatacctgtgaccgttttagatgaggttctccttttctctgtgtagttttgagagtacgggaacgatgacataccatgcacgcagagtgtaactatattaatttgcatgccatgtgatgatcttcccaactcacctt

SEQ ID NO: 11793 - DNA, 1501 bp, Artificial sequence
  DNA replication origin
ctaaccctggatcactcccctgatagatctgtatctttgcagcaggcgcaattcagtttggattcacccaaaacaaaaatggtctccgtcggagtcaacgccctttcctgtgcggaccaatcagaatctcaaacacagggcacggggcccacacttccgtccggtctgcctggtctctctaaccgcgccagtgtgcctccgactcggaacggcttccgcggccggggcagcgagggccgggggcggcgggcgggatgagtgcggtgtgcggtggagcggcgcggatgctgcggacgccgggacgccacggctacgccgccgagttctccccgtacctgccgggccgcctggcctgcgccaccgcgcagcactacggcatcgcgggtgaggcggcgccgcgcagctggggccggggggcggaggcggaggcgggggccagccgggctccagttcctcgcgctcgagggaaagcccctctgagcgtagacggttccgcgggtccacgccagggggcagaagaggcgctggtcggcgcttctcctttctttgccgagtgcgaggagttggtctgaagcaggagtcgatcttccagttgtgtgcaagtgcatatacgtgtagcctagtagcccgtgtccttgttccttgagaccgcgctgcctccgccacgtgtcacacgcccaggcacacgtccccgtagggagagccgggggagcctgcgcggtcccttggatcggtccgctcggcacagcagtacggggaagacggtctgagccagaaccgacccagggctcgcgagttggcccacaattcccagtctgcattcgagcactgagctgcgacctgcgggctggccttcctaaggacgatgctcctgaatggacgcctggagtcccacgggtgacaccatgaaatatatcaagttcagttcttacctgtagttgtctaacgaggaatgcacacattcgcaagtaggtgttacagactccagttaattgtctcccgtcgcgcgcattggctcagcctgtggttaaagctgctcaggaggctgaggcgggaggatcgcttgagcccgggatgttgaggctacaatgagctgagatcacatcactctgccccagcccagtgagctgagatcacatcactccactccagcctgggtgacagactgagaccccgtcttaaaaagaaaaaaggccaagcgccgtgcggtggctcacgtctgtaatcccagcactttgggaggccgaggtgggcggatcacttgagttcgggagttccagaccagcctgaccaacatggagaaaccccatctctactgaaaatacaaaattagccgggcgtggtggcgcatgcctgtaatcccagctactcgggaggctgaggtaagagaatagtttgaacccaggaggcagaggttgcggtgagccgagatcgtgccattgcactccagcctgggcaagaagagcaaaactccgtctcaaaaaaaagagtccatctagtc

SEQ ID NO: 11794 - DNA, 1065 bp, Artificial sequence
  DNA replication origin
acgcccgggcatcggaggaggaacccgcggcccggggcgctgtccagggggtgcctcggagcccggaagctggctccttccggtgccaggccacgcgcaccgctctccgcacgccttccagagagggtcccgggattatgcgcgcggctccggggaagctttcagggggttcagtggtctcgcccagcagcggggcctggtggcggggacacattcgaactgaggcaaagatgaaaataagcaaacgcgcagaaacgaagtcactaacacgagtagccaccaccaggaaccgaggagctcgggggcgacgcttcccgaagcgtgggaggggaggctggctgcgctcgcagaatgggagagtagagggggagggggcgggaacccggggcccctcaccctgcagggagactccgcgtggcgttctccggatcccagggaactgatcccagggaaccctcaccctgcgggaccgtcgtgggttgctttcggaagcaggacaaccggcaggcggagggcggggagagtcaccacctccctgggccagggttcacacctttgcaccacaggacttgtgaactgtgtgtttcctatatgactaagagaaaaagggaattctaattttggagagggagtaaggcttcggtaactctttgttctgaattcagttccctggaaagtaactcgcgcggacctgtagttaaatcagcagcagccaagggtttcgctcagccgaggtaaccgttaagcgccagacagtttggttttcaggcgatttgaaatttgtggccttggccagggtttggctataagggaaaggttcgagatcgctgcgctccagcacccctttcgttcaccaccagcagtttatttctcttagccccgggaatcgtaacctcctaaccttttagcgctgcatcacgttgccttaatagacaggatccatttctctcgtggttcttctgttttctgcctcttacttccacctctgtgctgaacgcgacacttcagccaaagtgctgaagtcgtgatttaccgcaacagaggaagaaaaaaaaattacagcag

SEQ ID NO: 11795 - DNA, 2393 bp, Artificial sequence
  DNA replication origin
tcgcggagctccgccaccgctgggtgcggcgaggccggcgcgatgcggcagctgtgccggggccgcgtgctgggcatctcggtggccatcgcgcacggggtcttctcgggctccctcaacatcttgctcaagttcctcatcagccgctaccagttctccttcctgaccctggtgcagtgcctgaccagctccaccgcggcgctgagcctggagctgctgcggcgcctcgggctcatcgccgtgccccccttcggtctgagcctggcgcgctccttcgcgggggtcgcggtgctctccacgctgcagtccagcctcacgctctggtccctgcgcggcctcagcctgcccatgtacgtggtcttcaagcgctgcctgcccctggtcaccatgctcatcggcgtcctggtgctcaagaacggcgcgccctcgccaggggtgctggcggcggtgctcatcaccacctgcggcgccgccctggcaggtgagcgggcccccgcgccgacccccagccgaccccacccaccccgctccgtcgggcagagaccgcggggatcactgagttcaacgacctcacttccagatggggagactgaggcagagagagccggagagctttgagagtggtcgctcagctcgcaaaagggacttccgagacccagagagctccccagcgccccaccaagtccccctgccccctaatgtcctggcttccgaccctcgcccatgcttcacccggcatcgcccttcctgtcgccccctctcctggtcttcccctgtcaccccattctccgggagaggtgggagggccgcctgagcctgggagctggagtcctccaagcctggaccaagccggaaggagggggccgtgaacttccttgggtcacgaggggctggaatggaggtgggggatgggggcgaagctgagggttcccggggctactgcggggtgtctcgtgctgcgcagggggctgcggccctggggcagacgacccaggtgctgagcgagacgagagcctgggcagggggaagcttcactgggggccagaacaggcgttctcccccgcgcctggcccgctccgggttgcaggccactggctggggctccctctccctttggtgccccacggggcaggggctccggggtgcaggtaccacgcgcccaagtgacctcggtgccagctcggggaagccacagcacctgccccgagggcatctgcgctctccggggcctttgtcttggacagaggaagatggagtgacccggggatatggcgggaaggcgctctgagcactgagtttggctgtcgcatttgacacgggtggccgagggacggcgggcgtctgtcactcaggaatccggtgggcagagctggggcgcgaacccagtctcctttcctacccgacgcgttttccccgtgggtccccgcccacgccaacctgctgtcttctctctttttccttcccgcccgggctcggccgtcctcctcgtgcgccgcaggagccggcgacctgacgggcgaccccatcgggtacgtcacgggagtgctggcggtgctggtgcacgctgcctacctggtgctcatccagaaggccagcgcagacaccgagcacgggccgctcaccgcgcagtacgtcatcgccgtctctgccaccccgctgctggtcatctgctccttcgccagcaccgactccatccacgcctggaccttcccgggctggaaggacccggccatggtctgcatcttcgtggcctgcatcctgatcggctgcgccatgaacttcaccacgctgcactgcacctacatcaattcggccgtgaccaccagcttcgtgggtgtggtgaagagcatcgccaccatcacggtgggcatggtggccttcagcgacgtggagcccacctctctgttcattgccggcgtggtggtgaacaccctgggctctatcatttactgtgtggccaagttcatggagaccagaaagcaaagcaactacgaggacctggaggcccagcctcggggagaggaggcgcagctaagtggagaccagctgccgttcgtgatggaggagctgcccggggagggaggaaatggccggtcagaaggtggggaggcagcaggtggccccgctcaggagagcaggcaagaggtcaggggcagcccccgaggagtcccgctggtggctgggagctctgaagaagggagcaggaggtcgttaaaagatgcttacctcgaggtatggaggttggttaggggaaccaggtatatgaagaaggattatttgatagaaaacgaggagttacccagtccttgagaaggaggtgcatgtacgtacctatgtgcatacacttattttatatgttagaaatgacgtgttttaatgagaggcctccccgt

SEQ ID NO: 11796 - DNA, 1308 bp, Artificial sequence
  DNA replication origin
atgacaatgtggggtcccttttgcaaaaaccaagagaaaggatttttctttctccccctcacggtttctctcttgccccttcctggtgcttgtaatttgctatgtaatgccacacgcccaccggcacaatactgcaaggtgagtgcagatcctcagaagcaaggggttggcgtggggggcagggggtgagcatgcgcatgagaccaccagggcctgcactggggcagggggtggttgcagtgggggaacctggaactgggtgggtggatggtgggggaacccgggactgggtggtcggggggagcctgggactgggtggggggtgggaggggagcctggggctgcatgggtaggtggtaggggagtctgagagtgggtgggtaggtggtgggggagtctgggactgggtgggtgggtgggaagggagcctggggctgggtgggcggtggtgggggagcctgggactgggtgggtggatggtgggggagagcctgggactgggtgggtgggtgggggggtggaaggggagcctgcagccagggccaggaaaggcaggggggtggaaggggagcctgcagccagggccaggaaaggcagggaggtggcgggaggctccaaggtcccagcttctgctccatcatcccattaggacttcacttaaaagacaccatgtattcaaagataaatcagaattccaagacggtggctgcagacattgggagtgcggggcccccttctgggctcagaggctgtgtgccagcactagtcgcaggcctatgcagccggccctgccccagctcctctttctccattgcagtgcctcctccttgagctccagtcggcctgcattgggccgtaattaacttttttcttcctcccctcctaaccaccccagcccacagcccacagcccactacccacaaccactgagctggctgagataagcacaaacagccacaaggaaagccaagaggcccttctgtgtgaggccgactagagtcccagagtgcattccacttaattaccgggagaaattctctagaactgctttggatactattcctagaaccaattagcccgaacctttcatttacatgcaactcgaagatgcaaaaacaaataactatggtactgtattttaacagcttaaacagctctgtttgtttagctaaaacagatgaatagctttccaaaaatacacagaagagcacttccggcctgatgaatgcataacaatgacagctgcgaagtcacaaaggaagtaccatttaggtggcatttgctaacaagttgtattttaggagagaa

SEQ ID NO: 11797 - DNA, 999 bp, Artificial sequence
  DNA replication origin
ctcgtcctctgcccgcccgaaagcgaaacctggccggcgggcaggaggggagagctcggcctcgagctctgcctggcggggccccggcctggaggcatccccgacccgcacctggcggcgcgacccacctacctgcccgtccccaaggcgccgccaggagcaacagcagcagcggcggcagcggcagcggccgcagggccgggcggccgggagcccgcatgggcggcggggctgggtcacatgtcggggggcagcagactgctcagtcccacgcccgctggggccaagcgcggccgcgcggcctcagctccgcgcctggggctctgcgtgccacgctccaggcgacctgagtcccagggcgcctccgccacagccgcgtcccccaggcttccccagaaaccaagggcgagcgactcgcggagcccccacgcgcgctcccccggctacccagctggatggcagcgcgagggcagttctcgcggatttatagtccccagccactcggctgtcagtcctgagagtctgagagtttccacctctcggggttcatgcccagaccaaccaggtcactaggcaggtaaaacctccttctggtaatgagcgaggcgagtgcattgcaaagagattctggtattcaggccggtctgatggtcagttaaagttcaatatcggaagacggatgaaatagagcgttatttctcgatatacagttaggcactcagccgtagatcttacagtcatgcatcatttaagatgacaggattacctcctgagaaatgtcttaggcgagtttcttgtgtgaacatcttagagtgtactcacacctatatggtatagcctcttacacgcctacgctatatggtacaggctgttgtttgctcctaggctacaaacctgtacggcaagtgaccatactgaatactgcaagcaattgtaacacaatggtaaatatttgtgtatctaaacatgtctgaacgtagaaaaggtacagcaaaagta

SEQ ID NO: 11798 - DNA, 760 bp, Artificial sequence
  DNA replication origin
tcacattgggaacagagagtagggagggaacaatatgtaaaagaatgcttggacatcaggcacctcagaccgtttgcccattttatgaatgcccattttacgacaagaattatctagatcttgtaggatggaaaaatcaaaagtgccattttctggctgtttggaaccactgtcgagtttatattggggtcaagcagcattgcagaagaaaataagtcatttaggttttaggtcaggtgtgagttgaagaggttttaagttcttgagaacacaggctaagggagaagagggaggaatggagggtggaaggttgcccatagtgaaggaggcaagcccagaaaaaagagagagtagagacatggagggaaggggttggggggggttcttgccctccagaaaagcagagaaggggtagagacacggagagaaggggttgggggggggggttcttgctctccagaaaagcagagaagggttagagacatggagagaaggggttggggggttcttgccttccagaaaagcagaaaaggggttggggcacagaaataaggggttggggctcagagataagaggtgggggcacagaaataagggatcagggtgcagagataagaggtcggggcacggaaataagggattggggggttcttgccccccagaaaagcagagaagcagtagagacagggagagaaggggtcagggttcttgcccctcccccagaaaagcgggacttgccgctaagggtgaaggaccaagg

SEQ ID NO: 11799 - DNA, 1368 bp, Artificial sequence
  DNA replication origin
acgaggcccatcatcacctgcgccaacacctgcaaagtgcctcgaaatactaagcgtttatggaaactgggaggaaaaacaaaaacggtaacaacaaacaaattcaaagtcgggctgagcgcggcaggtgctctttcctccccggtcccagcgccctcacgcgcagccctgggctgacactctcaagaatttgtcaactttgctaaggagaggcccggttagggtggcgcagggggcccgggggcggcgccttccccagctgcgtctcttcgctggggacctcacagaggaccccggggcctcgctctccctggccgacccggatcacagcccctggaagagagccgttgcttctaacccaagcccctggactgcccgtggctcccgaacgaaagtacggacgtttgtcctcgcagccaggcaccggcaaaaggaatttaactcgcctcggttaaattgcagcccccattgcaggccatcgtgcctggcaccctgggacgcccagggtagtgggtccctctggggatgggtactggacctgctggggccaagaccccagggagccaggagggagggatgcgcagacctgggagttcaacgacgggccttgattttactgttgcgtcctggggttcgggtagaagcagagtggtcgggtttctcgcaccgcaggaggacaggggcaaagagggggcagcgcctaagggtctgtgaggcagtgttggatagctgtcctcgtaagttttggagttctgtccggccctgacttgagtaagacccctcttttcctcgtggtctgcaacagacacctccgaaagtgcaggagccagggcctgattctgggggttgccacagtttacacgcaagcacccctcacctccacgcctggaaaattgcggaagccgggtactgaggcccccctccccagctgcggggctgtggtgccaagaacgcacttttgccacaagcaagatcctcaattccactgggggacatggagggtggcgcgggtgcattttatggcgactcctttctcctcctggttattcagcctcccaccatctcgcctcccttccgtctactccgggaaaggacaaggaaatccacaccatcatttgaaaccaaatgtaaacatatagcgttctagtggactcctagcaacacaagccttggcattacttcttttggagtttctctcaatcttcccccaattcagcaacgaacattttctgaatgcttccgatgtgccaggtgctaggagcgacaacagaggggaaaaaaaaaagtaaaacagtaagagaaataaggcattcacatgcataagaaatagctcctgtcctctgtgccctcagagcctagagggaaaac

SEQ ID NO: 11800 - DNA, 1189 bp, Artificial sequence
  DNA replication origin
aagagggcgggagaggtcgcgcacccgcgccgctcggcggggatcgctcacaggggctccggggccaccgcgagcgcggactgcggctgctggcgggctccttcgtcgtccaacgcaccccatcctctcccgccccgcagtgtcccagggaaggcttcactgaaaacagacgctcgacggaaaactgactctgcaggcccgagctttcggagtttgatttctgtgggccccttaaacgggcactgggtacaggagaggccccaactctctgcagggacggggagggaagggcactcactctcccgcaagttttcctagaggcgagctgaagatgcaggccacctccctcccgcacggcccctcccttggcctagttctgtccaaagacacttcccagccctcgagcggcggctcctccactcgattcctgcctacacgtgaagagcttggacccagcggggctgcactcgggaggacaggcccagatcctgcacggccgggaggacacctggccccgctgtcttctcttcacagctcccctttctcggcttcggcctggagcggtgcagggaggggtggacctggggtggccttaagatatctagcctgggtgcggagacttgggagcccacccttagcagtcactcctcctccccagtggagggtgagaaaaggggaacagagggccccggagtctctggaagggacgtggaacgcgaagttaaatgttggtgtctgagcgatgtgctggtggggcagagggggttccagcgtcctcccagagtgaggaggcttttgcaatttctgctgaatgcgtcagtggaggcacaaaaccttgcttgacctagcagctgggaaaaaaagaagttcgaggggacacaaggccccctgctgctggagcgaggaaaccctgggcttggccagctcgggccgcttctccctgcccgtttgcgggctgtcggcctcagcggtcccagaaacaaagatctagtgagcccagccgacgccggcctcattttccctttctaagggtcactttcttccgccctctaaattaggtcatcgcctgggaaagcgccgagaggtttctagtgtgggcttctcaaggtgtctccgcccaggaggatttcgccatccatttaaacgtaaggcggggtttaatctggaatgaaaggatcgtcgtggtgtt

SEQ ID NO: 11801 - DNA, 907 bp, Artificial sequence
  DNA replication origin
agatctatgggggccaccactcggcctttcactgcgggaccgtgggccactcggccggccaccccgcgcacgcggccaactccgtgcacccggtgcaccccatcttgggcggcgcgctctcatctggcaacgcctcgtcaccgctgtccgccgcctcacttcccgccatcggcaccatccggcctccccactcgctactcaaggcgccctccacgccgcccgcgctgcagctgggcagcggcttccagcactgggctggtctgccctgcccctgcaccatctgccagatgccgccgccgccgcacctgtccgctctctccacagccaacatggcccggctgtcggccgagtccaaggacttgctcaagtgagcagcgggcgggcccggctgccaaggaggagggagagcggcgggaggggccgcggtgccgggccgggagggaagagggaggctgcacgctcggcccacgggagggcaggctccggggcccgcagcctcccacgctgtctgagagatctcagactccacttgacccccggagggaaaggaccaaaatcaaaccgcaatttctaggtggtagcaaagggggactcgaaccagatgtcgtgtgttttgcatgcatgcttcttttccccatgccgcgccagtatttttcactgccatatgctcttgtcaaaactgcatttgttgtataaagatgggatcggtgtagttaaaaacttgcgaagggacttttgagttggctttctctgactctgtgttctcgctttggaaaaagacggccatcccttttgtgcaaaacaaatgtaaatattttcttgagatggatgcgattatgattgtctctgtccttgccacagtttttctagagacaatggagagagaaagagagagagagcgcgagag

SEQ ID NO: 11802 - DNA, 1235 bp, Artificial sequence
  DNA replication origin
aggtctcttattttctgtgtcctctctttcgttttaaaacatggatttctaaaagaatttcagttttgcacaattctttaacttcctagaccaaaaactgcgaaaaaaaaatgttaatgtcacaagaaaagcaacttgggaggatgggaaggaaaaggagccaaggaggcagagagagagattgttaggttcctgagagctccagagagattgttcccactccaggcttcctggaccttggcgctggcgcaaaacggtgggacggtccgcgcccgaagctccgccgggcctcctctggccgctgtgctgacgtgccccgagctccgggaactcagcggcaccccggcctgcgcgggtgggtccaccaggctggggccgccgtacggcgtcggacagggaaatcagaagctcataataaactatctgatgtcggggtggtggggcgggggggtggggtgcgtgggcaaagaagcacgggggaagggaaacaacgaaaggacctagaaagccccttgtgcgtgcccgggcactgcggttcagcgcagagtcgtttctgggaataaagaggaggtcggagtttggagccttcggtgcgagtgcggaggtgggcgtagatctttcttcccccttgctgtgtttttgtgatcaagactttagctcagcagcacgaggggcgggaaggcagaaatcccgggaagggagagagccccaggagtggtctctagaagaacccggacaccgcccctctcccggcttggtggaacgggaaacaaacgctagctagtgactgagagtctcggtggaagtgtgaaatcgaatcaatcgcggaacctcgggcacttggggcctcttgcgccgctgagtcacttcgaagaacaggatgcccccctttcccttgactcaaaccgagcggtcagtgggagagggatgcgcgcccaggtccggagtttgcacgctctgaggctgtgccccactgacagtcacgctgcgaaggcagctctggccaataccagaaggatgggcaaacgcaacattggcatggatgcttttgctacaccgaattttgtttttctgtaatgggggaaaaatggccaacagcccttcgtcaaggccaggaagttagtgctcttgcagattggacaggagcctcttctaccaccttcatctcggtggaaggaaagtttcttaattcaagaggttagattggatgtggaaagactaatgtccaaaagcat

SEQ ID NO: 11803 - DNA, 1610 bp, Artificial sequence
  DNA replication origin
agggagagaagcgcgggcgagccgggccggggaagccgccgctgcctggccctgggcgcctaggcggccgccgcgcgcgcccccatgccgccccggcgcggatgctgatgaatcacgcccgctccatgccgcgggccacgtcagccccgcgccccgcccgccgccccgccccgcccgcctgggtcaggtgcgctccgctcggcggcggctgcgggctggggccggagagtgaggctggaggccgctgacctgaccgccgaggcaggccccgcgggcgccgcgcttagcggaaaggtggggacggatgtccggagctggctcgccagccgccgggagggagcgcctggtccgcggcgggcggcgggaggcaggcggggaggggcctcgccgcggtcttcgcaccccctgagccgacggtggccgcgggcggagtcggagcggcccagcccggacaccgggacccccagcgtggtgcaggcgccgcgcccgctgcatcccgtcgtctgctaaccggaaaattcttgcgttcagtcactaacagcttttttgggccactccctgtgccaggctcgggcgatgcagcgttgcacacactgtgcccctgcctgcagggaaactccagtcaagctttcaacacgcggcgggcggtgggctgcggtggggctggggtagagcttgatatgcccaaggaaaccaggcccagagaggctgggttacttcccagaccaacaagagttagactccaaacacgtcctgaatccaaagccccttctaaaaacccctatctcctccccttcccatcctctcttgcgctgaattgctgccctgtgaaaaatgtggtgcacaagggccgccgcagcagagggcttctcattggggtgaaaagggggagccccaggagactcacgcgggcggtggggaaggcagtgtgacagggcaccccgtgtttcctttttctttgaaaatgttcctgtggtggaagtgaggatgatggactgcagaggggcagactggcagctgggagaacaaaggttctgcaggaatctagaaaccaattaggccaagggtgggtagaaggggaataaaggaaagtatgtcaagagatattgaagggtagaaacaataggatttaatgacacaataggggagagacggtgtatatgggatggcttccaggttacttgtttaggaaattgggaggatggtggccccattctttaaagaagagaagataaaaagggtttggattaggggggatatatgagttcagttttgaacatgttcagattgaaatgataatgagatacttgtagattttttttatggacaggaactcaggatagagctctgggagggatgccagtatttgaagggtggtaaatataggagttgttgatgcctcgagtttgacaaaggttgcacaagagagggagtgacggcccccctaattctcaaatcatgggtacaggagcaagggcccagggaggaggctgagaggagcagtccgaaatccgaggtgtagggggtcagccaggggagggactgccattggagggtgtccaacacatggggatgtcagactactccttcggcgctcttggtactgagga

SEQ ID NO: 11804 - DNA, 691 bp, Artificial sequence
  DNA replication origin
cggacatccgtccccacctttccgctaagcgcggcgcccgcggggcctgcctcggcggtcaggtcagcggcctccagcctcactctccggccccagcccgcagccgccgccgagcggagcgcacctgacccaggcgggcggggcggggcggcgggcggggcgcggggctgacgtggcccgcggcatggagcgggcgtgattcatcagcatccgcgccggggcggcatgggggcgcgcgcggcggccgcctaggcgcccagggccaggcagcggcggcttccccggcccggctcgcccgcgcttctctccctgtgggcggcggcccggcgcctggaaggtcaagatggaagaaatcctgaggaagctgcagaaggaggcgtccgggagcaagtacaaagccatcaaggagagctgcacctgggccctgggtaagcgtccggcacctgctcgccgcggcgggagggccgcgcggccggggctgaacccgcgcctccgcgcgtggggctttcgcggagcgtcggtcatgggtgccgttctggcgattgcgagagtcgcctcgggaaattgatgtgggatttgagagtcttggctcgggcgtggacatcagccgcctcccctccggtctctttcactctccgaaaccttcctcgggaaccgctgtcctccctgcctggcggcccccttctcctgg

SEQ ID NO: 11805 - DNA, 989 bp, Artificial sequence
  DNA replication origin
ccgcgcttctctccctgtgggcggcggcccggcgcctggaaggtcaagatggaagaaatcctgaggaagctgcagaaggaggcgtccgggagcaagtacaaagccatcaaggagagctgcacctgggccctgggtaagcgtccggcacctgctcgccgcggcgggagggccgcgcggccggggctgaacccgcgcctccgcgcgtggggctttcgcggagcgtcggtcatgggtgccgttctggcgattgcgagagtcgcctcgggaaattgatgtgggatttgagagtcttggctcgggcgtggacatcagccgcctcccctccggtctctttcactctccgaaaccttcctcgggaaccgctgtcctccctgcctggcggcccccttctcctggtcccggcgctggggacgatgcttccccatcgccgagttaggcaggacccggagccggtgcgaatcctggggcctgacagcgaagcgcctctggggaaaagggaagttaaaccaacaaccccgatgtcgaatccttggcgagtggaaccaggaaggaaaggcttgtttaatttgattttcctgatagaggtcagcttgcttagtgttagctttcctggttattgcacatgaaaaataacatacgggcggggatcatgttacctctgcaattctgttgtggtctgcccttcagacaggtgggattttagggctgtgagctgtgctagcgttgaagtaagttccagggagcaaatttgtgtttctcatcagactcaggttgcagaactcagcagcggaaaaaaacggaaagacatttcagttaggcggggtttgggcaatcaaaatggtcaggatggtaatgcaaatagatcagaagcatactttgggtgatggtgatgctttttagaaaggaaaggccaagaagaagccagcgcagctagctctatgggctcctctctctgccttgctggagcctgatgtgatgcctcagttgcc

SEQ ID NO: 11806 - DNA, 1224 bp, Artificial sequence
  DNA replication origin
ggttgcacagaaacagcgccaccccctactgcccgcggggccacctgtgtgtgcctttccttcaaaaacaaaggcggggcgggggcggaagtgcctcaaaagaaggcgggccgaagcgaggtgcggctccctgtcgccgcggaggggcgggggcaggacgcgcaactccggccggagctgtccggggtcgtgagccggccccgccttggtggcggcgccccctcgcggtccagaggcagacgcatcgggtgggctcgggtctccagcccggccgggaggagggaccgggtctgcggagcggggactcggggcctcggcggggcgcgcacacgcaggcggggcggcccggggtgcggggcctctgcgcggctgaccaggctcccagagcgtcagcgccgcccatggccgagccgctccagccagaccccggggcggccgaggacgcggcggcccaagctgtggagacgccgggctggaaggccccggaggacgccggcccccaggtaggcgccgactcgggagcggaggggctgggcccgccttccggctgatttgcagtgaggccagcgggtcccatagagttaagtaaaaagtacagttttttaaatggtcccagtccctacccactatgctacgcaaacgagaaaccccggtcatttagctctaccctccccgctacccccagtgcaggtcccatctcaatttcttgtctttgcggggtggtggggcggggaggaactggttacgtcccagaacgcgcggtggaaccctccgaaccgagggggtgtaatagatgcttgtctgaaagtgtgaatcgagtccccagcgtgtggggttggggccgctgcggtccctaatcgcaaggaggggaacctcgtggaggggaacctcccagacctaaggagcggggacctcaggccggaccccggggcggtgcagcccctagacaggacggctccaggtcgacccgagatcatggcaccggtatttttgcatctcactcctaccctcttagaattgcttctcgaagttttctctgttccactttagcccggaagttatgagatccgacactatggaccagccaagtgggtcagcacgtccgtggagtctatggactgggattcagccatccagacgggctttacgaaactgaacagctacattcaaggcaaaaacgagaaaggtaaaagcagttttccttgtaattatgcatattgtgaa

SEQ ID NO: 11807 - DNA, 674 bp, Artificial sequence
  DNA replication origin
cacagggccaccacgctcagccgcactgccatggtcaccctgactcgagctcttggcaggcgtcggaagcgagcttgtcacagaggcaggctggctttcactctccatttcatttgtgctatttcgggatttcaggaaagcagatggctttaagtggtactgtggagcaactggagttcgttgttcctgagctgttcgttcagacaactgtgccgcctcagcgcctgagttctttctcacgggcctcaactgcaccatctgcaatgcttccgtggttatcaggggcatggggggcctgctggtctcctccttggtagaaggcggcctcaaggatccccgggaggattctggctggccagaatttgtgaaaggcggcctggtgtctttcatgaatttggggtcaagaggtggggcaggtgggggttccgaggaaggtaagagaggtgggggcaatggcaaggacacaggtgaatctggaagaatggggctcagtgcagggcggggaggagaaaggcaccaatcaggtggggagcagaaaggaatgagagcttctggcggcggaggggggaacacaggagagtgaggcagaggagagccctgggagcaatctgtgacaggaggtgggggaggaaggaaaggagacctgtctgcaggacaagggaatggaggagagg

SEQ ID NO: 11808 - DNA, 1260 bp, Artificial sequence
  DNA replication origin
cccgcgccgacgggaggcagactgagggatcccgcgccgccggcccgcccccgccatgcccttccaccagaggaccctggagcccgcgcggctgcgccggcccgaggcggcgggggccggggctgcgggcgcgccactcttccgctcgctggagcaggtcagctcgcatgccctgggctgcctgctggcgcagctggccgacctgtcgcgctgcgccggggacatcttcggcgagctcgagggccaggcggccgcgctgggccaccgcaccgccgcgctgcaccgccgcctcgacgccctgcaagccgccgctgcgcgcctggaccaccgccgagtgaaaatccgtgagtggccggcgggccgggggaggggaaccggcgggggaggcacccggagagctgctcccgcccgccccctggcggccctgggtcggcgcgggggccgcggagccccgcgatgtcggggtctccagtggggactgccggaccccagcgggaggctgggcaggtggcaggggcgcagagcgctctgtgactttcggactcctggagggtcttggctacctcgagagagtgggcgcggagggtgggaattggacagtccccttgtctgctccttctgtctgtctgtgtctgtctgtttgggagaccccggggcgctgtagacagaggagagccaagttcgtgggaaaactgtcacaggcaggtagcctgttggaaaagccaggggagaatataaatttgggcatatagtagttacagttttggagacttcaggacgatccgtttgtaaaaccctggggatctcggcgagcgttggggctgcttgccacctctcttcccgccgcctacctgtgttcttaccgacaagcaaaactatgcagactttaagggttttcccatttggcgcagaattttctttcttctcccagactgacccaccagctctttgtgattcagaagacgttgaccttgagttcaggctctgaatcccattcatctttgtccggcttcctccaaccctgaaagtcaagtctatgtcctgatatagtgatctctccggtgatccatttcatttcagcagcttaactggctccggtgaatgaagcaactggaatttcctgctggcccaaagcagagaaactttcagtgtgatgtctctgtggtttctcccttttaagtacgtgaacttggtcataatcctaagtgtaaagaataaattggagatggttgatggattgctgggtgggaggggagatgt

SEQ ID NO: 11809 - DNA, 1496 bp, Artificial sequence
  DNA replication origin
ttccctccctccggattggagagggaggaggaagcgagggaagtgccgccgacaccgggcgagagggaggggaggcgaaagaaaggaaagggggaggagaaaagggccggcccgggaaccacctgcggctcccgcggctgccgcgcccagcgcccgcagccagtggcggccccggcgcctcagcgcaccctgtcggggcgggtgcgggcgcacagtcccgggacgcccacgtcgccgccccaactccccttggcagcccccgggcggtggggcagagccctcgcccgccccccgggccggggtgcagcgcagtgcgggcgccgggagggcggaggcgccaggacggccgcggccagctccgctcgctctgctcacctgcgcccctgcccacggcgctccgcagtcaggagcgccccgccccgcggggaacgccccgggcccctcggggtccccctgctctctcctacttcccttctggaaggtggccaacacttctgggccgcccgggtggacctcaaatagaacgtctttaaatgtccggtggccaagggttctgtagccgactaggagtcagcgtccgactcggaacaactcaagacctcttttcagggggcgtccagtgagtttttttcagcaaggtgactccccctgtggctgcctgctactacagctggaaaggtccaagctgaaatgtgactaatctgagtttcttccaccaagcatgttagttaggggtggaggactagaacctagaaccctgaattcgagcctggaagatatgtaagccacatgctattgagatcgtggtcatgggacacccgctaacacaaaccttctggtaggaagtttttgagaagactgggtccaatatccccaagctaaaatcccactggcccatcgctgtgtttgctcagaaaaggaatctgggttctttggtttctgctttccagttgaccctggttgctcctctgttttacggcattttgggagtcggtctcccagagcagcgctgattgtaatgagaagcgcgttccctctctgggggacaggagcagtgggagaaaaatgggcctgggaaagagctcctccaaataaaacttattagacagatacgggttatggtgttggtggtggtggtggtggtgttttggtctttatcctgttgtacagcgcctcattttttacaatgtgggccagtaactatttcgtatcacctactctgaccaccttcagggttgttatgaggctcaaaggaacggctgctgtgaaaaaacatgctttgcaatttatgaagcactggataaacatcaggaacggtataaaagcatgctgcttactcaagaaatactagttgagtgcctgtgtgttgggcactggctagagataaggtaatgtgcaaagctggctctgtccctgccatcatgagactctcgtgtagtggaccatgcataacatttttaaattatatacaatatggccgggcgccgtggctcacg

SEQ ID NO: 11810 - DNA, 921 bp, Artificial sequence
  DNA replication origin
ggctgcggctgcgactacggctccggctccggctccggctccggccgcggggagggtgcagagaaagaggcgggggccgcggaggcgcgaggcactggcggactccgcccccgccgcgggttcgagtctccccggctccctgccgattcccccagacttcccgcctcggcttccccttccgtccacgcctccggagcggcagcgcttcccggaaagttgtggggcttcgaacctaaagtttcgggggatctgggctgagcgtggccgccgctccgcctccctccgccgccatttacagtgccccggcccggccccgacgcgcccgcaccaacagtgacagcggcggccgcgctccagacccggatgtgaggccgggaggagagagcgcgagagggagagagaaacacccaccgggctggcttggccgctcccgggagagggaggaggccgcagcgccccctggtggccggcgcccggcggcgggatgaccgagccgccctctgcgcggagatctcagcagcaagacccccggaaaggggggtgcagtgggaaacagccggcagctcattaagaccgagataactaagatccgggttgcagtttttatgtttcgcagtttctggtcctaagcgtctgaataattggattgaaaggggagccttgttcaggttattatcattctatctgtaccttttcggtacagatgaagataaatgcagtatttccatctgttctgaagggctatgaacatccgggctatgaacatcctggctatccgggaagcctccacgtagacaccaacattgaggcttcatctcactcgtgcttcaagccatgtttacctgagaaacaaaatgtgctgaatagaggggaaaactggcaaagttgtcctctttgttcaccaggtcattccggtcactg

SEQ ID NO: 11811 - DNA, 998 bp, Artificial sequence
  DNA replication origin
cccaacccgggcgacgaaaacggaccctgccccgggctccacgagcccctggtgtcccctcacgactctgcaccccctgatctggagcgcacagagccgcacccacctccggcgctgcagagtccactgccctgaggccaccacgttcctcggggcagcctctcctctcgcccccagcccttccccacccagctctgcagaactggctcctgaaccaccgccaagtgcaaagccgacacgtcgcaccgcggtaaaaatcgttccatttctgccggcttcccagtccgcccccggccggcgaaacgtcacgtgagccgagtgcggaagtcgacccgagaggtgggggcgtgggcggcgcgcgccccacgggaccccaacccgcgaggtctcggcccagccggtcgcagcttccgcgcgccctgagccccctcccggccccctcctgacccgactctcaccgcagcccgcggtgcccggcggcgcaccacggacacccagtccatccctgctacctaagccacatctgcccgggcgctcacgcacctctctgcgcggttttccttcccgccggagaactggcgccgcgtgggtctggacccggttaccttcttcagtgcactggggagggtgaggccaaggaaggaagtggctgaggcaaagagaaagacggctgtggaggaggaggagcagggtagggggaaaagtaagtgtttctgcgctcaagaaaggggccgcccacactcccagggacaagcctatgaggaggaaactcaggggaggagacgtccaagaaaggggctgactgcagacaggtgaagcgccctgggctcctaggaaaacgggcccagagcctggattacctcacttttccaccgtgctactcagagccaaggatcccaggatctgcatctgatcctgggcgtcgatttcctgatggatttctctcccaacgtaagaaacaaagcgccctcaaattgctgaaggctgctagaaagaac

SEQ ID NO: 11812 - DNA, 1477 bp, Artificial sequence
  DNA replication origin
ttcttcgctccttcctcccacctccagcaacatacttcagacttagctctcattgaataatgagcatcaaaggggaaattcatctattatatatagtacgcatacctgcattatagtaagcagatgtacgttcatccaattttaagcatgaaaggcaaccagcgtttctttataattaattacacatcaggctccttatctacgttaattcatgtagttctaagaaccttgcaaggcatttatttacctctattttaaggataacgaaacaggggttaatgccccacaattaaatgctgtctctaccacatcgtggtggctgtttccccgcttcctcttcctcttttgccattatgcaaatacactaaatataatagtgagtggtatttgtatgaaacgtgacatgctgagctcttaccaaggcagaacacttacaaagcaagaaaggctccctgcccagaccaccataaataggaaaataacaggtttaaaaacaattgctagcatacataatttgacgttttatttatttattatttaggaaggagagggacaaagggggaaaaatacctattgtgacacaatcctttaaagacccatggccttttataataaggacagaatcccaggactgcagagagcaagatgaagaacaatgaagggggcggagggtgaagagaggttgatgggtataaacacagaagaaataagacctggtgttgcattgatcagtggggtgactatagttcacattaatggattgtacacttccaaatggctaaaagcaagttaagttgaatgttcctagcataaagaagagataaatatttagggtgatggatataccaattaccctgatttggttatacgaatgtaacacattctcacgagtaccgtgaaactatgtctaagaaaaaaaaaaagaaaagaacaatgaggagaggtgagaagcagagcaagtctaaagggaagagcttaatggtgagcggctggaccagaagacaggaaaaggctccagggaaggcgaggtagatgacggccaggcactctaattgtcgcagaatcgatttcggctttgtgcgtgggaaacacaaaggaagcggaaagtcggaggactgggcagaacccgaaactcaccaccaatacacactttagaatgtatttaaggaccctcagggcattgttatttttcaaaagtttggaggcaatgcatggagattttctaatatccaaggaaataaagcctactggaataggtatgtccggaatcaggaaccaactttacacactcgggctgggcacgttttcccagcccttcttcgcaatcgcggacaagcagctggtgcgggtcaaagggtgactgggctccttactccctccggtctggggcgcgctcactccatatttggccattctgctaccagcttggggttctgcctggtagaggtcccctaaccccgtgccctgcagcccatca

SEQ ID NO: 11813 - DNA, 1372 bp, Artificial sequence
  DNA replication origin
cggatcccagaggcacggccgttcccggccctgcgtgaagccggctccgggaaagaacggagggcgcgagccggcggttccctcggctcccgtctagccgcacggcccgtgccgcgccatcctggccgccgcgccctctccggcttcctggagccggcacgcggccacccgaggctcgcagccgcgcgggcgccgcgggcccggggcgcaagcgagacgctcccgagccggagggaaaaggcgggtctccggcttgttttgattcggctgcactgacacgctctgggcccgccccctcccgtgacgacactggggattcggcctggccgcgcccaccaggtgacctcacggctgacgggaccgcccgcgtgacgtcacgccccgcgcggggcctgcccacctcgagtgacgtcatccaggcgtccccacccgggcctcctggactcccgggcgttcatgagctgccctgcttgacttgctccacccgccagtgcagtggcatgtggagttcttcggtggcctcctggccttaatgtaattgaggcttagaacagtatggtctggaaaaataagctgtgactagagcaagaatggaaaacaaaagattttggattaataactcattcaaaggctatgcctttcagtaacagtaattaaagaaacaggggaccgggcgcggtggcttatgcctgtaatcccagcactttgggaggccgaggcgggtgtatcacgaggtcaagagatcgagaccatcctggccaacgtggtgaaaccctgtctctactaaaaatacaaaaaaaaattagctgggcgtggtggcgtgcgcctgtagtcccagaaactcgggaagctgaggcaggagaatcacttgaacctgggatccgagatcgcgccactgcactccagcttgagcaacagagcgagactctgtctcaaaaaaaaaaaaaaaaaaagaaaagaaagaaagaaacagggtagagttcccagacaatggggatgaacaccagggtcctgaatgggaagccttcacagtctggtggtgaaaacaattcactcaaacaagacccatcatccagggatgtaactagatgttgcctggactctgaagcagtccctgcttggggggaacccatccctatgcatagggctgagttgtcctgaaagatagtgaaagataggtagccaggttatgagcagtaggagattaggtgacaccagtgaagacaggcaatatgagggcaggggacccctgggaagagctccccttgatctctttctgcaattctattctaccttttcggccaactccttcccttccttcaggtctcagctcaaatacatcacttccacagagaccttcccaggagagctg

SEQ ID NO: 11814 - DNA, 1487 bp, Artificial sequence
  DNA replication origin
gattttccccctgcctcgggggtggctgagccaacctcgcgtttctgggccgggaagaaaccagagtcggggggcgacggggcgactgggcggcccccgggccccgcagcctctgcagcacgtgccgcgggcggcggggacgcggctccgggacccggtccagggtgttcgcggtgttccggaatccgcgtcttggcgccgcccgccctggaggctctcgctccgcctttccgaaatgcctatattaactgtggccaaagccctaagaaacacagctcattgttggcagctgccgggcggtcctgccgagctgtgagggcaacggaggggaaataaaagggaacggctccgaatctgccccagcggccgctgcgagacctcggcgccgacatcgcgacagcgaagcgctttgcacgccaggaaggtcccctctatgtgctgctgagccggtcctggacgcgacgagcccgccctcggtcttcggagcagaaatcgcaaaaacggaaggtaagcgcgacgggcgaagctggctggggctcttgccagcccagtcctccgagggcagggtttgcccggaggaagagcgtgaggcgaagctggggaataacaacaggatgtgcaacaacaggatgaggagggctgatttaatgcctgaagttcgcagcagggctacggggcacttcctttattaggccacttcggggagcaaagggggtgtgggctcgggtccccccgcccgatcgcaggggaaggggctgtttgtgcagcgtccggctgtgttatgagtggtagctcttccgtggtggctagcccgggtgcacaggctgttagtgggatcttgggggtggtggttcgcagccgacgtgcgcccgggaatcctggggggcagaggcgagcaaaagtggggtgcgctgtggtgggcgacacgtgtggcgcgggtctcattatctgcccttttcacttccaggactggaaatggcagaccatatgatggccatgaaccacgggcgcttccccgacggcaccaatgggctgcaccatcaccctgcccaccgcatgggcatggggcagttcccgagcccccatcaccaccagcagcagcagccccagcacgccttcaacgccctaatgggcgagcacatacactacggcgcgggcaacatgaatgccacgagcggcatcaggcatgcgatggggccggggactgtgaacggagggcaccccccgagcgcgctggcccccgcggccaggtttaacaactcccagttcatgggtcccccggtggccagccagggaggctccctgccggccagcatgcagctgcagaagctcaacaaccagtatttcaaccatcacccctacccccacaaccactacatgccggatttgcaccctgctgcaggccaccagatgaacgggacaaaccagcacttccgagattgcaaccccaagcacagcggcggcagcagcacccccggcggctcggg

SEQ ID NO: 11815 - DNA, 911 bp, Artificial sequence
  DNA replication origin
gcagatgtagcagcacagcagaatgcacctgcgcctgctcaggtggagtatcagtgggagtgagattgtggcattcctgcatgtactcatgctggtggtggtggcagcatggtagggtggggctttggcagatgtgaggctgctggcttcagtgcatgtgttcacatcagcagtggtggctacaggagggggcagggctgacagtgttcatgtgcatgatggcagcagtggtggtgtcagcatggggcaggcagagttgctggcatccatgagtatgtttgcatttgtggccgtaatggcatgggggagcagggttgctggtatatatgcacacatttacactggcaatgggagactcagctgggtgcctccatgtcagtgggagggggtggtggggggtgctcatgctggcaacagtggcactgtggggtgtgtatgcacatgtgtaccagcaggagagggtaggtaaaatccccctgcacacacacactgggaaagcactggggattggccatgggcgagtgtgtaccagcaaaatggtgcaggagaagttgcctttgggagagggtgcaggtaggtttgtgtgcatggcaggggccactctgctgtagctctccaatggtcaggcatggtctactggtgaaggagctatgatgagggctcctaggaaagcacgctggttcagcatctgaggctgtactgcaagttggcatggtcaagctgggaccctagaagaggccaacagagaggggtgtgctcagattagaggctgccctcatctcacaggcaagatcaccttgctctgcccaagtccaacagtaacgccaaggctaaagtctcctagaagagcatggtgagccttgggaggtaggcatccttgactgtgctccactgcagacattcctgcatca

SEQ ID NO: 11816 - DNA, 911 bp, Artificial sequence
  DNA replication origin
ggatgtgaggagcccctctgcccagccgcccagtctgggaagaggagcacctcttcccggccgccatcccgtctaggaagtgaggagcgtctctgcccagccgcccatcgtctgagatgtggggagcgcctctgccccaccgccccatctgggatgtgaggagtgcctctgcccggccgcgaccccatctgggaggtgaggagcgtctctgcccgccacccagtctgagaagtgaagagcccctccacccggcagccgccccgtctgtgaagtgaggagcccctccacctggcagccgccccatctgggaagtgaggagcatctccgcccagcagccgccccgtccgggagggaggtggggggcagcccccgcccggccagccgccccatccgggaggtggggggtgcctctgcccggccgccccatctgggaagtgaggagcccctctgcccagcagccaccctgtctgggaggtgtacccaacagctcattgagaacgggccatgatgacgatggcagttttgtcgagtagaaaagggtgaaatgtggggaaaagatagagaagtcggatggttgctgtgtctgtttagagggaagtagacgtaggagactccattttgttctgtgctaagaagaattcttctgtcttgggatgctgttgatctataaccttacccccaaccccgtgctctctgaaacatgtgctgtgtacactcagggttaaatggattaagggcagtgcaagatgtgctttgttaaacagatgcttgaaggcagcttgctccttaagagtcatcaccactccctaatctcaagtacccagggacacaaacactgcagaaggctgcagggtcctctgcctaggaaaaccagagacccttgttgacttgtttatctgctgaccttccct

SEQ ID NO: 11817 - DNA, 1183 bp, Artificial sequence
  DNA replication origin
ggggtaaggttatagatcaacagcatcccaagacagaagaattcttcttagcacagaacaaaatggagtctcctacgtctacttccctctaaacagacacagcaaccatccgacttctctatcttttccccacatttcacccttttctactcgacaaaactgccatcgtcatcatggcccgttctcaatgagctgttgggtacacctcccagacagggtggctgctgggcagaggggctcctcacttcccagatggggcggccgggcagaggcaccccccacctcccggatggggcggctggccgggcgggggctgccccccacctccctcccggacggggcggctgctgggcggagatgctcctcacttcccagatggggcggctgccaggtggaggggctcctcacttcacagacggggcggctgccgggtggaggggctcttcacttctcagactgggtggcgggcagagacgctcctcacctcccagatggggtcgcggccgggcagaggcactcctcacatcccagatggggcggtggggcagaggcgctccccacatctcagacgatgggcggctgggcagagacgctcctcacttcctagacgggatggcggccgggaagaggtgctcctcttcccagactgggcggctgggcagaggggctcctcacatcccagacgatgggcagccaggcagagacgctcctcagttcccagacggggtggcggctgggcagaggctgcaatctcggcactttgggagttcaaggcaggcggctaggaggtggaggttgtagcgagccatgatcacgccactgtactccagcctgggcaacattgagcactgagtgaatgagactccgtctgcaatcccggcacctctggaggccgaggctggcagatcactcgcggttaggagctggagaccagcccagccaacacagcaaaaccccgtctccaccaaaaaaatatgaaaaccagtcaggcgtggcggcgcgcgcctgcaatcccaggcactcggcaggctgaggcaggagaatcaggcagggaggttgcagtgagctgagatggtggcagtacagtccagcttcggctcggcatcagagggagaccgtggagagagagggagagggagaccgtggggagagggagaccgtggggagagggagagggagaccg

SEQ ID NO: 11818 - DNA, 1087 bp, Artificial sequence
  DNA replication origin
taaacgctatctgatttgggataaagaaaaaggagcattaaccttgactatgcctttagctctagccacttttttaagagtaaattgctgggcaggagggggagggctagtcacggaaggaaactgtaagccggaccaggtgtgaggaggggaggtgataaaaaggatggaggagcagaggctgaggaagaattgggacctagctcagcctggcgaggagcagcctggggaggaagggaggggtcagatgggtctgtagaaaaggaagattagaaagactcagcgacgcttggggttggtattgaggggacaggtgggtgggaaagaaggaagatttgggatgagttgcactgggcacagagactaggaagggactgatgtataaaaggatgcctggacgtcgggcacctcagaccgtttgcctattttatgacaagaattatttagattttgcaggatggaaaaattcaaagtgccattttctggctatttggaactactgtcaagtttgtattggggtcaagcggcattgcagaagaaaataaggcatttaggttttaggtcaggtgtgagttgaagaggttttaagtttttgagaacacaggccaagggagtagaaggaggaatggagggtggaaggttgcccatagtgaaggaaggaagcctagagaaaagagggagtagagaaacggagggaaggggttcgggggttctcaccttccagaaaagtgggaaagggttggggtgcagagataagaggttggggtgcggaaataagggattggggcacagagataagaggttggggcatggaaataagggattggggtgcagagataagaggttggggtgtggaaataagggattggggcacagagataagaggttggggcttggaaataagggattggggcacagagataagaggttggggcttggaaataagggattggggcacagagataagaggttggggcgtggaaataagggattgggggttcttgccctgtagaaaagtgggacttgccgctaagggtgaaggagaaggggttgaggggtacttgcccctctcccagaaaagcagaga

SEQ ID NO: 11819 - DNA, 1146 bp, Artificial sequence
  DNA replication origin
ctctcctgctcaaagcctttcagtgactccccatttcctacccagttccaaactccatgtctatcacttagggccctccagaatctggtttactgtccatccagcctaatcttccactacatctactccaacaagctaggctgtagaaagatggcttagtcattattctcaagcataagaggcatctttatgcctttgctcaggccatgagcttggcttggcagactttccttatgatctgtatcatgatctattaaaacttacctagacataagacccaactcatatgccagctgtttcatgaaacttgatacacaagaaatgctctgtaaatatgtctgtgggtgaatggatggaaggaaggagggagggagggatgaaggaagggacggatggaagagatagaggcagggatggatggaaggagagatggagggatagatgggtggacagaggcaaggagggagggagagatgaagaaagggatggagggaagagagagatgtgggagggatggatggatggatagatggagggatgaatagacagagggaaggagggagggagggatgaagaaagggatggatggaagagagagatgggggagggatggacggatggatagatggagggatggacagatagagggaagtagggagggagggatagagggatggagagaagaaaggagggctagatggatagaaggatggatgaatagaaggatggatggagggatggaggaaaggatgggggagggatgaatggatgggggatagaggcagggagggaggaaagtatggaaggatgaatggatggagggaggaagggaatgctggatgaagggataaatggatggatggtggaggacctcataacgaatctctcagctggtataatcattctcctgtcagtatgccatagtacatatttgttcctattttaaaacgttgcatgctctcttcttccattaacatttgaatacagctcttctcttccttattaaatgaaaggctcctgaaggctgaattatattcatctttgtatcccacacaaatccgagtacaaggtctttcacagaatacgtgcttaagatatcacagtatcagtagtatggtatgcccagcagcaggcagaaaacatgca

SEQ ID NO: 11820 - DNA, 849 bp, Artificial sequence
  DNA replication origin
ctgccgcggcggcactgccggctgctatcaaagcagatgtgctgctgctgctcctcctcctctttcacctcctttcacccccaccccccgcctttccattctgtgcctctggtactggtaggggtgagacaggaaaacattgctctgggtgtgtgcgtgtgtgtgtgtgtgtgtgggtgtgtgggggagggggtgctgatgtgcatgtgtggggtctgtcgtatttggtggggggggggggtggactccagatccgctctgctaccccagctgttatcacagatcggtgcgctttatacgcatgtgcctcccgcgttctgtccctcttacataacacatccagtgcagcagaggacatgagaaaatgcgaccccaaccctccaagcccaaattgggtgaggggatagaaggtcaggaagcgtccctgggtgttgtccttcagggacttggttcccagtgggggaaaggaagaagggaaggagggtttcttcaagtggctcctctcatctctgacttaaaagcatctaactaaaaaggactgcaggcactagtcttccctaacgggaaagcttgtaactagctacaccaagggaacgggggcactttaacctcgggagtgcggagaagagagagggtccttaatcaagacacttggaggagagaagcaataatgtgtgggcggcggatggggggcgctggggatgacttcgaggagaccagaggaatctcttgataataggtttcactggaggccttaggacacctgtaatggcttagcattcacacaggaagttgtgtgtgcaactgacattgcaaaacccttattctctgcagagttatttaggccta

SEQ ID NO: 11821 - DNA, 1090 bp, Artificial sequence
  DNA replication origin
agggtcggagggggcggggatgggggagaccgcgggaggggtgtcgggcgcgtggggaaatgcggggaataccctggccgcggatctatgcagatgaggggaggctgctttgcgtaatgtcctggggggagggggccgcgcgggagcgctggaggcaggaatgtgcctgcttactaatgagcgacgtgcaccggcgcgcacggcccggccaccgctgcggctgcggcggccggcggcggcccgttgtcaggtagcgggggagggggccgcggcgcgcggcgcaggcggccgggcgggctggcggcgcgaggcccgggccgccggcctgcggccgagcgagcgcagcgaaggcgctggctctgggcatttcagtgactccctttacctcccgggcaaggaaggaaggaaggaaggagcgaaggaaggaagcgaggaaggaggggactgtctcgatggaaggttcaggcggaggcgccctcgccttgcgggtgcaccggctgcagagcggctctggccgctgccggctggacccgggcgcgtggagacgggtgggggcggtttgcatgcgtgtttgtctgtccgtctggcgggggatcgggaagggacatgtgtgtttgggctgtgcactgtggggaactgggtctgcgcctttatgtctgttccctgaagtgggtggaacgttggcccgttccgggaatgttccatgacgtggtgcagccacaggaagggggttaacgaggggctctctgccgcggcggcactgccggctgctatcaaagcagatgtgctgctgctgctcctcctcctctttcacctcctttcacccccaccccccgcctttccattctgtgcctctggtactggtaggggtgagacaggaaaacattgctctgggtgtgtgcgtgtgtgtgtgtgtgtgtgggtgtgtgggggagggggtgctgatgtgcatgtgtggggtctgtcgtatttggtggggggggggggtggactccagatccgctctgctaccccagctgttatcacagatcggtgcgctttatacgcatgtgcctcccgcgttctgtccctcttacataacacatccagt

SEQ ID NO: 11822 - DNA, 926 bp, Artificial sequence
  DNA replication origin
agggagggcgggcgcggagggagggaaaagatcccgaccgccagcccaggctcctcttgcctttatttatttttctgacactgtacggagatgggcccggggcaggggccgccgggctcaggcgggagccgcgaggcccgggccgcagctgtctgcgtgcgggagccgcagcggccgcctcccctcccgggctgtggacgcaccgggttattcctggcagcgcctccccgaacagaagttactaggaggagtgcgcggcgagggcggacggggggagaggcggagggagggagggaggaagagggagagactcagccaacgacgtcatcggatcccccagcgcgtcccagggagggaggctgaaccagaaaaaccagtctggagccagtgagcgagagagggatgtgcggcgcgcggggcgacgggggagggaggcggtcgggagggcagggccgggccccacggctgccgctgcgggcggggagatcgcggccgcgcactcgctcggtcggagcggggaactccccggagagctggtctctacttgtcatgcaaaaaaacttgggcatctctaggagcctgagaatttcctttaaggatgtggaaacgtcctccgtccccaccccttccccatttcccagagaatcgttgtctgccttcctgacgaacggaattgtataattagtagtgcccttagatttggaaccagtactccggatccctggcctctcctcgccccctgcctctactcacaattatgttatcggtcaagaaaagcaaaatcagactgtggctcccggctgggtttctggagctttgtagggttttactagcactttccgtgcccctgcgggcgcgcgaactattcacgtgctcgaaacgcccggattaccttccctgaggtcactcaccagggtgcccccggc

SEQ ID NO: 11823 - DNA, 1400 bp, Artificial sequence
  DNA replication origin
cgagaggtcgctctgtgagcggccgcgggggctcgggtccccgggaagccagcgcagggcaggcgccgccggcggggcgggcgcctcgggctcggggactgggaccgccgccgcctgcccggccggatcgaccggggacgccgcggggcgccagcccgcctcggccatcggctcccggcggcggggccggagcaccgggtggggccggcgccgagggctgcgctgcccgctgctgcccggctctgccccgcgcgccgcgacccggaggcagcgagaagggcggggaggtggacgccgggcgccgaggagccggtgcggagggcgggaggaggaagaggacagaaaagtttgcacaggaaggagccgcctacagccggctctcgctccagcgggcgaaagctgcagggctcggagctgggccgccctcggtgcccgcgaacctgcccggctgctcctcccccaagccccgggcactggcccccggcaggatggcagcagggggtcccctccgcgaagctctgttcacccagcaatccggccgcagaaaagccgagtttgggcttctggagctgggatgcaaggtcagagctaacgatatcatttccattgtggtgggtgggggtgccatgtacacatacgtgagctgccctatgatggagcaagaatgatcatacccagttaacagataggaaactccggcgcaaaaatgcattgcacttgccgggtggattaggggcagattctggagtcccttgtgaagtgaagcctaatgcccttccccatccgcacccacaccccttgccctcaaagcccatctctacctctcacggttgcccacatccctgggtatctgtctgctgggtgtagggagcaaaaaatagcttccctccacccttctaggttctttggctggcctatgaattaaactgccataaggcagattaacaggacaaagaaaacccattttaattaccaacgttcacatgggagtttcacaaaatatgaggctcaaagggtcagatgattgaagcctgtatagcgtcctgagttacagaaaagaacaggatcttggaatttggggggcgggcaggtgacacaagttatgggagggtcggggaggaagtgtataaagaataaaggttgtctcgtgcaaattttaaaaagctgatcaggtaataaggagttgttttctagcggaagcataggtgttaatctgtctgggcctgctgtgatcccagatttttccattcctgacagatgaattcctattagaggatctgcctttttttggggaggggaaggagtttcactcttgtggcccagtctggagtgcaatggcttgatctcggctcactgcaacctctgcctcctgggttcaagtgattctcctgcctcaccct

SEQ ID NO: 11824 - DNA, 1794 bp, Artificial sequence
  DNA replication origin
ctccggccccgccgccgggagccgatggccgaggcgggctggcgccccgcggcgtccccggtcgatccggccgggcaggcggcggcggtcccagtccccgagcccgaggcgcccgccccgccggcggcgcctgccctgcgctggcttcccggggacccgagcccccgcggccgctcacagagcgacctctcgtcgtcctcgagcaggggccgcccgctccgggtccacatctccggctcaggtaagagcggctcggggcgcgggccggggagggccggccgcgggcaggtggccgcgagggcgacgcggccaacccggggcgcccgcgggcactggcccggcaggctggcggcggggtgggggtgggggacaggggagggcggaggctgaactccccacactgccgcctcctcggccgcccgggctcggcgaccctaggcggaagatgctaaaagcaggcgacggcttggtgcgccttgcggggcgagtgtgcagcctgggttggggtagggagcgctccctctcggctgcacggcgccaggcagcaccgcagcttggcttccgaggcttttccatcagaaagaggaacattctcggtcttcggcgcgactttggtccctcggaagggtgcggttccctcactttgcgggctgggaccagggcaggtcttgggaggcttcccaactaactgcttatggttctgaaataaagacgccttttgcgggttgctggtaagaggacccgggatatgagtttttcctccttgcaaaaacccatgaggttaatgggggagagcaggggagagtttggcgggctgtttgtgcctctcatcctttaacatgttttgaaaaagcctcggccaggagcggtggctcacgcctgtaattccagagctttgggaggcccaaggccggccgatcacttgaggtcaaaagttcgagaccggcctggccaacatggtcaggaaacttcgtccctactaaaaatacaaaaaattagccgccgaggcggcgcatgcctgtagtcctagctactcaggaggctgaggcaggagaatcgcttgaacctgggaggcagaggttgcaccactgcactccagcctgaatgaaaaagtgagactccgtcttacacacacacacacacacacaaacacacaaaagcctcaagctagcccctctgcggtagcaccggcccatgtgttctcagaggctgccctgtgccccgtgcaccgggaccgacgaaatcaggaactcagctaaggccgatgctgccggccgagttgtgtgacgttgggcaaatcacttaaccttgtctctcctatctcagtattcagagtgggaatcatagtatggtaccaccacattgggaggttatgtggattaagtaatcattttaaactgcttttgaacaaagcattagcctaagaattgtaggactgttttttaaaagtccaccagatgcgtcaagtttccaccagttgtctgatgtgcaatctttgtaggatgcatgggagctgggaaattagaaatgaagctagctagcatcaaaaactacccatagcggcaaaagccctgccggggcgtgaacgtgcactgtaccagctaccactgccctggttttcaggctctgtgctccgggatcaggccttctttgggttctaactcaacctcagctaaagctgagcttcctgttcaaaaaagcacatttccatgcctctgactccacttcagctggctaactctctcaccatagccttctgtcttcttattcttgtcatattgtttttgccgccca

SEQ ID NO: 11825 - DNA, 1674 bp, Artificial sequence
  DNA replication origin
gacccgccggccggagctgacccagtgggccacgggctccggactccagaactttccaagcgggggaaacttggcggcgggtaggtaggaaaggcaggtgaggcaggggcgagcgagagaactggctggcagcggggcggggagccgggggcgcggcgttaaggtgggcgcgtggggcgggggctccaacccgtgccgcaggtgcccacgtgccgcgcggagtccgcgggccaggcgaggtagcctggccgaggctcctgcctgcgtcctgccggggatggcggtcggtgcttgggacaccggcggccacctttgtgcggcttggggcgcgcttcccttttctccgtcgtctgcagctcttcgcttctgcgctgggcggagggcgggccgggtgacgtgggagctgaacagccgccacctagcgcccgccccgccggccactgtccccgcgcggaggcaggtcgccgcctcccgggtcctgtgctctccgaggctgggggcggggctgtctgcgcagacggcggggtgatcattgctgaaccaccccaacgggagaatctcaagtgccagcttagcccgtctcccagagactgagttaatgggaacaaagtgaccgagttgcggcggggaggtccccgcagactccgggagaaaagagacctgggccgtggcgtcaccccggattaccggcggcgcgcgggataatttcgagagcaggactcccctgatgggggcgggcaggacacgccccgccacggtgggcgtgggcactttggcgggtgcacagccgtgttgggtttgtagggcccctgctgtgtcgaggacagagatacccctggggcttcccgagtgttcatgggtctaggagcgcgggacctgttcattttattgaaaaagccaagtgaagtgacaactatggcagttattcaagggtcgtggcattgagcatctgtgtggccaccgaaagaacagaactccgatgtattcacggaataaataatgatatgacagggtttatgttttgtgcgtcgctgcctaacccgaggcgcctcccagaagcaccaggagagcttttcagaacacacctattgggcccaccccagatgtcctgaatcacgtgaggggataaagccctggcgtgagactttttgtaaaagctgccccggggatatggctggggacgcctagttaggcatcaggaaggagaagaactgggttccactcatgtgaccttaaacacattttcagcccagttttatcatctgtaaagtggccccagagaacttgtaatagaggtgaaatagggtgtatggaagtgtgtggaaaggggagaaattggaatactacaaagttccggtgcaggttgcaacaaataaattcattctttggttctgcaagtgatctttgggctgagtgagaggagtgtggcaggatacccttgccacgggaaggaaaggagggctggttttcaggtgatcaactctgtgacaacgttggtgtaaactgtaactcagaaaattgtcagcaggatgaaaagtgagccagctccagccggtggaggatggtttgaaaaaggcaccatttctgcttcctcttctcaagaaccaaaggctttagattattttcctgcaagcaaattaagagccagtaatcgccaatgtgtcctgccctatg

SEQ ID NO: 11826 - DNA, 858 bp, Artificial sequence
  DNA replication origin
ccgtctgggaggtgaggagcgtctctgcccggccgccccgtctgagaagtgaggagaccctctgcctggcaaccgccccatctgagaagggaggagcccctccgcccggcagccgccccatctgagaagtgaggagcccctctgcccggcagccaccccgtctgggaagtgaggagaccctctgcctggcaaccgccccgtctgagaagtgaggagcccctccgcccggcagccaccccgtctgggaagtgaggagcgtctccgcccggcagccaccccgtccgggagggaggtgggggtcagcccccgccaggccagccgccccgtccgggagggaggtggggggttcagccccccacccggccagccgccccgtccgggaggtgaggggcgcctctgcctggccgcccctactgggaagtgaggagcccctctgcccggccaccaccccgtctgggaggtgtacccaacagctcattgagaacgggccatgatgacaatggcggttttgtggaatagaaaggggggaaaggtggggaaaagattgagaaatcggatggttgccgtgtctgtgtagaaagaaggagacatgggagacttttcattttgttctgtactaagaaaaattcttctgccttgggatcctgttgatctgtgaccttgcccccaaccctgtgctctctgaaacatgtgctgtgtccactcagggttaaatggattaagggcggtgcaagatgtgctttgttaaacagatgctagaaggcagcatgctcgttaagagtcatcaccactccctaatctcaaggacccagggacacaaacactgcggaaggccgcagggtcctctgcctaggaaaa

SEQ ID NO: 11827 - DNA, 1418 bp, Artificial sequence
  DNA replication origin
tctagcatctgtttaacaaagcacatcttgcaccgcccttaatccatttaaccctgagtggacacagcacatgtttcagagagcacagggttgggggcaaggtcacagatcaacaggatcccaaggcagaagaatttttcttagtacagaacaaaatgaaaagtctcccatgtctccttctttctacacagacacggcaaccatccgatttctcaatcttttccccacctttcccccctttctattccacaaaaccgccattgtcatcatggcccgttctcaatgagctgttgggtacacctcccagacggggtggtggccgggcagaggggctcctcacttcccagtaggggcggccaggcagaggcgcccctcacctcccggacggggcggctggccgggtggggggctgaaccccccacctccctcccggacggggcggctggcctggcgggggctgacccccacctccctcccggacggggtggctgccgggcggagacgctcctcacttcccagacggggtggctgccgggcggaggggctcctcacttctcagacggggcggttgccaggcagagggtctcctcacttcccagacggggtggctgccgggcagaggggctcctcacttctcagatggggcggctgccgggcggaggggctcctcccttctcagatggggcggttgccaggcagagggtctcctcacttctcagacggggcggccgggcagagacgctcctcacctcccagacggggtcgcggccgggcagaggcactcctcacatcccagatggggtggcggggcagaggcgctccccacatctcagaagatgggcagtcgggcagagatgctcctcacttcctagatgggatggcggccgggaagaggtgctcctcacttcctagatgggatggcggccgggcagagacgctcctcactttccagactgggcagccaggcagaggggctcctcacatcccagacgatgggcggccaggcagagacgctcctcacttcccagacggggtggcagccgggcagaggctgcagtctcggcactttgggaggccaaggcaggcggctgggatgtggaggttgtagcgagccgagatcacgccactgcactccagcctgggcaccattgagcgctgagtgaactagactccgtctgcaatcccggcacctcgggaggccgaggctggcggatcactcgcggtcaggagctggagaccagcccggccaacacagcgaaaccccgtctccaccaaaaaaatacgaaaaccagtcaggcgtggtggcgcgcacctgcaattgcaggcactcggcaggctgaggcaggagaatcaggcagggaggttgcagtgagccgagatggcagcagtacagtccagcttcggctcggcatcagagg

SEQ ID NO: 11828 - DNA, 1340 bp, Artificial sequence
  DNA replication origin
agatttccggcatgtgtagcaagcccctgggggaggaggttctggaggaacgcctggctgctgcagttcaggcgtttggaagttcttgtgtgctggagatgtggctggggtttgtctcacagtggaggcaaggaattgcaacttttttctgttattgtacaccttgaagatggggttaattaaatcccgttgtggggtttgagggccagaatttaatttttggagttttatttaatgttgggaacagattgggtaataaaatgtattttgagactaagacggccttttgaccttttaggatctagggctgtaaagcgtctcagggttgccgaatgagccatgaactgggctgggtttttatatttgatgaaaaagagcctaaacgcttctgatttgggataaagaaaaaggagcattaaccttgactatgcctttggctccagccacctttttgagtaaattgctgggcaggtgggggagggctagtcacggaacaaaactgtaagccagaccaggtgtgagaaggggaggtgatacaaagattatagggtggaggaatggaggctgaggaagaattgggatctagcttggcctggcaaggaagggagaggtcagatgggtctgtagaaaaggaagattagaaagactcagcgacgcttggggttgggactgaggggacaggcgggagggaaagaaggaaaatttgggacaagttgcactgagcacagagactaggaagggactgatatgtaaaagaatgcctggacatcaggcacctcagaccatttgcctattttacaacaagaattatttagatcttgtaggatggaaaaattgaaagtgctgttttccggctatttggaactactgtcaagtttgtattttggtcaagtggcattgcagaagaaaataggacgcttagattttaggtcaggtgagagttgaagaggttttaagttcttaagaacacaggctaagggagaaggaggaatggaaggttgcccatagtgaaggaggcaagcccagagaaaagagtagagacatggagaagggctgggggtttcttgccctccagaaaagcagagaaagggttggggcatggaaataaggtattgggggttcttgcaccctagaaaagtgggacttgccactaacggtgaaggagaaggggttgaggggttcttgcccctgccccagaagagcagagaaggggtagagacacagagagaaggggttggggtacttgcccctcccccagagaagagggacttgccactaaggctgaaggagaaggggttgaggggtacttgcccctgccccagaaaatcagagaaggggta

SEQ ID NO: 11829 - DNA, 1415 bp, Artificial sequence
  DNA replication origin
ataaaaagagatatgtacgttccatattaagaaaaggacaaaagcttaagaaagatacaaaagaagattggagtactttttagctagatggaagaactcactatttaaaggtataaattcttcttaaattaacctaacattagtataatttaagttcatataacttcgtttcatattttctcctataaattctttctacgattttaggaagaatttataggagaaaatagctgttttaagaaggattatttttgtctaaatatcaaagagttcttctccttgccaagccccaaattatataataggagggagggagaaaggaagggaggaaagaagggagtaagaaaggaaagaaggaaggaaggaaaggaggaaagaaagaagggaagaagggagggaggaaggaagagaggaagggaagaagaaaggaagagagagggaggaaggaagagaggaagggattggggaagggagggaggaaggaagacaggaaaggagggaggaaggaagggagaagggaaagaaggaagacagggaagaaggaatggaggaaggaaggaagggagggaggaagggaggaagcaagggagggggaaggaagagaagaaggaaggaaaggaggaaggaaaggagggagaaaggaaggaagggaggaagaaaagaaagagaggaagggaaggaggaaaagagggagggaggaaggaagggaagaaggaaggaagaaaaggagggaaggagggaggaagagagggaagaagggaagaaggaagagcgaataggagggagggaggaagggaagaagggagaatattctaggctaagggaaaaactaaagcaaaagcccagaggaaggaatgtgctcaatatatttgactaacagcatgaagacccccaggctttagcagagtgagcaaaggagtcatgagtaaatttagaaaggaagccagaggtcagattatacaggacctcataggtcaatgtaaggacttgggtattgtcacgggtgtgactgtgaaagcagaaaatgataagtgctggggtgaagcaagggcaggagctgagacattagttgaggtggtgactttaatatttgagaacacagaggatggtggcttaagccacagggggagctgtagcaatgttataaatgattcatttcagagtagttttgaaggcagggctgacaggatttgtgatagattggatgtgggtgtgtgagaaacagagcagttaacatgacttcaagtttgaggcatgatcaactaggggttagttgtgccattttcctagaaaggaaactctgggaaatgggcaggttttggagaaggagagaaagcaagagtactgagctggccatgtaaagtctgacatgcctattacatttccacattgagatatcaaactggcagttgcag

SEQ ID NO: 11830 - DNA, 940 bp, Artificial sequence
  DNA replication origin
gcactcctgtgctgtgttttctaactctggagggctggtagtaggtgcctggctttgttctctgccccctcgaggttagaaacctgttgcactgaaggagctaaattgttcccagtccactagccccaacattccaatggcgggcggggtggggtgtgccagccaaagcactttgtaggaggagtggcatgggatccatgcttgctcacatgtgacagcagccatggtggcaaagtgggttgcatacaaggcagctggcccagtgcactgtcaggaatgggacagacgcatccatgcatgcattcacagtggtgatggaatggcagagtgcccacatgtcagcagagctgcaagagggatgcctgtatccgtgcacacatttgcaccagtggcagtggcagcacagcaggggtgggacattagtgcaggcaggagcactggcatccatgcacatacttgccctggtggtggcagtgctggtgcagagcaggcagggtggtgggggggtgaggttcagtgtctgtgcatgcacttgtgccagcagaggcagcaactgtgtggtttgctagcaggagtgggtggggcagcatagtgtgtgtgtgttcctttcagcagtggtaccatgggctatctgcacacatgtcctatcagtgaagaagtggggaggttcacccatgtgcgtgcatcggcaaagcaatgggggatggctgtaggacagtgcattaagcaaagtgtcagggggaggttgaagtggagtggggaaggctgcaggtgagcttgttgtgtcagtagggtccagtgtgctggtgctctctgatggttaggtgtggtctgccagcaaaggaggtatgatgaaggcccctgcaaagcaccctgattgggcatccaaggctgtaatgcaactggatgtggccaggctggggccctggaagaggttggc

SEQ ID NO: 11831 - DNA, 1065 bp, Artificial sequence
  DNA replication origin
gggcaaaaagcccgggacgcgcgccgccggggcctgcggggcctgcccgaggccgaggccccggttgggggtgcgggccggagctcccgctctgcgccgggggcaggcgtctgctggcaataccttcccaggagagctctcctcccggctcccgcttcaggaacttgtaccagaacgtgtccacgcggcccggctccgccccgtcctgcgccgcctcctcggccgccagctccacctccccgagccacaggcccggctcctgcagggccagggccccgtcgcccgccgcggtgccggccggcctcaggcggacggcaccgcgcggctcccaacgccccagctcgggccgcgaccccaccaccagcagctccggccgggcgccggccacggcgggtggcaccaccaccccaaagcggaagcgcatggcgggcggcggcggcgcgaatacccgggcccggagtccccgcggccggcaggcgcggcccgagcactaggcggccgcagcgattgggcggtggtgtgggagccccgggcaccggggagaacacgtgctgttctgcgccttctttgggatgcatcacgcggctcccgagcccagacttcgtccaggccggcgggaaggggtcagcggagccgctagctgcctctttgtgccccgcaaccccgcgggcggttgatttccacctgtgggcgctggggacacgcgaccggaagaaatggaagagaaaacggggttcggggagggaggaaaacttctaagccaggcgatcgtccagttctctctccaagagactggaaattaactttatgaggatcataaggaagggaatgacctctagacagccgccttctaattgtgaaacgggggaagatcttggacctggtctctggagcgctccctatcttaaccaagtcacttactctagcaggtctcaggttctttgtctgtaaaatgagggtgtaaaataatgatctttctagaccctacgagctctgaaggatctctgattggtggagatcacccaagacccggagctgatgcaaaacattacctaccattccctt

SEQ ID NO: 11832 - DNA, 1109 bp, Artificial sequence
  DNA replication origin
gccgggccgggtgggcggggcgcagcggggcggggcgcgcgaggagggtggctgcctctggagcaggccgggagaagagaaaaggcggcggcccggctggggaagaggggcggaggaggcggttcggacggctgtgtggggtacggagcgtcgccgggacagagcggagcagctgggcacggcgtccagggcagctagggcctgggccgcggttcggccgcgccggccggtgagtgacgggaggcccgcaggggaggccggcgccgtccgcgctgcggcggggacgaaggcagcggccgggcagtttgaggccgcggccgggaccgaggcgctggcgctggcggccgtggggttgacgggcccggcctggagcagaggaaaggcggctgaccccggtccatgcgcgtcccgggtcggccgtccgggcgccctgagagggcgtccgccgcgctcgtgtcctcgccgggccgcatgccgggccagccgttgaggtcagcaaatggcgacttaagcctcgagggcaccgacctccgtgtcccccccagtttgtgtgtctttgtattgggaagggacgaaggaggagttaaacttagggaaccctaagcttctcgttccgtctggtttttagaaacttgggttatttggggacaaatggcttaaagtaagactggggaggcatcatccactgtctgcacgggatgagcaaagttggtaactttgccattcatggaagtgagaggatcttagccttagcctcggtccttattaaaggggaacttccttattttgcagacctgaggttatttgtgttgttccaagacctgcgccttggaactcctttgcttggaaggggtttatagagcgcgtgctgaattcaaagtaatctgccagtatgtttttaacgggtatatttgggagtatagaggcaaagaggcaaaacagtatgtgtttaccaatgtcctagtactccatttccctctccctttctcttgtttttcttattgagccctgttgtaagtcccagataaaagatgcttgggaacgaattgaccttttattccatgattacttcgttgactctgatccaagatgaagttatttatgggcat

SEQ ID NO: 11833 - DNA, 1595 bp, Artificial sequence
  DNA replication origin
ccagccctccgccgcgcccgctgacgccgcctgaccggtcacaggacccagaacccgccagtgctcgcggcccgggcggggccagacgagggcagggccggacgagggcagggcctggcgccggcttggggaggaccctgcgcgaggcggctcccgccctgcgcctctgaagcccggccgggcccaactggacttcctctcccgggcggcgcctccgaagcccggccgggcccagctggacttcctctcccgggcggcgcctcctggcggtcgcggcgcggagggaggcccagacgcccgctggtgggcctccggggagccggcctggagcctttatgggccccggaggttcactgggggcctgaggaggcgccgaggtcgctgagccccccccggggccggggtcggcgtggggtccgggcccagcctggaagcctctggcctggaaatccacctcctgccctactctccccgcagggagagccacacttgcgggccttggcttgggtcgcgagcagtcccctttagatgggaaaggaagtggcaccgtgactttgaacttaacgaaggacggataacactgggctggtagttctgtttttaactttttgagtgaacctccgtagggttttccataatggctgttccagtccgcattcccaccaccagtgtacaaggttccctttgctccgcacatcaccgacacttattatcgcttatcttttttataacagtcatcctagcaggtgtgaggagatacctagtggcttttccctgttcattagtgattttgagcgccttttcttatacctgttggcaatttgtacttcctctggaaaaaaaaaaaaagtccattcacatcctttgcccgttagttaactgggtgttttatttatttattttggctgagttctgtgaacgtaatgtattttggatattaaccccttatcagatatatggctcacaaatattttctcccaatctataggctgttttttcattttgttgattatttcctatgcggtgcagaagcattttagttggatgaagtcccatttatctaggtttgctttggttgcctgggcttttggtgtgatattgcaaaaatcgttgctaaagccagtgacccagctatccctcttctgggtgtatactcaaaggaaatgaaatcaggatctcagaaatcgctctcaagttcatgcagcattattcacagttgcgaagatttggaaacaaccaaagtgtctgttaacgatgaatggataaagaaattgtaatacatacataggcatgcacgcgcgcatatacacagacgcacacacacacacaatggaatatcattcagcctttagaaggcgatcctgacatttgcaacaacatggataaacctggaggacattatgctaagcgaaataagccagacacaaaaagaaagatactgtgcaatatcacttatatgtggaatcttaaacacacacacacacacacacacacacacggaatacgtggaaacagtggtggttaccaggggcagggaagaaacggaatgatgcaggtcaaagtgtacaaagttgcagttatataggatgaatgag

SEQ ID NO: 11834 - DNA, 1324 bp, Artificial sequence
  DNA replication origin
ccataaaggctccaggccggctccccggaggcccaccagcgggcgtctgggcctccctccgcgccgcgaccgccaggaggcgccgcccgggagaggaagtccagctgggcccggccgggcttcggaggcgccgcccgggagaggaagtccagttgggcccggccgggcttcagaggcgcagggcgggagccgcctcgcgcagggtcctccccaagccggcgccaggccctgccctcgtccggccctgccctcgtctggccccgcccgggccgcgagcactggcgggttctgggtcctgtgaccggtcaggcggcgtcagcgggcgcggcggagggctggccggcctcgggggagtttccgcggccgccgggggcgcggcggcagagcgcgaggccgggcagggggccagactcggagtcgaggcgcgcccgacagccgcagcgctcatggcgggcggaggagccggggaccccggcctgggggcggccgccgccccagcgcccgagacccgcgagcacctcttcaaggtgctggtgatcggcgagcttggcgtgggcaagaccagcatcatcaagcgctacgtccaccagctcttctcccagcactaccgggccaccatcggggtggacttcgccctcaaggtcctcaactgggacagcaggactctggtgcgcctgcagctgtgggacatcgcgggtaagcgcggccgcgagtttcccactccagagccccgccgggccgcctggctcctctctgcttcttttctttttcttttctgcctgaactcgtctgcctgggtacctttaggagaagagagaggcccaatccaagggcgagatgcgatggacgcggtcggctggactcggtggggcccagaggatgggatgggcagtaggagttggagcaggtcctgcacgccagagctcgctctcctgaagggaggcgaggaggccagggggccttttccagaagtttgaactctgaataatgcaagtatatcatacatacaccaggactagttgagaaggctgctttggagcgggccggcgcctctcagcctcaactcaagttcagagggattgggtgacttaacccgaagctgcactcctagttagtgacaccaccaagaccaaaagccaggttcctttccagatcattttccaccacccgccttggctctgagactggcctttgtgagggaaactccattcctcaaatactttgctctcatcggaagccgaggacagacactccgtgaagatttgggaaagcttttctgaaaccttacactcaccccttcctctcttgctaaaccaacacctag

SEQ ID NO: 11835 - DNA, 907 bp, Artificial sequence
  DNA replication origin
tcgccgctgcgtccatggcccgcggccgcgccgctgctcgcccgccccggccccgcagtccctcggcgcgtcctccggctccttctcctcctgccgggggtcgccggctctctgtccgcggccgccgctcggcctcgcacacaaggcgcctggtgtgggtccccgcgccgcctgcctcgccccgcctcgctcctccgccgctggaccggcccgccctcgccgctcccgagcccggctgcgttcctcaggcgccgccgcggccgtcggctctccccgcccagccgctccccatcgcctgacagggcgcctcggcacacggcaccaacgcccgcccggagcagcagcggcagccgcggttacagcgcgggccgcggcggtggcggcagcagggcctcccaggagccgggctgcggtacctgcgcatgcgcgccgcagcccggttcccccaccctggcccagcaggcccccagccccccagcccgagcgaagctggggcttaaattatcttctgcgaaaatcccagacgctggctaaatttctcccaccccagtcgagttgccagagtatgcagctgcttctcttgcagctggcatagtaaaaatgttgacgactaacaagcagcaggaaacctttctttccaattcagtcattacagcaggggttgatgctttctcgccgttaatggggtgcacgctcctggccgctggctgcagtattatttttcttgctttattgacgggcgttgtttttgtttgattggatttgagttttgaaaaagagcgtctagacaacgatatgtcagtggcaggaggatgatggacttaggtactaggaaaaggagagaaacctagacgggaaaaaacgggttctttcctacagctgttactgttggtggaacgtgtctggt

SEQ ID NO: 11836 - DNA, 1339 bp, Artificial sequence
  DNA replication origin
aatcaaaggtccttctgagatagtattgggatataaagataaacgtgacaaaaacatttgtgcttcaaaggggaaccagtataaagccataaagcccactttcttctgctgaatagaatgagtttggggacagggacaacgccttaaaatgggtcaacgcgcggacgcgagggggcactgtgagtccgctttggcgagggagaggcggcggcccgcgcggggcggggagggctgcgcccttccagcatcccagcgcccaggagcttcgccacctaccagggtccgagaccttaactcggttccggaaagggcgtcccgggtgacccaagtttggggccacaagcagctccaccggctctccgcgttggtctctcccctccccctaagcagacagtcctttctgccagctgtccttaatttgagattcgtgagtcccggggtttgggaaaccagaacccccctgcgactgtagggaacgttttgggtgcgcctatgtcgggtattttcctgggcaaaaggacagaagctgtcatctgattctttaaggggttcgtgtcccaagagggggttaagctctcttggtttaggataagagggcccacctaaccacccacccaaatgccaaacacacagcaggtcgagaaacgactctgaaatcactccttgtccacttcccaaggtcgggcgagagactggcacgccccacgggcaatcttcagaaaaaaaggtcagatctggtccttaaacagctcaggtgcgaagctgaatcgcccttctgcggaaagagaggagacagtacctgcccccgccgtccctcacttcccttagtcccaagaagaggtcagacaccgggaaatggggcccaggcgcttggtctgttccacctgccactcgagtccccagtcccaagaggctgctcagacattggcatgatggggaaactcgattgattttgttacctcctagagggaaaatgccgtgggcggagatgtctgagcgtcccttccaacacgagctgggtggtgctctattgattttcacgcgatccccgggcgggagcgagaggataggctcggattcccgggctccaggaccgaacgcctggcagtgtccccgggggcaaagccaccccgggagcccgtgcagtatactaggtggggggcccggagagaaagcatagcgccgacgagggggaggggccgggcagaaaggagggtggggtaccgggtgggacacactgacctaggagaaagtacaacccaccccaaactttcgcagacccgggagcttaggaagggagagccaggaagacagcagcctctcctgccgcccaacgtgc

SEQ ID NO: 11837 - DNA, 1606 bp, Artificial sequence
  DNA replication origin
cccggccgccccctctgagaagtgaggagaccctctgcctggcaaccgccccgtctgagaagtgaggagcccctccgcccagcagccaccccgtctgggaagtgaggagcgtctctgcccggcagccacctcgtccggcagggaggtgggggggtcagccccccgcccggccagccaccccgtccgggagggaggtggggggatcagccccccgcccggccagccgccccgtccgggaggtgaggggcgcctctgcccggccgcccctactgggaagtgaggagcccctctgcctggccggccgctccgtccaggagggaggtgggggggtcagccccccgcccggccagccgccccgtccgggagggaggtggggggggtcagccccccacctggccagccgccccgtccgggaggtgaggggcgcctctgcccggccgcccctactgggaaatgaggagcccctctgcccggccaccaccccatctgggaggtgtgcccagcggctcattgagaacgggccatgatgacagtggcagttttgtggaatagaaaggggggaaaggtggggaaaagattgagaaatcggatggttgccgtgtctgtgtagaaagaggtagacgggggagacttttcattttgttctgtactaagaaaaattctgccttgggatcctgttgatctgtgaccttacccccaaccctgtgctatctgaaacatgtgctgtatccactcagggttgaatggattaagggcggtgcaagatgtgctttgttaaacagatgcttgaaggcagcatgctccttaagagtcatcaccactccctaatctcaaggacccagggacacaaacactgcggaaggccgcagggtcctctgcctaggaaaaccagagacctttgttcacttgtttatctgctgaccttccctccactattgtcctgtgaccctgccaaatccccctctgcgagaaacacccaagaatgatcaattaaaataaataataaataaataaataaataaatcctatttctgtataaagctatccttcctctgactagaaacaactaggaaataaagagaagacaaagataaaaaggaaagtcaacactaagtcacatcatcattgaaggcgtccgtggggaatgtcgttgacggtgcacctatcgggtgtttgtgtcttgaaaaatcaaaccctttggaggcaagggcagtccttggctttggtccattatatgttacaggactcctgaaggctgaggggtaagtccctattttccataggtttttcctaaatgaggaagggcaagaaatagtaattatctgagccgtgctgccccctgctggtagcagttatgcaaccctgcaaacatgttccctaaatccgtttccaacgtttgttcagaactccaaagctctcatagatcatccaggtcatactctccctgcccaacttcatcccttctgcagagtggaagctgcagccagcccttggaggggaaatgacttatcatcacaggttttagctcaggtctctttctacactacccaacatcacggaacacccaatacacgaaattcacatgatagtgctgtttggacattct

SEQ ID NO: 11838 - DNA, 1116 bp, Artificial sequence
  DNA replication origin
gatttctcaatcttttccccacctttcccccctttctattccacaaaactgccactgtcatcatggcccgttctcaatgagccgctgggcacacctcccagatggggtggtggccgggcagaggggctcctcatttcccagtaggggcggccgggcagaggcgcccctcacctcccggacggggcggctggccaggtggggggctgaccccccccacctccctcccggacggggcggctggccgggcggggggctgacccccccacctccctcctggacggagcggccggccaggcagaggggctcctcacttcccagtaggggcggccgggcagaggcgcccctcacctcccggacggggcggctggccgggcggggggctgatccccccacctccctcccggacggggtggctggccgggcggggggctgacccccccacctccctgccggacgaggtggctgccgggcagagacgctcctcacttcccagacggggtggctgctgggcggaggggctcctcacttctcagacggggcggttgccaggcagagggtctcctcacttctcagagggggcggccgggcagagacgctcctcacatcccggacggggcggcagggcagaggtgctccccacatctcagatgatgggtggccgggaagaggcgctcctcacttcctagatgggatggcggccgggaagaggcgctcctcacttcctagatgggatggcggccgggcagagacgctcctcacttcccagacggggtggcagccgggcagaggctgcaatctcggcactttgggaggccaaggcaggctgctgggaggtgaaggttgtagcgagccgagatcacgccactgcactccagcctgggcgccattgagcacggagtgaacgagactctgtctgcaatccccgcacctcaggatgccgaggctggcggatcactcgcggttaggagctggagaccagcccagccaacacagcgaaacccgtctccaccaaaaaaatacgaaaaccagtcaggcgtggcggcgcgcgctggcaggctgaggcaggagaatcaggcagcagtaccgtccagcttcagctcggcatcagagggaggc

SEQ ID NO: 11839 - DNA, 1328 bp, Artificial sequence
  DNA replication origin
aaatcctgttgtggggtttgagggccggaatttaatttttggagttttatttaatgtcaggagcagattgggtaatgtattttgagaataagatggccttttgaccttttagggtctaggactgtaaagtgtctcagggttgttgccaaacaagtcatgaactgggctggatttttatatttgatgaaaaagagcctaaatgctatctgatttgggataaagaaaaaggaacattaaccttgactatgcctttagctccagccacctttttaagagtaaattgctgggcaggtgggggagggctagtcatggaacgaaactgtaagccagaccaggtgtgaggaggggaggggataaaaggattatagggtggagaagcggaggctgaggaagaattgggacctagcttggcctggcgaggagcagcctggggaggaggggagaggtcagatgtgtctgacccctaatctgtagaaaggaagattagaaagactcagtgacgcttggggttgggactgaggggacaggtgggagggaaagaaggaagatttgggatgagttgcactgggaacagagactagagagggactgatatgtaaaggaatgcctggacatcaggcaccgtagaccatttgcccattttatgacaagaattatttagatcttgtaggatggaaaagttgaaagtgccattttctggctatttggaactactgtcgagttcgtattggggtcaagcggcattgcagaagaaaataagactcttagattttaggtcaggtgagagttgaagaggttttaagttcttaagaacacaggctaagggagaagaaggagaaatggaagatggaagcttgcccatagtgaaggaggcaagccgagagaaaagagtagagacacggagaaggggtggggggttcttgccctccagaaaagcagagaaggggttggggcacagagatatgaggtcagggcacagaaataagggattggggcacagagatataagaggttggggtgtggaaataagggatcggggcgcagagatataagaggttggcgcatggaaataagggattggggcgcagagatataagaggttggggcacagatatatgaggttggggtactggcccctcctccagaaaagcgggacttgctgctaagggtgaagaaggggttgggggtttcttgccccccagaaaggtggagaaggggtagagacatggagagaaagggttggggtactttcgcttcccccagaaaagcgggacttgccgctaagggtgaaggaccaaggcaggcatccctgtgtgatctgacacctc

SEQ ID NO: 11840 - DNA, 1091 bp, Artificial sequence
  DNA replication origin
ctcctgtgcggccggatcctccctgatgatcgccgccctctgctccacggcgcccagtcccatcgaccacccaagggctgaggagtgcgggcgcatggcggtgagaggtgacagcgtgctggcagtcctcacagccctcgctcgctctcggcacctcctctgcctgggctcccactttggtggcacttgaagagcccttcaagccactgctgcactgtgggagcccctttctgggctggccaaggctggagctggctccctcagcttgcagggaggtgtggagggagaggcgccagcaggaaccggggctgcgcacgacgcttgcgggccagctggagttccgggtgggcgtgggctttgtaggccccgcacttggagcagccggtgggctctgccggcccccagcaatgaggggcttagcacccaggccagcatctgcagggggtgtactgggtcccccagcagtgccggcccactggcactgtgctcgatttctcactgggccttagctgcctcccaaggggcagggctcgggacctgcagcccgccatgcctgagcctcccccgactctgtcggctcctgtgcagccggagcctccctgaccagccccgccccctgctccagggcgtccggtcccatcgaccacccaagggctgagaagcacgggcacaccacgcaggactggcaggcagctccacctgtagcccccgtgcaagagctactgggtgaagccagctgggctcctgagtctggtggggatgtggagaacctttatgtctagctaagggattgtaaatacacgaatcagcactctgtatccagctcgaggtttgtaaacacaccaatcagcaccctgtgtctagctcaggatttttgaatgcaccaatcgacactctgttcctagctactccggtgggggcttggagaacctttgtgtggacactctgtatctagctaatctggtggggatgtgcgaagctttgtgtctagctcagggattgtaaacgcaccaatcagtgccctgtcaaaacagaccactcggctctaccgatcagcaggatgtgggtggggccagataagagaataaaag

SEQ ID NO: 11841 - DNA, 1381 bp, Artificial sequence
  DNA replication origin
tgcagaagccgtagtcccggagggagaagcgcaggaaaggcagcaggggcacccgacgcttccagctgcccaggcccggaggggcgccccccataggggccccatggggccagggatccgcgccgccgccgggatgctgctgcttcttcttcatcgcctgctccgctgcctcccacagcctgcccgtgccaggaaaaggtcacccatccgccgcgaggaggagagcccggctggccggctgcacatggggagggccgcgcggagggcagccgggtgggggcggggaggggccgaagttgccgggctcaggagactttcttcggcatggtccccgccgccgcggcccgagcggccgaggtgtccggccccggttcggggcgctgcccgtgacggggcgccgcgcccgtccggcgcccgctagcgtccccacgccccgcgccccgccgcgcctcgggctcgcttgcggccgccggggctcgcctccagcgccagcgtggaccccccggctttgtgtctgtaggtctcggcgtgttttgtcccggttcaggcttctctaaaaaacggcagggaggaacaggaggcggacaccatcccctcgctccacctccttgacaggggttttcctccttctcctcccctttctccctccggcgctccgcagcactctcctccctctcccctccctctccgctcgggtctcgggatttcgctcgggtgtcacgttactgcttctgctgggggcggagggggggaggcggcgattattcgcaacaaggaagaaagtttctgggtgttttctttttttttccttcccccgttctttacaatctggatgcggttcctgcgccaccagcgacctcttgggggccccgctgacttccctcttgtaaacagtcaccggcaggaagaagcacgactgactttactatttacatttttttcagttcagaaagttgattctccttatataccccgtgcgagctgcttacccaaggctgataaaaggtactagaatacaggctcaagactttgctgaaatgggaaaagagcaagcggtgcgagttatggtcaaacacgccccagagggccaggcgcagcgcctgaactcccgggtagggtagccgaagaggacgctctgttcttgcttttcctggtcctacaactgctccacctcgcagtgcccagagaggcaagtggggggtgcatagcggactctaggaggtcattgccctgcagacatgaaggggaaagagcccagtccgcctatacgctgatttcattgctgcctctcttccctccacgggaaagcctctggacctgaaagaacctcctggggcagaaaaggctcaatcctagacatagatcctctgatggggtggtt

SEQ ID NO: 11842 - DNA, 767 bp, Artificial sequence
  DNA replication origin
cgcggatccctggccccatggggcccctatggggggcgcccctccgggcctgggcagctggaagcgtcgggtgcccctgctgcctttcctgcgcttctccctccgggactacggcttctgcatggccaccctgctggtcttctgcctgggctccctcctctatcagctcagcgggggaccccctcgcttcctgctcgacctgcggcagtacttgggtaaggaagctgggcaggcgctagggcggcgccgacagcgcaaagttgtgcggcggggagagggtcgcggcggggacttctcgcgctgccaccgcgcgccgccgccgccccgggtctctccaggtgctaagcccgtgagcatctgtgccgcggtcgggagcgccttcttcctcccgcgcgtccgactgtcctcaccgaggcgggggcgccgctgggttgcgctgccggcaggtaccccggggcgaggcaccgctcaccttccccccgccccacctccgccacccggatccggactggggcggagtggatgggtgtgtggggtgtgccggagtgtgtgtatcttcaggcctggcggcgcggggagtggcgaagggaagggaaggtcctcttcgttgcattgttagtgaccgcagttcagtcccgtcccgcgccccggggagtgtgggtgggtttagccctttgccaccgtccgctctgagaattctgtcccgcagatcccccgcctgcccgccggccctagtggctccgcgctgtccccgggctggcttgtcc

SEQ ID NO: 11843 - DNA, 2211 bp, Artificial sequence
  DNA replication origin
cgttttgttgtttttgttgttgttgttctctattggattcacgtgggcatggcattgggctcctctgtgctgaccacgtttccttatctcctctccatcccagtcgtacagcctggaaagagggggtgcgtttcagggatgagaccagagggtatctttgcttcagattttccagagccttcttacttgcggatcctgtgggcccatgaagtgtgtgggggatcatgtatgagtgtggggggtcatatatgagttggggggggtcatgtatgagtgcggggatcatgtatgagtgtggggtttgtgtatgagtggggggttatgtattattgtgggggtcgtgtatgagtaggggggtcatgtttgagtggggggttgtgtatgagtgcggggattgtgtataagtgggggcatcatgtatgagtgtgggggtcgtgtatgagtgcggggggtcatgtgtgggtggggggatcgtgtgtgggtgcggggggtcgtgtgtgggtgcggggggtcgtgtttgagtgcggggagttgtgtatgagtgcggggggtcgtgtatgagtgtgggtatcgtgtacaagtgtggggggtcatgtatgagtgcagagatcgtgtatgagtgggggggtcgtgtatgagtgcgggggtcgtgtatgagtgcgggggtcgtgtatgagtgcgggggatcgcgtatgagtggggggatcgtgtatgagtgtggggggtcatgtacgagtgctggggtcgtgtgtgggtgggggggttgtgtgtgggggcaggggatcgtgtttgagtgcaggggatcgtgtatgagtgcaggggtcgtgtatgagtgcgaggggtcgtgtatgagtgggtcgtgtatgagtgtgaggggtcgtgtatgagtgtggggtcgtgtatgagtgcgaggggtcatgtatgagtgcagggggtcatgtatgagtgtgaggggtcgtgtatgagtggggtggtcgtgtatgagtgcagggggtcgtgtatgagtgtgaggggtcatgaatgagtgcggggttgggtatgagtgtgaggggtcatgtgtgagtgtggggtcatgtatgagtgcgaggggtcgtgtacgagtgcggggatcatgtacgagtgtggggatcgtgtatgagtttggggggtcatgtacgagtgcggagattgtgtatgagtgggggggtcgtgtatgagtgcgggggtcgtgtatgagtggggggatcgtgtacgagtgtggggagtcatgtacgagtgtaggggtcatgtacgagtgcggagattgtgtatgagtggggggttcgtgtatgagtgcgggtatcgtgtatgagtgcgggggattgtgtacgagtgaggagatcatgtacgagtgtgggggatcatgtaagagtgcgggggtcgtgtgtgagtgcgggggattgtgtacgagtgaggagatcatgtacgagtgtgagggatcatgtaagagtgcgggggtcgtgtatgagtgcggagatcgtgtatgagtgcggagatcgtgtatgagtacgggggatcatgtatgagtggggggggtcatgtatgagtgcggggatcgtgtatgagtgggggggatcgtgtatgagtgtggggatcgtgtacgagtgcggggggtcatgtacgagtgcggagattgtgtatgagtgggggggtcgtgtatgagtgtgggggatcgtgtatgagtggggtgtcgtgtatgagtgtgggtatcgtgtatgagtacagggattgtgtatgagtgcggggatcgtgtatgagtgcggggggtcatgtatgagtgtgggggatcgtgtatgagtaggggggtcgtgtatgagtgcgggggtcgtgtattagtgtgggtgtcgtgtatgagtgtggagatcgtgtatgagtgcggggggtcgtgtataagtgcgggggtcgtgtatgagtgcgggggtcgtgtgtgagtgcggaggtcgtgtatgagtgcaggggatcatgtatgagtcgggggttcaggtatgagtggtggggtcaggtatgagtgtggggatcaggtatgagtgtggagattgtgtatgaatgtggggattatgtatgagtatggggattatgtgtgagtgtggggatcatgtatgagtgtctccaggactgacagaatatcccctggtggtttaagtcaagtggggcccagagaaactctggacagatagagggtgatgctcttag

SEQ ID NO: 11844 - DNA, 899 bp, Artificial sequence
  DNA replication origin
cataaaagaacaaactgaccacaaggtcgtttttataaagatcaaccatcaacccctggggtcaagtttccaatctttgctcaagctttagaagcctttcagctttgtggcgttatcaggaaagtccaaaaattgaaatttgtggtgactaattccaccccctacaaatactcaatgcagagcatattactgtcagctcagctaaaaactgctcaaagtagaagtgattaaattctaaagtagaaaaaaattcacctccaaacacagaaacacactggtacctcccccgcacacccagatattattagccagctttttgcctggggaaatgaatcatgagacagaaaactgtacaacccccaagtctgaccacactgagtaactggggtagacacagaggggggcatctggggctctcccgaggccaaggttgggacccagaagagatgaatttccctgggtgcacagggtgggagggaggtggggctggaagaacttgatctggagggatgatcccgaaggctcccagtgaagaaggccaggaagagcagaggatggtgccaggaggatgatgtcgggggacacaggcagctcatgcctggatcaggcagtgactggtaacagaaggagagtccatgctggtgggcccaggggaacataggtggtcaagcagggcagtacttggtgtctggggatgcagtgtgcgacctcctgtattcggtgcgaggcacatggggccagcaggagctggtgtgagcccgggtctgaagggtggtgggatcttagtggggaagactgggaagacagcagggaggaagaactcaggctggaggaggatgggggcctgggaggatccctgccacactgttaggaagccagggagcttgggtggtggtagg

SEQ ID NO: 11845 - DNA, 1211 bp, Artificial sequence
  DNA replication origin
cgacggtggagacggctgccctagtgggagaggcggcggcggcggcggccgaggaggaggagggggaagcggcggcggcaaagggtaagcggacagcgctgccgggcctcggcgggatccccaacctggctctcccctcatcgccccgcacccccctccgtctggaaggggctctgccgcctcgcgaggcccgtgcggggcgttcgcttctaacttgcactcttcctccctccgcctctttccttcccccagtggcgtggcggagagggaggccccccgagtcccccagtccggtgggggtggggagcatcgggccgggcctgggctccggggcgtccgtgcggggggggagggggagcttcattggaatcgagcgcctaggagagccccgggtgggggagggcgcaaggggctcgggagggcccctccctgcgtcggcgcccctgacccgcccccaggcatgtgtgaggtgggggcgggggaggaaaaatctccttttggggagccgaggtctagttaaagatgactcaggggcgggggttttggggacagacacggggcagttatgtgggggtcgggcgggagggagaacatcgttcctttgcggatcttggttttctgcagccgtctttgaagtggggggcaagccctactatgaatatgtggccccttaaatttcactggatgtttctggttttcggtcccatcaacctcaaaccctacgattgtggttgagtcagggaggctgcaagggtctcttggcggtgctgaacaggtgacaggtggatctttctgttgctgatgctgtgagatgttcaggcacagtcgtacaccaaagtgtcagagaccgtgtgagtttgtatttatgtgtttggccatgtttcattccatatatagtatatttgagatgttaggtttccattcttcaagtcagcttaattgttgtggataaattcttcaaatgtttctgataagagggttttccaggagagcggagggaatttgcagcctcacaggggtttctccgtagttcacgaaatttaggcccccagtgcaggctgttgagtacccttattcattggaaagttcttgaacgctaagatcgtattcagagcaactgtacggcaatataattttgcatccattttgtctgttttaggtaagtttgtaaagtgtctaattttggggtcagattgattcacattttagaa

SEQ ID NO: 11846 - DNA, 1266 bp, Artificial sequence
  DNA replication origin
agcctcacgccccgactgggcgggcccgactgggtgtccgcgggcggccgggtgccaggcccgctcagcctccctagcccggagagccagttctccccgggcgacctcccgcctccgcccggcctgcagctccagccgcggggcgaacaccgccctagggacctgcacggcgacttgctttccccgcgcaggccacccgacgacccgtgggcccgtccaccccgctccgaccgcttccctgggcgctccgtctgggcggagccggcctggggcgacggcgccactgggggactttcagtgtacgcgaccgaggacgacgagggggacgcgcgcgcccgggctcgcatcgcgctctacagcgtcttcccgcgtgaccaggtggaccgcgtgatggccgcgttcccggagctctcagacctcgccaggctcatcctcctggtacagagatgccagagcgcgggggcgcccctgggcaagccctaagggaccaacacgcacttgcagggaatggcccagcctcgccttgcgtcttggacgggtggacctgtggttgccagcctggacctgagtgggcccatcatggtgcccccttttctttaaagatggtcagggaagcctgcttcctcctcctgagcggggttgtgggggcctggtggcacttggtgatcctcactgaggccggggcctgctgcggggaggtccacccacttccgtggagggaatgattttccatgtgcacggagactgcgggtccaagctgcagtagaacccacaagtgggtcacaaaatcaatttagtgggtcaccaccacaaacacagtggactgggacagggcaaagcgcaccctgtgccatcaggctgagtctgaactcttgttacctatcctgtgtccccacccccttggcagccatgtaactaacctcaatgtgggtcgtagtcagaagtttaaaaaagactatgaatgctcttgaatttcattgcttcaggtaatgtttgaaatatgtagtcaggtggccaggggaggtttgctatctggaagttttcatgttagctattgctaaccccacccgcaagggcagcccagcctccaggtgtgggctctcctgtgctctgaattgtgtggctgtcctatgctggggacaagtggtaggagcgctttgtcccagggccaccttctggggccttcacacacatacccccaccacacaaacacacacacacacacacacacacacacacagtctatcatacatgtacatactcaca

SEQ ID NO: 11847 - DNA, 1265 bp, Artificial sequence
  DNA replication origin
aggggccccaggtcgtcgctgaaggccagccgagagaagctccctcgcagggcggccaggtccggggacccccgcgccggcgggaggctgtgcgcaaatggttcccggggggccgcccgggctcctgcggagccgcccggggctctcggtggccgctgctcctcggcgcccgcgccaggccgggcccctgtcttggcgcggagctcgtcggccaccgccagttgcgcgtggtgcggcctctccgggtggtagaacttgcacttgatgccataggtgcatttcttgcctgaaaggggcgggggcagagagggcgcgacgtgaggcccgggggcgcggaggggcggtggttcctggtgcatccggggagtgccggcccgcggcctctccgtggagattcctccaagcaggcccccaggccgccgcggactcctcagactcagcgccctggaaacgcctcaagatctgggcgcggggccgaggtggggagaagtgcccgggaggcgcgggcggcctgggtgagggggcgctgagcacactcatcccagggtatgcagaggagtgtcgttcccaggtccctttgaccagggactaagaccaaatctctggattcaaagactttcagcctccaattgcccagggaccctgtggatagggccaggcttagggagcgggcggtagggagtgggtgctcggggcagaggactgcgcctgcagtgccgcctcagttcccaccgttctccgtgttcgctgtgctaacgcttgccctcaccctgcacgctgttctaacagagtcgtgaacaaatggtcaagtgttactatccaaacccaaggcttctgagagtgaaagggggaaggaggagtcagcctgaatgtatgtatggtcacctaattctaacaagaaatgattgactgtcacccaagtctttactgaacttggaaacatcaaataacttgacgaagcaagtcagtgaaagagctggctagaaggctggcatcccccagggtgctgggataaaattcttaactcttcatggatagcagtgaccaaagtccatagggtggaggggtggagagcagggtagggtgaggacagaagctgccaggggccaggtgaagggactgagacccgcagctgggtttgtgtccaggctcccggcttctcagacacagctttgctgtgtgcatgacccctgcatccgaccctggcatgggatcctggctcccatgaaatcaccggccaggatgtcagttctacaataaccctg

SEQ ID NO: 11848 - DNA, 1421 bp, Artificial sequence
  DNA replication origin
cgaagctccgtcccgcccgcgggccggctccgccctcacctcccggccgcggctgccctctgcccgggttgtccaagatggagggcgctccaccggggtcgctcgccctccggctcctgctgttcgtggcgctacccgcctccggctggctgacgacgggcgcccccgagccgccgccgctgtccggagccccacaggtagggcagggcgggcctggctggccgctttacgactccgactctccgggaggcccgggctgtccacagtgacgcttcccacatcccaccggcgggcaggggcgggggtccgggcccccgaaggaggtgtggggagaagcaccccaggaaatgggggcggcgtgggaggccgaggtaagaggaaagggacccactggggctgcgtcgctgtgagtgagcctcgagccactccacaccgactctccggcggcccaagccggcgcgcgacctgacggggctttgccgtcgaagcgcgcggttgccggtgatcaggccttcgtaatggcgccttcccggggtagagccagcgcttgggcaaggaatgtttgtgtgctcgggaagtgtggaagttgcccacttcgcgcatttccaggccacttgtgcctgctcggcctgcgatcgcgagggtccgccgttccgaggctgcggggctccgccgggctcaggtgggcagagggagagacctggccctcgcgcgacgtaatgtttttgtcggatgttggaggagaagttctcacggcggggcgcgatcggcggtgtccgcatcccctggggactcagcccggcctctgggggcggggcccagcagtccgggttggagagtcctgcaggtgcttctgatgccagctgaggtgggagaatcgaggcatcctaacattaaaacgtggctgatgctcaccattcctgccgtagagtcgtgcctacctaggccagtatcagccttttttcagtagaatggtagggaaaagtttgaatattttaaagagcaagtgttctgagaatgacaagaaactatgtcggtacacctcttcctagtcaagacttgaatatgaacactctaaatacaaaggcgaagggcacggtaagtgtcactttgaccaacaaggtgaaaccccgtctctactaaaaatagaaaaattagctgggcgtggttgcaggtgcctgtagtcccagctactcgggaggcggagacaggagaattgcttgaacccgggaggcagaggttgcagtgagccgagatcgtgccactgcattccagcctgggtgagggagctcaaaacaaaacaaacaaacaaaaacaaaaaaaccaagtgttaacgttttaggataatgacattaccccacgtgggtacaaaaatgatgagcatgtctcagttctgcagggcattccaagaagccacgaca

SEQ ID NO: 11849 - DNA, 908 bp, Artificial sequence
  DNA replication origin
ccggccagccaccccgtccgggagggaggtgggggggtcagccccccgcccggccagccgccccgtccgggagggaggtgggggggtcagcccccgcccggccagccgccccgtcctggagggaggtggggggggtcagcacccccgcccggccagccgccctgtcccgtctgggagggaggtgggggggtcagcccccccgcccggccagccgccccgtctgggagggaggttggggggtcagccccccgcccggccagccgccccgtccgggaggtgaggggcgcctctgcccggccgcccctactgggaaggaggagctcctctgcccggctagccaccccgtccgggagggaggtgggggggtcagccccccgcccggccagccgccccgtccgggaggtgaggggcgcctctgcccggccgcccctactgggaagtgaggagcccctctgcccggccaccaccccgtctgggaggtgtgcccaacagctcattgagaacgggccaggatgacaatggcggctttgtggaatagaaaggggggaaaggtggggaagagattgagaaatcggatggttgccgtgtctgtgtagaaagaagtagacatgggagacttttcattttgttctgtactaagaaaaattcttctgccttgggatcctgttgatctgtgaccttacccccaaccctgtgctctctgaaacaagtgctgtgtccactcagggttaaatggattaagggcggtgcaagatgtgctttgttaaacagatgcttgaaggcagcgtgctcgttaagagtcatcaccactccctaatctcaagtacccagggacacaaacactgcggaaggcctcagggtcctctgcctaggaaaaccagagacctttgttcacttgtttatctgct

SEQ ID NO: 11850 - DNA, 1278 bp, Artificial sequence
  DNA replication origin
ggcggggggctgacccccccacctccctcccggacggggtggctagccgggcagaggagctcctccttcccagtaggggcggccgggcagaggcgcccctcacctcccggacggggcggctggccgggcggggggctgaccccccaacctccctcccagacggggcggctggccgggcgggggggctgacccccccacctccctcccagacgggacagggcggctggccgggcgggggtgctgaccccccccacctccctccaggacggggcggctggccgggcgggggctgacccccccacctccctcccggacggggcggctggccgggcggggggctgacccccccacctccctcccggacggggtggctggccgggcgggggctgaccccccacctccctcccggacggggtggctgctgggcggagacgctcctcacttcccagacggggtggctgccaggcggaggggctcctcacttctcagacggggcggctgccgggcggaggggctcctcacttctcagacggggcggttgccaggcagagggtctcctcacttctcagatggggcggccgggcagagacgctcctcacctcccagacggggtcgcggccgggcagagacgctcctcacctcccagacggggtcgcggccgggcagaggcgctcctcacatcccagacggggcggcggggcagaggcgctccccacatctcagacgatgggcggctgagcagagacgctcctcacttcctagatgggatggtggccggaaagaggcgctcctcacttcctagatgggatggcggctgggcagagacgctcctcatatcccagacggggtggcggccgggcagaggctgcaatctcggcactttgggaggccaaggcaggcggctgggaggtagaggttgtagctagccgagatcacgccactgcactccagcctgggcaccattgagcactgagtgagcgagactctgtctgcaatcctggcacctcgggaggccgaggctggtggatcactccggttaggagctggagaccagcccggccaacacagcgaaaccccgtctccaccaaaaaaatacgaaaaccagtcaggtgtggtggcgcgcgcctgcaatcgcaggcactcggcaggctgaggcaggagaatcaggcagggagattgcagtgagttgagatggcggcagtacagtccagcttcggctcggcatcagagggagaccgtggaaagagagggagaccgtgggtagagggagaccgtggg

SEQ ID NO: 11851 - DNA, 999 bp, Artificial sequence
  DNA replication origin
acgtggctctcctgactttgcctgcggtggctttcatcatacaaaaatgggaggaaaacttctggtcccttttataaaaagtgaaaagaggggacttgattttcgttgaaaataagaaactttaaggccgggcgtggtggcttatgcctgtaatcccagcactttgggaggccgaggagggcggatcacctgaggtcaggagtttgagacctgcctgaccaatgtgatgaaaccccatctctactaaaaatacaaaaattagccagagctggtggcatgcgcctgtaatcccagctattcgggaggctgaggcaggagaatcgcttgaacctaggaggcggaggttgcagtgagccgagatcgcgccattgcactccagcctgggcaacaagagcgaaactccatcttaaaaaaaaaaaaaaaaaaaggaaaagaaaataggaaactttaaagcgtgtttcttaaggactaaaaatgatgctgattcgacggtttgactttttgtagatgctctgaatgagagaatcaggacacatacaggaggcacaaaaatggtagtggttggacatgaatgtcacggagggaataagagaccttgattgtgcccacgtgtggtcaggctccgtgtgtttaatcatgccctgttgctgtttgatttataatagcacgaatgatatcagcaagatgggggcggagctcagcccctttggaagtgtggattctccaaaacctgtggatccattgaaagagtctggaaatctgtgtccatcacatcctgcctccctccccacctctaccttagatgaggctcagaatccttgtcaggggagcagatatcaaagggtcaccctgcgactgcttggccttgaggcaaacactgggaaggactccatagctttccttctgaagtggaggcaggcagcactttcacttggaccccccatcagcatctctgaggcccaccacggctgttgcacacacatcctctctgcccaaaca

SEQ ID NO: 11852 - DNA, 689 bp, Artificial sequence
  DNA replication origin
gccggcggccgtgcggggctggcggcaatgcgtggcggcctgctgctccgagccgcgctgctccgtggccgtggtggagctgccccggcgccccgcgcccccggcagccgtgctcggctgctacctcttcaactgcacggcgcgcggccgcaacgtctgcaagttcgcgctgcacagcggctacagcagctacagcctcagccgcgcgccggacggcgccgccctggccaccgcgcgcgcctcgccccggcagggtaagcgcgcgactgaggggccggccttggccagagcgctcgagacccgcagcgccctcgccaagttggaagcgaaacacactcgtgccaagttattttagccgcgggcacccagaagagtttctggcatgggtttctctgtcttagggaagaggaagcccagtagtttggcagaagcgggcgggcgggcgcggtgacgtgctactggaatttttctaggcttgaagagaaaggctgatctgagaggattcgtggaaatatgacttaaaaggggagaaatgctgagagaaaaaagtttgttttagtctcatgggttgtataaggcatggtttgtgttaagtaattgcaagagcaaaatctaattagatgccgggcttctcgtaacacccactcctttttcttgacgtggctctcctgactttgcctgcggtggct

SEQ ID NO: 11853 - DNA, 1769 bp, Artificial sequence
  DNA replication origin
ctctcctgggcgacggaggccatggcgacgagagccaagggcagcgagccgaggcggggctgagcgcgggaggaaggcggggacgcgggcgagcgcgggccctgggcccctcctgcgcggccgcggctggctctaggccccggcctcacagcgcggcgcccccgaacccggctgctcccccgaggtcgcgggcgccggcgggaaccgcagtagcgggagacatagccggcccagccgggcaccgctccttgccctcgccggagactgcccagcgccctgcgcctctccgccccggcctgcggcgcgctgggtggcgacgagtcggcctcggcgttgatcagcaccaggtgtgtgcgaacagtggccgcggcggggtggagccttggtgagccccgcccccccgcgcggccccgcccccgcgcgtctcgcgccggctcctccagggctgggagagcaggccccggggagggcagcctcagaacaactttgctcccgcgccgctgcccagctagggcagggttcatgtctgggcccagcaggctttagcaaccaaccacacctgcccagggcgcctgcccacaggggcttggcattcgggggaatgggggcagtgggaagggagggcctgtcttcaaatcctcgtgacccccgggactactccagagagggggcacgcgcacctaggaccaccgtagcgcgtcatcagtccttcacctccagcgtccctgactttccgcatcatgttcccaagatgtgcttgggtagtacaaagtggggcggggttggggtggcggagtcagggccgggaggggtggggatgggaagtactgaaagatgttcagtctgtttaaaaacacaaaaatcaagcctggtgaggtggtactcgcctgtaagtcctgaggctgagttgggaggatggcttggacccaggagttcgagactgcaatgagctgtgatcacaccactgtactccagcctgggggacagaacaagaccctgtctttaaaaataaaaacaaaacccataaatagcagtcgtcacatgcactcagatttccacaaatataacaaaaaatctgaacacagccaacatggggacctgggagtaatacagcctgtgacagagaggcctctagcggttatatcacgtaaaatctcgggagttgtgctttaaatgacataaggaataagaaaatgtccaacccagtgggggcttcaccttggcgttctagacttctgtgagcagcatctgcatcttgtttgtttctgaatcagtttctgttgattcatttttctcctgattgtggatcgcattttcttgctttttagcctgtccggaaatttttgcctggatgcgcacattgtaaatagaacactgttaagtgtctgtattttttaggattgaaagaataaataattggtgggaaaatatcagtctctgctatgtgtttattatctccagagttgacatttaggaacccattgcttgcagatccagatcagagtaggaggtaaaattaaaaggtagcaatagaaaagaaagaaaaaagctcaatgttacttgccattccatcaaagggagaaattataaagtttttgcaggggtatatttgagtgatttttgaggctaaaagaaatggcctcttagctctaaaggctgtgtctggactgtaccacttcggcctggagattcttcctcatatggcatactcatcccacacaactgcagtcattgtaagatgaccttgaagcaacataatgctttttatt

SEQ ID NO: 11854 - DNA, 693 bp, Artificial sequence
  DNA replication origin
agggaggctttaaaaccttgaggtgattcatcttccaggctctccttccatcaagtctctcatccctagcgctctgggtccttaatggcagcagccgccgctaccaagatccttctgtgcctcccgcttctgctcctgctgtccggctggtcccgggctgggcgagccggtgagttcgtggatggagcctaagccgggcggggaccaagcctggagggctgtgaactgccgcgggtttcagaggaggggaggcttctagaaggacgggggagatctcccctaactgcgcccccgttcagttccggtcggcggctccttcctgctgggtgcagtccccgaggctgcttcttgcccgggaagaggcgaaaaggagcggggtggaaaggaggctggcaggagggtggaggggccggagggctgcagagagcgaggtggggcggggatccctggtgcagcctggcagtcccacccgccctcgggaaggaaaaaccagagcccccggaaccggagctggggacaggacaggggtgaagcgggattccacagggacgcgatcacagacacccccaccagccacaggcctgctctgctctcacccgctctccaccacacaaaccctccagcgcccccagggctgcgtgcccttgaatttttccctgcactttcctgtagacactcacctgcacccagggg

SEQ ID NO: 11855 - DNA, 1386 bp, Artificial sequence
  DNA replication origin
ctagggccagtggggctgcgggtctgcaccagggatccccgccctaccttgccctctgtagccttttggtccctccaccctcctgcaattccttttcagccttctttgacactccccctggactgcggtgctagcagcagctgcaggaagcggactcggcggaaaggagccccggaggggaactgagtgccttcagccaggcacgttcggggagacagcgatgttcggggagaccgcgatgttctgggggatcgcgatgttcggggagaccgcgatgttcggggaggccgcgatgttcgggtagaccgcgatgttctgggggatcgcgatgttcggggagaccgcgatgttcggggaggccgcgatgttctgggggatcgcgatgttcggggagaccgcgatgttcggggaggccgcgatgttcgggtagaccgcgatattcggggagatcgcgctggtccacccagaagcctcctggcctatggggcaagcagcagccgcaggaagcggacccggaggaaaggagccgcggaggggaactgagtgccttcagccgggcatgttcggcgagatcgcgatgttcggggagatcgcaatgtttcgggggatcgcaatgtacggggagacggcgatgttcgggggtaccgcgatgttcggggggaccgcgatgttcggggagaccgcgttactcggggggacggcgatgttcgggggggatcacgatgttcggagggatcgcgatgttggggtagaacgcgatgttcgggggcatcgcgccggtgctaccagaagcctcctggcctgcggggcaagcagcagccgcaggaatcagacccggcggaaaggagccgcggaggggaactgagtgccttcagccgggcatgttcggcgagatcgcgatgttcggtgagatggcaatgttcggggagatcgcgattttcggggagaccgcgatgttcggggagatcgcgttgctcggagagagggcgatgttcggagaggccgcgatgttcggggagaccacgatgttcggggagacagcaccggtccttccagaaacctcctggcctgaggggcaagcagcagccgcaggaagcggacccggcggaaaggagccaccgaggggaactgagtgccttcagctgggcatgtctggggagatcacgatgttcggggagatcgcgatgttcggggagacagcgatgttcgggggcaccgcgatgttcggggagaccgcgacgttcggagggaccgcgacgttcggggagaccgcgatgttcgttcagggagatcgcgccggtccttccagaagcctcccctcctctgaaacccgctgcagtccacaacctcccaggtttggcccccgccctgcttaggctacatccc

SEQ ID NO: 11856 - DNA, 911 bp, Artificial sequence
  DNA replication origin
acttacacaacttggagatgacaccctaggggatggggcagcaattgccaggacacagcatgtgccctcatctggggtcagcaacctaggacagggtccacatctgctctcccttttacttgcaggttaccattgcctgctgttgctctacaaagggacaggacttgacacacagacagagaactcacggccagcaaggaccaaagtgacttcagccttttctttctagaaagggtttgctgactcctgtctgcgtagtgactattctatatgaccctggctccccagtaggaagaacaggcgggtctgggacccaagggcagaagtgggcacctctactcacgggcgctcccagggtcatcctgagggaaatgggatttcccgtcccccctgcattaagttctgtagaaagcctggggtgtgtttgctggggtgtgccctcaggcaaaaggggacaaggtgctagttggtgtggggaggtgctaagggccccttcatggatggggaggtgagggaggcctgtggggtgacagggctgggctgagatggggagtgaaagaatgagacctgagtagcagaagtgaatggtgaggaagtggtgaatggtgggaagtgtctggtgagcccctgggtgcaggtgagtgtctgcagcaaattgcaggggaagttccagggcggagccctacaggtgctggagggtggagagcgggtgagagcagagcatttctgtggttggtgggggagtttgtgatcgcatccctgtggaaccccgcttcacccctgtcctgaccccagctagggtttcgggggctctggtttcttcttcccgagggcgagtagggctgcggagctgcatcagggatccccgctccaccctgccctctgcagcccgttggcccctccaccctcct

SEQ ID NO: 11857 - DNA, 1535 bp, Artificial sequence
  DNA replication origin
tggagacccgggtaggagccggtgctgctgctgttcatgtttgagggttgtatagctggaaacccagggagaagccagtactatcgcttttaaagtttgaaggtcatggagtctgagacctggggaggagccagtgctgctcttcaaagggctcctcctcgggtctccatttccacgaccttcacactagaacagcagcagcagttcctccccgggtctccagctccatgaccctcacactagcagcaccggctgcaccttgggtctccagatccaccaccctcaaactagaacggcagcagcagctcctccccgagtctccagatccacaagcctcaaactagaacagcagcactggctcctccctgggtctccagctctatgaccctcagacttgaggagctggagactcagggaggagccagtgctgctattctactttgagggttgtggagctggagacccaacgtgcagctgcagctgctcttctagtttgagggtcttggagctggagcctttctgaggacctggtgctgcctttcaagtctgagagtcgttaagctggagatccagggaggaaccagtgttgctgttgtagtctgagggttgtggagctggagaccaaggtaggtgctgatgctgctgcaattcaagtttgagggtggtgaagctagagacccaaggaggagtcagtgctgctgttcctgtctgagggttgtggagctggagacccggggagaggctcgtgctgctgttctagtttgagggtcatggagctggagatccggggaagagctgttgctgccgttcaaatctgtgggtcctggagctggagccctggggaggagccggtgctgccattcatgtcttagggtcatggagctggaaacccagggaggaggcgatgctgctgttctagtttaaggatcgtggagctgaagacccggacaggagctggtgctaccgctgtttaaatctgaaggaaggtcgtggagctggagccttggggaggtaccggtgctgcctctcaagtctgagagtcattgagctggagatccagggaggagccggtgctgctgtcatagtttgaggatcgtggagctggagatgggaggagctggtgctgcagttcaagtttgatggctgtggagctggagacctagggaggagctggtgctaccactgtgtaagtctgagggtcgtggagctggtggccctggggaggagcaagtgctacagttgagggtctacagttttgagggtcagggagctggagacccagggagtagctggtgctgctgttttagtttgagggtcttgaagctggagccttggggaggagccagtgctgcctctcaagtctgagaatcattgagctggagggaagctggtgctgctgttgtagtttgaggatcgtggagctgtagacccggggaggagctggttccgcagttgaagtttgagggtcggggagctggggagctggagatcttgggaggagccagtgcttctgtttaagtctgagggtcatggag

SEQ ID NO: 11858 - DNA, 2752 bp, Artificial sequence
  DNA replication origin
ggcaggaaagagagcagggccgtgctgggcactgtgggctgtggatgggagctggcatttatgctcgagtgatgggaacgtgttagaagattttaaggagggcagtaatatttggggataatgcgtattctgggaatctcaacaaactaaattcatagtttgaatgttcataagacttctgcacaggcagagagaaataagatcatttctacagctgtgacataagatcatattaaaaaatattactaagtttttaaaggtcatttcaaatggtggatttctatcttatatttgaacacaagtagattgcaaggttggggaaagcagaaaagtttcctgacttgtgtgaacataaaagaaatatcaatctgaaagcaaaacatttattcatttacttcctctgcagttttcttgactgctgaatttcataagaagggattgttcatgagggtcatggagctggggacctggggaggagctggtgttctcctagtttgagggtcgtggagctgaagactcagggaggagctggtgctgctgttctagtttgagtatcatggaactggagcaccgggaaagaacccactcatgtattagggtaatagatctggagatccggatggagctggtgctgctgttctagtttgagggttgaggagctggagacccagggaggagctgatgctactgctgttcaaatctgagggtaatggagctggagccttggggaagagtgttgctgcctttcaggtctgagagtcattgaactggggctccagggaggagcttgtgctcccgttgtagtttgagggtcatagagctggagacccagggaggagctggtgatgctgttttagtttgagggttgtggagctgaagatctagggaggagctgatgctgctgttcaagtctgagggtcctggagctggaggcctggggaggagctggtgctgttgttctagtttgagggacatggagctggaaacctggggaggagccggtgttgatcttctttgagggtcatggagctggagatccgaggaggagccggtgttgttctagtttgagggtcgtggagccggagacccggggaggagctggtactgttgttctggtttgagtgtcgtgaagctggagacctggggaggagccagtttcgttctaatttgggagtcgtggagctggagacccggggagcagtcgctgtttttttagtttgagggtcgtgaagctgcagacctagggaggagcgctgttgttctagtttaaggatcgtggagctggaaactcagggaggagccggtgttgttctagttttcaggtcgtggacctggagacctggggatgagtggtattgttcttgttttaaggtcatggagctagagacccaaggaggagccattgtttttttagttttagggtcatggagctggagacccaaggaggagctggtgttgttccagttatagagtcgtggagctgaagactcgaggaggagcttgtgttgtactaattcgaacgttgtggagctggagatcctgggaggagctgtgttgcccttgtttgagggttgtggagctacagacccagggaggagaagtgttgttctagtttgaggatcatagagctggagaaccagggaggacctggtgttgttctagtttgaggattgtggagctggagacctggggaggagctggtgctgttgtagtgtgaggtgcatggagtggagacccagaaatgagcattattgttttagtttgagagtcatggagctggagacccaaggaggagctggtgttgctgtttaaattttagtgttatggaactggagaaccggggacgagttggtgctgctgttctagtgtgagggtcatggagctggagacctggtgaggagctggtgcttctgttgtttaattcaaagggtggtggagctgtagaccaagggaggggccggtgtttttctagtttgaggcttgtggagctggagactcagggaggagctggtgcttctgttctagtgtgagggttgtggaggtgaggacccagggaggaactttgttgttctagtttgagggttgtggagcttgagacccaggaggagctggtgctgctgtggtttcaggttgagggtcatggagctggagacctagggaggagctgtgctgttgttcaattctgggggtcgtggagctggagggcggggaggagctagttctggtgttctagtgtgaggatcgtggagctgtagacccaggcaggagccagtgctgctgtgtagtttgaggatcgtggagctggagacctagggaggagctggtgctaccaccatttaagtcagagggtcatggatctggaggtttagaggaggagtccatgctgctgttcaactgtgggtaggatccagtgcttcagttgaagtctgagggtttgggagctggagatccaggaaggagccgatgctgttctattttaagggtcgtggagctggagaccctagggagaggctggtgccgctgttgtagtttgagggtcatggagctggagacccgggtaggagccggtgctgctgctgttcatgtttgagggttgtatagctggaaacccagggagaagccagtactatcgcttttaaagtttgaaggtcatggagtctgagacctggggaggagccagtgctgctcttcaaagggctcctcctcgggtctccatttccacgaccttcacactagaacagcagcagcagtt

SEQ ID NO: 11859 - DNA, 1654 bp, Artificial sequence
  DNA replication origin
ccttacgatcgtatttcactgtcacttttccctgctggtgtcgccgctgctgttgctgctgaacctgccctgcagcggccgccgtggccacgggcgccgagtcctcccgggaggagcctgagccgctgctggagccggggctgccaccggcgccaccccgggggctttggaagaaaacccgtgcgccgccgccgctggccccgccggccgtctcgctgctgcccgtcgccaccgacatgtccccgcgcgcccgagcctcagtgcggcccggaggaggggcgggcggagcgcgcccggcgccgctaccacctccggcccggcagccgcatgcgaagggctccccggcacctgctctgcgccgcgcgcgcccagccgcccggctgctctgggagggcgggaggagccgcggcgagagggaggagggcggggaggacgacggggcggggaccgcagccttaaagaagccgccgaggaccctctcggtccagcccccagaggcgggatctggcgcctgcggcagagagggcccggggcgtgggagtctccgcggggcgggaaatgtgtgcgcctagacacgggaggtcgccgatgtgtagactccggaaggacgggcgtggggcggggtgccaggggatgctcctgcgcgggtgtccgtggcctctagtctcggagacagggactcacgcttctcccgcaatcccggagcgcaggaaacgcgccgcctctcggggcctccacctggcgcggccccgggcaggacccgcagcgaaggggacacaggaaaggaccgcgccgcaggctcccccaggaggttttcctagccccaccgtctcctctgttggctgggtagcgtcccctcccctccagccccgccccacggctccaaacacacattcctattcatgccacgatggatgccacttcctctctggattgtgagaaacatcgaagaggcgatgtttgtgcaataaggcagtcacggcgcttgagaaattatttccagaccaatgttttctttccttactaagcgtctgcttaatcatgggcacagcattcggatatcttcgtatccaaagggcagaaagcgtgacggcgctcaggcaaggcgtctgggggcatccagacagtaaacatttctctaagagggtcggcgacagggtcctggtttcacatttctagtgttgcgtcccgtgcactgccagctttctctccatcccattccaaacagccccttccacccaggagggcaacagcactgcctgactctactgcaaaacatcacagcctagtagttacacatgaaggagcttctcagaagggttaggacaataaggtggggagggaagttgtaaacagaaaactgcatgtgtaaaattagggagacactaacatattcttcttgtacacaacaatacattcctgttcaggaactgatagaaaccacagagacgtccgaatgaatacaagtaagcggcttttagtaacggttttgttttgttttgttttttgagacggagtctctctgttgcccaggctggggagcagtggcgagatctcggctcactgcaacctctgacttcggggttcaagcgattctcctgcctcaccctcctgaagagctgggattacaggctttcgccaccacaccaagcta

SEQ ID NO: 11860 - DNA, 1397 bp, Artificial sequence
  DNA replication origin
ggactcggcgcccgtggccacggcggccgctgcagggcaggttcagcagcaacagcagcggcgacaccagcagggaaaagtgacagtgaaatacgatcgtaaggagcttcggaagcggctggtgctggaggaatggatcgtggagcagctgggtcagctctacggctgcgaggtacctgggcgcggggctgggagggtcggggacctctctagctcctctgtgcccgcgcagtaattttcccgggctccagctccggggcgcgcatgtccctgactcccggggaccaagtgccaggagcgaggcgcggcgccttctctcccccgcggtgccctctggcgtcgggctcagcggttgggacgcccctgtctgggttcggctgccggtgcccggggatctgcgggcccccttggtggccgtggggagggttgggtcccgcggagcacagtgcttttctccgagctccgggcgcctctgggctccagctgcagctgcgcaaagcggggctcggaggggctcactccagctgcgcctcagcagcggttggggatacagcagccaaagagagcagcgctcactgctgggatccgggcagccctgatttttgtggagaacgagcagggaaggaaggaagctgcctcgtggaaaggagaggttctggggatctcagaggcccccttggttcttgaaattccccgtgaaaatcctgagatggaacgctttccgctttccagccagccccgacggtgtctccataattccgccctgcattatcagagctgcacacgttgtgctttgttgaagccgtagtttttcctctctaagctcagttactcccattgatgggcgcagaatgagcatctggggcaacctcgacgggtgcctcggtggaagggcgggagccctgcggggggcctgcgggatcccgggatctgtcagcttcaggctcccagctcccctctcctccacgacatcgtgacttcccaaggtccagggactaaggtcatacacaagtctcagggacgtgtatacatttgatttagggagaaatatgtagaataaactgcagcaaaacgactgaagccaaaatgatctctcatgagcatcttgaataacagttattaattctaaatgaagtgacctcctcttaagggagtggagtttggaaagggtggaagcatgaaggggttaataattaagaatgtggcttctaagctaaagctaggtttgtgttcattcaactgttgtgctcttcaacagagatgacaaccagatgaactcacaggctttaccactaatgtcgggtgttctgtatttgacacatttcatggcctgttgtgaagacacgttttcttaaacaccctcattgcacaagaaaacagcatactcgttactgact

SEQ ID NO: 11861 - DNA, 968 bp, Artificial sequence
  DNA replication origin
aaggaaagaaggggggagggagagaggaagggagggagggaagggaggaagtgagggagggaggaaaaaggaagggacgaaagaaggaaggaaagaaagaaaaaaggaagataggaaggaagggaaggaataaggagggagggaggaaaagaggaaggaaggaaggaaagaaagaggaaggaaagaaagcgggagagaaagagggaagggaggcaggaaagaagggaaggaagagggagggaagaaaggaaggaaggaagaaacgaacgaaggaaagaagggaaggaggaaggaaggaaagaaaagagaaagagggaaggaaggcaggaaagaaaggaaggaggagggagggaaggaaggaagggagggagggaggtagggagggagggaggtagggagggaggaaggaaggaaaaaaaggaaggaaggagggaacgaaggacggaaaggaatgaaggaaggagggaaggatggaaggaaggaaggaaggaaaagactgaaggaaagacagaaggaaggagggaaggcaggcaggattgggacagtctgcgagtttcccacctaagcatgtcaaagcccatagtgatcatcctgcagttgtgcaaacctggaaactttttctaaacttgtgacagcaactcagactgacttgagacagatttatatatccagtccctgaagccccgatctcaaacaataactgtgtgttccttgggaacctgatgcggatccttcggttaacatacagtgtccaggcctgtgctaggagctgtggaggggccatgagaggaggagcgtggtctctgtcattagcaaacactttccatctcataaaacagacaacaaaaacatatattaagcagcttgcaaacaaaaccacatatactgaaatgcaagattgaaaagtactgagaaaagaaaaagtgttctataactgaaaagagagaaattaatgactttgggggtaa

SEQ ID NO: 11862 - DNA, 1239 bp, Artificial sequence
  DNA replication origin
tcatgaagatgaaatgatttactccacatctcttatgttgtttacataagtggtgcatgccaaggtcacacaggtgaccagtgagaaccaatgcttaaactcaggcttctcagccccccaagtccctgctctcagtcacagggtggttggacatgatctacgtggggatattactctaggtccagaagggattgagcaggagctaactggagaagagaacggactcctttactgaagacacatggagttggtgttgttgactgcaaatagataccagattgaaaccatttttaatattaacaaggtattaaatggtaaaataagtattgtaggccattctagcatgagttaaggaaaatatgggtacccatccaacctcctgcagctctgattcacaaagaattcctactgcatgttcacaggtcagagaatcggcatgtgtgtgtgtgggtgggttgtggggtggtgaggggtcattgtgtgaccatgcttattagacatgtgtgtgtgggtggggtggggggtggtgagggaacattgtgtgtccatgcttattagacatgtgtgtgtgggggtggggtggggagtgctgaggggtcatgttgtgtccatgcttattagacatgtgtgtgtgtgggtggggtggggggtggtgagggaacattgtgtgtccatgcttattagacatgtgtgtgggggggtggggtggggagtgctgaggggtcatgttgtgtccatgcttattagacatgtgtgtgtgtgggcggtgtggggggtggtgagggaacattgtgttggtccatgcttgttagacatgtgtgtgtatgggtggggtgggggtggtgagggaacattgtgtgtccatgcttattagacatgtgtgtgtgggggtgtgttgggggtggtgagggaacattgtgtgaccatgcttgttatacatgtgtatgtgtgtgtgggtggggtgggggtggtgagggaacattgtgtgaccatgcttattagatgtagggtacagtctccctttgcaaaccagccaaggttggtgtcctgttaataccttgtttgtctacagttagggtccaagaaagaagagttgctgaagtttatctcaaagaaataagtctcagattgtcccagtaaagtgaactgaaaatcctacccacaaatcctctagttaggctcagattcatagaagtccatagaaatgggaaaagaagaaaaagataggaaacacatctc

SEQ ID NO: 11863 - DNA, 899 bp, Artificial sequence
  DNA replication origin
acggggttgggagtaaggttatagattaacagcaccccaaggcagaagaatttttcttagtacagaacaaaatggagtctcctatgtctacttctttctacacagacacagtaacaatctgatctctttcttttccccacatttcccccttttctattcgacaaaaccgccatcgtcatcatggcccgttctcaatgagctgttgggtacacctcccagacggcgtggcagccgggcagaggggctcctcacttcccagacggggcggccgggcagaggcgccccccacctcccagacggggcggctggccgggtgggggctgccccccacctcccggacggggcggctggccgggcggagacactcctcacttcccagacggggcggctgccgggcggaggggctcctcacttctcagacggggcggccggtcagagacgctcctcacttcccagatggggtggccgcggggcagagacactcctcagttcccagacggggtcgcggccgggcagagacgctccccacctcccagacgggatggcggccgggcagaggctgcaatctcggcactttgggaggccaaggcaggtggctgggaggtggaggttgtagcaagccaagatcacgccactgcactccagcctgggcaacattgagcactgagtgagcgagactccgtctgcaatcccggcacctcaggaggccgaggctggcagatcactcgcggtcaggagctggagaccagctgggccaacacggcgaaaccccgtctccaccaaaaaatacgaaaaccagtcaggcgtggcggcgtgcgcctgcaatcccaggcactcggcaggctgaggcaggagaatcaggcagggaggttgcagtgagtcgagatggcggcagtaca

SEQ ID NO: 11864 - DNA, 1071 bp, Artificial sequence
  DNA replication origin
ggcgccctctgtccccaccgctcggcgccccccaaggccctccgtccccactgcggaggggcgcgcagggggccggcggggcccgggtaccacgctccgcccggccccacctgcggatgtggggctcccgccggaggtccccgggtcccccctcccatccctggaaaagtccccagggcgtccgggcccgaccggcgcttacccggggagggacggcttcgcatgcccgggcggcgctcgcaggtcgggcggggagggtgcgggctgcgctgcgccggctcgggctgccggagcgccctgcagccgccgtcgggctcgggctcgggctcaggctcgggctccgacttcctcttcctcgggctcggccccactgctcggccgcgccccggcccgcccctccccgcgcccagacgccagcttcggcggccggagcagtggatcgctcgtcccgcctcccctctgccctgagggtgaaaaaggtggagaggaggggggcgaagagaaagagaaattaggcacttggccttgtctctggagccttgccaaagagaacagtcaaattacagcttcggggggaataaagttttttttttttttaattctgctactgttttcgcagacacatcactttttttcattttcctagctcttcaggtttagctttcctttggacgtaataatttcctatgtgagtcctttaaaataatacccaaaatcatggttttagtgaacattctagttttacatagaagctttgccggtaatcaagtgaaaagagggggaagcccggtgttcttcaggcgtcattaccctaatcacctcggttaaagcaccaaacgacctttgcctagagaaagtaaaagtggaaacggaggtaaagaataaccggtgacagccagagagatgtttaaaggcaccggctctgcagtaaagttatgactccaatcaaaggtgcctgcagcgacagttaaaggcatgtgaagtcatttcttaacactaatctcccgccaaagtcggacgtatcagggtcgcctgtggacccccttaggtttggtggtggatttgattgca

SEQ ID NO: 11865 - DNA, 1169 bp, Artificial sequence
  DNA replication origin
gaggggggacccggggacctccggcgggagccccacatccgcaggtggggccgggcggagcgtggtacccgggccccgccggccccctgcgcgcccctccgcagtggggacggagggccttggggggcgccgagcggtggggacagagggcgccgggggcaccgcgcggtggggacggagggcgctggggggcgccgcgtctcgggggtcggagtcgggtcggggatgctgcccgccgccgccccgcttggggttccgcgcccccaagttcccggtgctcccgcccctcgccccagcggctgcaacatcagcgcgcagaggagtttctgcgagcacccgggagttgtagccaccgcttccccacccccgactcagcaggacagccccagaacgggaccccacagccagtcagctgggtcagctccccagcagcgaagccgggagcccgaggacccggggacgcgcggtgggggcggcggccgagctgctgcggcgctcagggcttgggggcgcccccgttctgcagatgcgcttttcagggggtggggagtcaagagcctgtggctcttccgtcacggggtaaacggtaacacctgggcggccgcgactctgcgagcgttctggcctcggcgggcggcggggaaccgcagtgatgcccgagctcgccccttttgtgtcctcgcggtgagccccgttccgaagccggaagcttgggaacgctctaactgggagaacggcgctcggctggtcaattcattccgctcctcggaaacaatgagctggatccttgacttgaatgtgctggcggagcggggtttgtaagccggcgtttcatccagctctggtcctcaaggcgccctttgtaccacccgcaggtggccgaggctactgcacgtattttcgaaatcaccgagtgtgggtgtttggggcaggtatcaccccgcgaggaccatctcagactgagagttggtttaggagttttgaacagattggatacagaactatattgtgttttgtatttagaccgggggaaagactagaatgttaactctagggtccagtttgtcatctaacagaattccgggcttgggtaggtcctgtaatgcggtacaataacaaccaggtgttaaaaccggcatcttctggattctcagattctgtagacagca

SEQ ID NO: 11866 - DNA, 969 bp, Artificial sequence
  DNA replication origin
gaggcggaggcgggcagatcacgaggtcaggagatcaagaccatcctggctaacacggtgaaaccccatctctactaaaaatacaaaaaattagctaggcgtggtggcgggtgcctgtagtcccagctacgcgggaggctgaggcaggagaatggcgtgaacccgggaggcggagcttgcattgagccgagatcacgccactgcactacggcctgggcgacagagtgagactctgtctcaaaaaaaaaaaaaaacaaaatggaccagtcactagagatgactagaatagcctgtgaaagacatcaaagacccaactgaggctggcccccatgaatcagtgtgatgacgtcatttcaaaatctgctcagcagcttggaaactactggtgaaaaccgtggtgtgtgtgggttcctccaggttgggaaccggcagagctggtaggggaaggttcccagggcgggggtggggagggtgccagtgagcacgcagttgcagtaattgggcatgacattaggctgagtgaagaggaaaaccagctggcgacagaggcgtggggtgagggactgcagtattgtcataaagcccggttcagcaggacttaatgtgagagagaaggaaataccctaatctgtaattgaagaagggacttttggagtcctgccttagaggtgggacggttttgagtgtgatcaggttctggaggtggctctgattctgtgctgctgctctggagtggaggaaaaggtcattagaaagtggtcaaggaactagggtggtgggtggattattcacatggatggtgaaacagtccaagttggggctgggaggagtgaggtggagcagacaatgggatgatgatcatgaaaattgaactgggtggaaaataagggctgagatttctgagaaaggggacagtctgttttgttctctgtatattttgacaagcatttgaagcttgttctcaggact

SEQ ID NO: 11867 - DNA, 1036 bp, Artificial sequence
  DNA replication origin
gctccgcccctgggtcggggccacagccgctggagacctgggccagggccagacccgacactcacctgacgatggagtcccgcgccgcgggcgttcggccgccggggctgcagctgctccgggcctggccatcctgcggccgccgctgtccaagcaggccctcccggccaccgccgccgcctccgccgccgccgctgctagcgcgacagggcacacggaggcggcgcggagggcccgggggctggggcgggcggcggagctggcgcaggacgagcggcagacgcgtgcccatggcgcgggacggctggttctcaggggacacggagctgcggctgccgagggcggcggggcgcgtgccaggggagcaggcggcggcggcggcggcggcggcgggaaggacctggcgcttcctcctcgtcccaggggcccctagggggcactgcacccggcggccgtgacgtgcggagggcgggggcctgcgagccgccggccgggatgtcacggctttgggcactttggtttggtaagctgtaccagacagagggtggggtgcggagtgggactcagactctgccctgagactcagcctccctcccttcagcctgaaaggccgaggtgacccttggtactcagggcgccaagtttagacgggagggcttggatttgctgtactggaggtggcctgaggataagaggctttgtaaccttaggcaggggcacttaatctcggtgagcttgcggggtcttcgtcagtaccacagagataacaatgctcttcttaaaaccttaaaaggattttatagtcctgattggttccagggcccctccaggggacccacgtccacaaatgctcaagtccttggtaaaaaaaaaaaaaaaaaaaagtgtttgcatatcacctacacacatcttcccatcataaactttaggtcatctccacattccctaagtcctcacctaacatcgtggaggggttcttggaaactgaaactttaagccaaatgactgtaaggaaaacagtttgaccacaggctaa

SEQ ID NO: 11868 - DNA, 1009 bp, Artificial sequence
  DNA replication origin
gacccagacggtaaaggggcggtgcggctggggcggaaaccaggggagggggcgaggagcaggaggagggcggggctgcggctcggcgcgccggctggcccggggttcgggaagggcaagcggagctcgggagaggcgggctcgggcccagcgccgcccgcgcgaagctccctggtgttgtgcgcccttccccgcgcgcggcccctcctgctgggctggggtctgtggctgacgtccgcttttcccggaacggcaaaggtggagccgggcccccgggacagccgccggggggaatccgagaggtctcagcgctggtttccagcttcgccgcgcagcgcccacggagtccccgcgcagctgggtttgcagggttttctgcgggcccagagcgaactgggagccccgggcccggcctttcccgtcccggtccccgcccctgggctccagccttccccgccctcgcccagaggggcgcacgggtctcgggccttgcagggcgagcccttcgggacaacttgggggtggcaagaaagccccttccgcctccctcggaactgggattaggaacgagttccaggatgcggtttccccggccagcggaccacctcctccattcacatcctcttccctttccttctagccttctttcttagtcattgcctgcttgcctttctctctgcctttccttcctccctctgctctcccattttcctccccactccccttctcccatctcagtaaaatacgtttcctaggctctttattatgtggcggatgattttaaggggccatttatttagtttttcttgttctctgtcttctttttcttttagaaatggagtctcgctttgttgctcaggctggagttcagtggtgccatctcggctcaatgcagcctccgcctcctgggctcaagcgattctcccgccttagcctccagtgtaactgggaccacaggtgtgcgctaccatgcccggattattttattttattttcatagagacagagc

SEQ ID NO: 11869 - DNA, 1226 bp, Artificial sequence
  DNA replication origin
tggttcccagggtaccattcgattcatgcaattcattaggcatgaaacatcctagtgctgaactactgcttacaccctttctacaaaattgtactaaatctgagtatgagatatttatctggaatttggtgtgaatattccgaaagtttcttccttctttctttcttttttttttttgacagaatcttgctctgtcgactaggatggagtgcagaggcacagtcatagctcactgcagcctcgaattcctgggctgaagtcatccttctaccccagcgtccccagcctcctgagtagctaggactacaggtgcaccactgcgcctggctaatttttttattttttgtagagacaaggtctcgctatgttaaccaggctggtttcttcattcttaatggagattcaaagtatttgtgaaaactggggcactcggttgctagttacaactggaataaattttgtctttcagccccaaagccttaatgctttgcgccaagcaatccagctacaaatttaatttagttcaaatacttattgattggctgccatgctcatgtaatacatattatattcaagggtcggaaatgaaaggatgcaagccacttgtgctggtattatttaaagtcttcatcttttgagaaaggctgacggcaaaggaacagatctatgctgtcatgtgtcggcatcgcgcggagcagaggtggcctggatgggtaacttccagcacaggccctcaaagaaggacgggcacatttccggtaacagcctcatttccccccgttccccgggggaaggggggcggctagcactgctgatggcatcgcctgacatcacttgttccggaggataggagagcgtgggcctgcgtggcccacctcatccgtggcctgactgcgttaacctctcggttccctgctcttgccacgtgaggtgcccaaatatggtcggactcaggaggagccagggagcgcttgcctttctcctgctaatggggaggaggctggaacaaatgtttggagttaaacacaatctgcaggaaagcaaatggggactcggactcgctcctgggcgagctgaaagtcggctgcagcagaagctcctgccttgggtgatccatcatttaataaaccccagagaatccagtgtccccggcaggctttttgctcccctgctctcttgccttctgaggccctgggtcgtccccgcagctctagtcgccctgttag

SEQ ID NO: 11870 - DNA, 1904 bp, Artificial sequence
  DNA replication origin
gcagatgctgctgcagggcgtgtctggggctgtgctcatgtgatgaagcgagggaaaaaccggggggaggggggcggaggctaagaggtggcctttttttttttttccttttcttttaaggagtttgccgcgagcgcgtctccttcattcgcaggctgggcgcgttcgcagtcggctggcggcgaaggaaggcgctctcgggacctcgcgggcgcgcgtcttttggctcttgcccctgtccctgcggcttggggaaggcgtaacccggcggctaggcgcgggagaagtgcggaggagccatgggcgccgggagctccaccgagcagcgcagcccggagcagccgcccgaggggagctccacgccggctgagcccgagcccagcggcggcggcccctcggccgaggcggcgccagacaccaccgcggaccccgccatcgctgcctcggaccccgccaccaaggtacgggcgtgccgggccacctgcgccgggaggcgcgggtctttgggggtgggggtgggggtgggggggtccctccgatttccgccgagagaacttcccagcccatccagccgcatctgcaaactcaggagtgcgaacccctctttggaggcttttcagggtctttcgcgccggggcggggccagagcagcggcgagcgcggcggggggcttgcatctttgtcgcgggtctccaggggaggcgactgcgccatgcgcaataataaaacccgcgccctgcccacggcggctgagcctttctgcgcactcttccggtgggagccatgcagcccgaggcggaggagctgcgcggagggggatccgtggagaatggaccccgggccgggcctccggagctccgagatgcggaaagtcagctgtgaggccaggactcgtggtggagcccgccggggagcccagccaccctcgggttccccgtcgcgtaccgccctggatgccagcggtgcctggagcgagcgggtttggtacccagtcctcctgcggcagcggcccgagcaggcaccgccttcccgaggcagagaaagcctggggtgtagctcgctcagagccaggaaaaacctgggcaggcgctgcgtttccagaaggaatgacaggtttcgcaaaccagccagcgccctcgcgttcgctcagcgctttgcctgcagactcagttggccaaacacacgctagagtggctagaagttctcaaaggatggggtcagtgtaacgagcattccgggtactcttccctggacgcagtgctgaaacgactgcattttatcggcttcagtcttcaaggctggaatatttcttgtgggccaggacagccgccaagactgtggcttgttctggtcgtggtattttagatctattttccagcgcatgtgttcattagcaaggcttcactctactgattttgtgatacccttgtatcacaaaggtacccttgtgataccttgtagaaagatgtggataaccatgtttaatagttaaatttgcggtatgtcaaatttgaggatagagtacgtgagttatcgcaggaggtgtagatgtttacaatatgcaaaaaaaaaaaaaaaaaggaacctacaaccatgacctaattgccttgacctccttagctgccctagtctcttttgggctgagagactgctgttaataatatagtttttaccgccagtctttgattcataactacttgtaaaatccatggtccctagatattaagtactaactgtgtctctgtgctatgtaggtttttctaagagatgcttaagcttctggcctgaggaatgtactgtccttttgagattcaagtcgcattttaatacttactgtatgcacataatgttttgatgccagctactgtcaaagtggctctgtaaccagtggtcagagtctagcg

SEQ ID NO: 11871 - DNA, 1396 bp, Artificial sequence
  DNA replication origin
gggctgggggctggggcaagatcaagggcagcgggcggctctacagcctgggctgggatgccacgggcgcaggcccttcccgacctgtccctgcgcgccttggccagtagagaggctttcccaagcctgggacgggaaggaaggaggctggaaaacccacacacacccatctcgggccggtcctaagggacagttggtggccctcgggattccgtgtccgccatcgctgcggggcgaactgccgcttgggtgcacgtgctactcactgcagagtttactccaccagggcatggcgcgcgcagcccgccggcaggggcagcccaacagccgcccgtgaggcccagcgcgcccctgccggctgccatagctcgcgaaagcctgggcccgggaagccagccgcgaacatcacaaaagacgcagcctccccgcgcccggcgccagccctcgacctcccaggaaacccccgggggtcctgcggaccgccccagtggggtctcttcaaacccaagcctgctgaggccgaaaaccatcctgctaaccaactgccaagccgccgctgaacttccctgacacttaatttaaaagaaaaagggcctcgaggcctggcgcggtggctcacgcctgtaatcccagcactttgggaggccaaagcgggcggatcacctgagatcaggagttagagaccagcctggccaacatggtgaaacctcatctctactaaaaatacaaacaaattagccgggcgtggtggcacatgtctgtaatcccagctactcgggaggctgaggcaggagaatcggttgaaccagggaggcggaggttgcagtgagccgagatcgtgccactgcattccagcctgggagacagggcaagactgtgtcaaaaaaaaaaaaaagaaaaaaaagaaacaaaaacaaacaaaaaggacctcgacaatggagaaatctggcaggcaccactttaaccaagtgatcagacttatcctcgataatggaacagatgtcatcgcgcttcctgatgtgaggcactcagaaggacaagaattcatctttgcagctctgctgatcaaaatgtttaacggcatctaatcacgaggaaacaatcagatgaatccacaatgaaggacgttctgcaaaacaactagcctggcctgaaatgtcagtgtcacaggacgaaaatcaagcaaaaacacaatggggttttgtctggcaatggccaaggcatggtggaacctgctcgtgggtttggcttggttgtaaagagctttaagttcttgagtattcgcccatgaggctatcagtcaagttcccatcacattcgcccatgaggctatcagtcaagttcccatcacaaagccatcacttacagagccttatgggctagaaggtggagctca

SEQ ID NO: 11872 - DNA, 1145 bp, Artificial sequence
  DNA replication origin
gggggtttcctgggaggtcgagggctggcgccgggcgcggggaggctgcgtcttttgtgatgttcgcggctggcttcccgggcccaggctttcgcgagctatggcagccggcaggggcgcgctgggcctcacgggcggctgttgggctgcccctgccggcgggctgcgcgcgccatgccctggtggagtaaactctgcagtgagtagcacgtgcacccaagcggcagttcgccccgcagcgatggcggacacggaatcccgagggccaccaactgtcccttaggaccggcccgagatgggtgtgtgtgggttttccagcctccttccttcccgtcccaggcttgggaaagcctctctactggccaaggcgcgcagggacaggtcgggaagggcctgcgcccgtggcatcccagcccaggctgtagagccgcccgctgcccttgatcttgccccagcccccagccctagaaaggaaaggcctcgttctgggtcccgtgacaggtgccaaaacgctctgcgccagcagcctacctccccgaagactctggcttgaaaggggagtcggggggttggaatggacatggctgtggctgcggtcagctggggaggtgggcggcagggcaggtcgaggatgacccaggcctcaaaaagtcaccaggatttagcgaagttgccctcactgtaaggcctggaggccggcaaagtgtgggacgcagaacagaatggaacaggcctcaacacttgggctgcgccatggggagtgtgaagcccagtgatggggcaggctggaaagtacggtctaggcttcaatgcgggttccaagcccagtgggtggccacacgatcgcatgtgttttggggtcaggatctcaacagcgcgggtacagatataggtacctgccagactaggtaggttagaagactattctctaggccctaaagccattaggagtccacagcctgttgatgtgatagaagcggtattttaggaggctttgcttagcaggtaccttgtatggagtgagtagattgccccagcacagagggtacgtggaggccgaaatcaggctgaagcacaaagcatggaggcgcccgaagattgttctgacaattgtagctcttaggattacttatgttaaaagagac

SEQ ID NO: 11873 - DNA, 1326 bp, Artificial sequence
  DNA replication origin
gcccccgcccccccaccgccttcccggaccctgggctgggggtggcacgtgggcaccggccccgggaggcggaggcggtgcgcgcttacctgtcgccggtgctgctgcggcggggggtgtggaggaggcgcctctgggcagcctcggccgtgctgtcctccccgccgccgccgcctctgcctctcgctgctgctgctgctgctgccgccgcggtcggtgtctccggcgcggcggcggcggcggcggcggggcttttcctgtccggttacgttaaggtcacatgaccgagagagcggagagactagtgcaaagaggctgcgagcggctcccgccgggggggagaggcggcgagagagcagtggcggcaagagccccctccgccccccccccagccgctcccctccccccgcccgcctccgcctcctgctgctctgccgccgccgccgccgcctgcagcactccactgccgctcccacccaggctccgcgctctgctccagccaaacttctgcagaccatgtgcagccgaggcgaggaaacttctctccacctattggggctggaggcctgagtcacaagccccttgtttacataaagtgtttaggtagcacaagtccttgagatgctcggggtagagatggagagccactgctcgtatccttctgccggcttctgcttgagatctcttggcctttacccttgtcccttgacttttcgtgtttgttttaatctttaagacttgaaatggagtggcctttagaaccggggagatactgtaaaccagcagtatctttgtgtcaccaatggtaactgaaagtcatgctgaagtacagattcctgtagcgtgcacagaggcagaggtgcttcctttaccttgcagatgagttgagcggcgtaagatgtttctgttagggttgaatttcatggttatttcagcaacgattttcgtttttgaagttttggcccccccaaaaatgaaagtctgcaacgcatgtttgttaagagaacagtttattctcctgttaggttttggtctttgaggtatggattccagagttggctattctgttagatttagaggtgtggaaaatcttttaacggggagatcctgaaacacggaaacatggcagggaagttagaatttcctgatggtcatttttaacattttaaagtttactttttggttgttgccatttttctagaatccgtgtcttttttggggaaatacagtcctttgaggactagaatttaatgatttctttacacatctaggattttttgagatttagaaaggatatggctttattcctaaggaagtggaggcagc

SEQ ID NO: 11874 - DNA, 870 bp, Artificial sequence
  DNA replication origin
ttcctagatgggatggcggccgggcagagacgctcctcactttccagactgggcagccaggcagaggggctcctcacgtcccagacgatggggggccaggcagaggctgcaatctcggcactttgggaggccaaggcaggcggctgggaggtggaggttgtagcgagcctcgatcacgccactgcactccagcctgtgcaccattgagcactgagtgaaccagactccgtctgcaaacccggcacctcgggaggccgaggctggcagatcactcgcggttaggagctgcagaccagcccggccaacacagcgaaaccccgtctccaccaaaaaagtacgaaaaccagtcaggcgtggcggcatgcgcctgtaatcgcaggcactcggcaggctgaggcaggagaatcaggcagggaggttgcagtgagccgagatggcagcagtacagtccagcttcggctcggcatcagagggagaccgtggggagagggggaccgtggggagagggagaggagggagagggagagggctggttgtgtgtttttaatgtagtggttggggaaggcttcactgggtagaagacattttagcaaacatctgaaggaggtgagggtgtgagcctttcagatccctgggagaagagcgtaaggaacagcaagtgcacagatccagagaccagaatgaggagcaaaataagcaaaggagagtgctgtcaaagtggtgataaaggacagataatgtagtgccatgcaggccattctgaggggtttagcttttttttttttttttcgttacagaatctcactctgtcgcccagactttagtgcagtggcgcgatctcggctcactgcaacctccacctcccgggtt

SEQ ID NO: 11875 - DNA, 1048 bp, Artificial sequence
  DNA replication origin
ccctttctattacacaaaaccgccattgtcatcccgtcccgttctcaatgagctgttgagtacacctcccagacggggtggtggccgggcagaggggctcctcacatcccagtaggggcggccgggcagaggcgcccctcacctcccggacggggcggctggccgggcggggggctgacccccccacctccctcccggacggggcggctggccgggcggggggctgaccccccacctccctcccggacggggcggctggccgggcggggggctgacaccccaccttcctcccggacgggggctggcccccccacctccctcccagacggggtggctggccgggcggggggctgacccccacctccctcccggatggggtggctggcctggcgggggctgacccccacctccctcccggatggggtggctgccgggcggagggtctcctcacttctcagatggggcggccgggcagaggcgctcctcacatcccagacggggcggcggggcagaggtgctccccacatctcagacgatgggcggccgggcagagactcccctcacttcctagatgggatggcggccgggaagaggtgctcctcacttcctagatgggatggcggccgggcagagacgctcctcactttccagactgggcagccaggcagaggggctcctcacgtcccagacgatggggggccaggcagaggctgcaatctcggcactttgggaggccaaggcaggcggctgggaggtggaggttgtagcgagcctcgatcacgccactgcactccagcctgtgcaccattgagcactgagtgaaccagactccgtctgcaaacccggcacctcgggaggccgaggctggcagatcactcgcggttaggagctgcagaccagcccggccaacacagcgaaaccccgtctccaccaaaaaagtacgaaaaccagtcaggcgtggcggcatgcgcctgtaatcgcaggcactcggcaggctgaggcaggagaatcaggcagggaggttgcagtgagccgagatggcagcagt

SEQ ID NO: 11876 - DNA, 1271 bp, Artificial sequence
  DNA replication origin
tctgggatgtgaggagcgcctctgcccggccgccccatctgagaagtgaggagaccctccgcccggcagccaccccatccgggagggaggtgggggtcagcccccgccaggccagccaccccatccgggagggaggtgggggtcagccccccgcccggccagccaccccgtctgggagggaggtgggggggccagcccccgtccgggaggaaggtggggtgtcagccccccgcccggccagccgccccgtccgggagggaggtggggggtcagccccccgcccggccagccgccccgtccgggagggaggtgggggggtcagccccccgcccggccagccgccccgtccgggaggtgaggggcgcctctgcccggccgcccctactgggatgtgaggagcccctctgcccggccaccaccccgtctgggaggtgtactcaacagctcattgagaacgggacgggatgacaatggcggttttgtgtaatagaaaggggggaaagggggggaaaagattgagaaatcggatggttgccgtgtctgtgtagaaagaagtagacatgggagacttttcattttgttccatactaagaaaaattcttctgccttgggatcctgctaatcggtgaccttacccccaaccctgtgctctctgaaacatgtgctgtgtccactcagagttgaatggattaagggcggtgcaagatgtgctttgttaaacagatgcttgaaggcagcgtgctggttaagagtcatcaccactccctaatctcaagtacccagggacacaaacactgcggaaggccgcagggtcctctgcctaggaaaaccagagacctttgtgcacttgtttatctgctgaccttccctccactattgtcctatgaccctgccaaatccccctctgcgagaaacacccaagaatgatcaataaaaaaaaaaaaaaaaaaaaacacaaccagcatccattctcttatcttcctccactttgcatttctccattgtttaacatcacttgcacacctttaatttttagtttattaattcatactgcaaacgaactcagttcttatcatgtgccaggtattgtcctagttgctgacaatacagctgaaaataaaatagacaaaaatcctatcttttgaatcttttgaaccttgcattgggagtgacagacaaaacgaggtaaatcagtaaaatacgtgagacacaaagctaaaggaaaaaaataagaggaaagggcagatttttgtgtcttccttccagaatgg

SEQ ID NO: 11877 - DNA, 1132 bp, Artificial sequence
  DNA replication origin
caaactccggtcctgcccatcccctcctgaaatcagcgccctggcagtcccaggccacagccctcgcgggcacagagctgctctgattctgcccacgcctccgggaggaaaagggtgcaaatcaggggcgcctcggcccctcctgggtcgtctatccccagggccacccccgcgcgcggccggcggctgggaccgtacctcgggcgctggcgaagcggcacccagcgcgatatggctggtgcagtccaggctcatgacgacccgagcccgggggcgcgctcggacccggaaccggccctgaggaagcggcggcgccgggagccggcgggtggcgcgggtgtctcctcgggcaacgggtaaacaccgcggggacgcggcggcgcgcggctgcgcgcgagtagggtggcccggccgcaggaggccggggtggaccccgaacccccgagcgtggcctccgtggcgagggcctgcaactgagcggccgaaactgccagggcgacctggggggagtcggcggggataacggtcggtcctcccggtgggactctgcagtgaatgcaattccaggcctcatccttatgtcagcgataaatacagccagtgggcactgtgaacggtgctggcgcgagtgaggcataggaaacttcacaagggtgaacggagcatttatttagcacacactgtgtgcaaatgtgtctgcgagcgtgcaacctgtgcaggtccgggtcctgcgcttggtttaatactcagctgtcccagtcttgacgtttttaggaagttttgaacaaggtgtcctgcattttcattctgtaccggggtccacaaattatgtagcctgccctggtgtgcgttctttcatttcaccttctcaacaaccctgcctggaagtacgggtactagtaataccagtgttagtaacagccacagctgctcattatgaaatactcgtgctcgtccatgcactgttctaagtgcttcccacgtatgatcaatctccttaaatgaaacaagattatgaagtggatgttagaataatccatctgcaagacaaggcaacagtcacagggaaataaaataaaatttccaagatgtacagggtaagtggtagaatgaagatcaggctccagatcat

SEQ ID NO: 11878 - DNA, 1663 bp, Artificial sequence
  DNA replication origin
tgaacgcagcgcgggctgcacgcagaacccccgggctgggccgcgcgccccgggctccctgcgcgcaccctcgggtcgcgcgtcccgcggctcccgcagctccctaggctctcccttctccctccctccctccctccctcctgccgggcgcggcggccaccccgacgggcggcgcgggcgcgggtacctgtagaatgccggcgggccggcctcgcgcaccgtgtagccgctgggctcgttctccaggtagtagggcacctgctggccgtggggctgcaggaaaggcgacagctgcggcggcgggtgcagtagcatcagcgggctcggagacacgctgttgagtggggggaaaccccccaggccgttggagccgaacgccgcagcctcagacccggggccgtaggggaggccggtctgaccgtagacctgcgcgttggcggcggccgcggcgttgaactcgtaggcggcgccctcggggtagttgtacacggcgggcttgctgctgtccaggtacacctcgcccaggggccgctccagggggatcttgagctgcggacggttcaggggctccagctcgttcccttggatctgatgcagtagggccatcccagatgctttggtgtggagggtcatggtcatggtccgtggccgcgggcagggtgcagaccgtgtccccgcagggcagaaggctcagaaaccggcgggccacctggaaaaagagcacagcccgaggttagaggcgacgcagcgcatgtcccgccgacacgcgagctctggccccggccctgccccgggagcctgcgggtccggtgaagccgggcgacccgacgggagcaagtgcagtcccaggacgaacgccctccgccagctcctgggctcccgggcctccaactttaagtactggtctcccgagctcatatgcattacaaaggtgctggaggacggccagggactgttgccttgccctgacattggcttaaacatcactccaggcacaactcgatttggagcgatcccaaagagcagcttccctgaactttactttacttgtcgtcgctgctggatagaggctgagtttcacggccagggggcgggggcgcacgaggatctgctaaaggtggcccagggaagactgggcttaaaataaacgcgaaagacggatccaggggccggctttctctaatgtgctgccttatgtgccccgtgccagactccgatatatctctgtttgtctctctttctgtttgattccccctcctcgttggctagaaatacgtagtgtgtacataggatgaccctggggaggactacactgtaaccgagatagggcagatagaatggggtgtgcggttgcatacgcagccagccacagacagctatatttagcagctgggggaactgacagggggcatctgaggggaagggggcggagattcagggtatacatataggaagagctgcattttgccatcaggagaatgcaacctgccaggacctcagtttcttcctctgcaaaatgctcccaaagtagatagacccttccacaaccttctgagattctctcagcctgacttgtgtgtttatgttggaccacagtactgtacttggtcccattaggaattctcatgtgaaggatgattcagaaaaacctttggttagggcg

SEQ ID NO: 11879 - DNA, 1621 bp, Artificial sequence
  DNA replication origin
cgggaggtgaggggcgcctctgcccagccgcccctactgggaagtgaggagcccctctgcccggccagccgccccgtccgggaaggaggtgggggggtcagccccccgcctggccagccgccccgtccgggagggaggtgggggggtcagccccccgcccggccagccgccccgtccgggagggaggtgggggttcagccccccgcctggccagctgcccagtccgggaggtgaggggcgcctctgcccagctgcccctactgggaagtgaggagcccctctgcccggccagccgccccgtccgggagggaggcgggggggtcagccccccgcccggccagccgccccgtccgggagggaggtgggggggtcagccccccacccggccagccgccccgtccgggagggaggtgggggttcagccccccgcccggccagccgccccgtccgggaggtgaggggcgcctctgcccggccgcccctactgggaagtgaggagccgctctgcccggccaccaccccgtctgggaggtgtgcccaacagctcattgagaacgggccatgatgacaatggcagttttgtggaatagaaaggggggaaaggtggggaaaagattgagaaatcggatggttgccgtgtctgtgtagaaagaggtagacgtgggagacttttcattttgttctgtactaagaaaaattcttctgccttgggatcctgttgatctgtgaccttacccccaaccctgtgctctctgaaacatgtggtgtatccactcagggttgaatggattaagggcggtgcaagatgtgctttgttaaacagatgcttgaaggcagcatgctcgttaagagtcatcaccactccctaatctcaagtacccagggacacaaaaactgcagaaggccgcagggtcctctgcctaggaaaaccagagacctttgtgcacttgtttatctgctgaccttccctccactattgtcctgtgatcctgccaaatccccctctgcgagaaacacccaagaatgatcaattaaaaaaaaaaaagaaaagaaaaaaaaaaaaaaatgaacaaaacctccaagaagtttgggacagaattaaacaaccaaacctaagaataattggtgttcctgagaaagaagagaaatctaaaagtttggaaaacatatctggggggataattgaggaaaacttccttagccttattagagacctagacatccaaatacaagaagctcaaataacacctgaaaaattcatcacaaaaagatcattgcctaggcacattgtcataaggttatctaaagttaagataagaaaaataatcttaagagctgtgaggcaaaagcaccaggtaacctataaaggaaaacccatcaagttaacagatttctcagcagaaaccctataaactagaagggattggggccctatcttcagcttctttaaagaaaacaattagcagccaagaattttgtatccagcaaaactaagcttcttaaatgaaggacagatacagtctttttcagataaaaacaacgctaagagaattcgccactaccaagccagcactacatgactacacgaactgctaaaaggagctccaaatcttgaaacaaa

SEQ ID NO: 11880 - DNA, 1036 bp, Artificial sequence
  DNA replication origin
gaggggctcctcacttcccagtaggggcagctgggcagaggcgcccctcacctcccggactgggcagctggccaggcggggggctgaacccccacctccctcccggacggggcggctggccgggcggggggctgacccccccacctccctcccggacggggcggctggccaggcggggggctgacccccccacctccttcccggacggggcggctggccgggcagaggggctcctcacttcccagtaggggcggctgggcagaggcgcccctcacctcccggactgggcagctggccaggcggggggctgacccccccacctccctcccggacggggcggctggccgggcggggggctgacccccccacctccctcccggacggggcggctggccgggcggggagctgacccccccacctccctcccggacggggtggctgccgggcggagacgctcctcacttcccagacggggtggctgccgggctgaggggctcctcacttctcagacagggcggttgccaggcagagggtctcctcacttctcagacggggcggcccggcagagacgctcctcacatcccagacggggcggcagggcagaggcgctccccacatctcagacgatgggcggcagggcagagacgctcctcacttcctagatgggatggcggccgggaagaggcgctcctcacttcctagatgggatggcggctgggcagagacactcctcactttccagactgggcagccaggcagaggggctcctcacatcccagacgatggcggccaggcagagacgctcctcacttcccagacggggtggccccgggcagaggctgcaatctcggcactttgggaggccaaggcaggctgctgggaggtggaggttgtagcgagctgagatcacgccactgcactccagcctgggcaccattgagcactgagtgcggttttgttcattttttaaattcttttttctttgtctttgttggattgagttaatttgaaaaccttgtctttgagctctgaagtt

SEQ ID NO: 11881 - DNA, 1441 bp, Artificial sequence
  DNA replication origin
tatattagttaatatataatgtaaaatatttgataccacttgctcttgttcctgttccagaacattctgtagtagtttctgcttggtactaaattcttgatgtaggctttcccatttcattctcatctggtcttcagcggatgatttctccccttccatccccaactcctgggataacacatcaggtttttcgctattagaagaataaataatctaagtttacaatgtgcacaaaaaagtgataagacaggtaacttattgtgtgtaccagacctggcttctcaaatgaaataagattaccttagttattagcttacactttaaaaataacaaaaatgtttaggccaatcataaagcaactatattcctactcattgataaactgaaccatgtgcagaagggatacttaaaaatgcattgaataaaaataattgtaacatttggaataaaaaattatagcacgattacagactagtatcctttggcaaatagcagaaaagttagttcaaaaccttaaaaatgtgttagtctagggagagttacgattatgagtccagagaaaacacaggacacaggagggcggtgcaggacacaggagggtacaacaggacacagagaaatagtacagggcctggaaaggtagtacaggacagaggaaggatcgtacaggacctgggaaggtagtacagggcatggagggatagtacaggacctgggaaggtagtacaggacacgggaatgatcatacaggaactgcgaaggtagtacagggcatggaggtatagtaacagggcctgggaaggaagtataggacatggagagataggacaggacctgagaaggtagtagaggaccctgaggaggaataatacaggacctgggaacgtagtacagggcacggagggatagtacagggcctgggaaggtagcacaggacacggggagatagtacagggcctgggaaggtgatacaggacatggaggggtaatacagggtctgggaaggtagtacaggacacggaaagatagtacagggcctgggaaggtagtacaggacatggagagatagtacgggacctgggaaggtagtataggacacggaaagatagtacagggcctgggaaggtagtacaggacacaggaatgatcgtacaggatgtgggaaggtagtatagggcatggaggaatagtacagggcgtgggaaggtagtgcaggacataggaaggatcgtatagagcctgggaaggtagtacaggacacagagagacagtacagcacctaggaaggtagtacaggacacggagggatagtgcagagagatatgggaggaaggccctgcagtgtcatccttaaaggtaggcagcaatgtgacatctgagattggtatggctcttatttatttatttatttttgagacagggtttcactctgtcacccaag

SEQ ID NO: 11882 - DNA, 1532 bp, Artificial sequence
  DNA replication origin
tgtgctggagatgtggctggggtttctctcacagtggaggcaagtaattgcaactcagaaataagttgccgcttggctgactcttctctattattgtacaccttgaaggcgagattgattaagtcttgttgtggggtttgagggccagaatctaatttttggagctttttctaatgttgggagtgggttgagtagtaaaatgcatattgagaataggacggccttctggcccctctgggtctagggcggcaaagcatctaagggttgttgccaaacaggccatgaactgggctgggcttttatacttgacgaaaaagagcctgaacactaactgatttgagagaggtcagataaagaaaaaggagggttaaccttgactctgccttgagctgcagccacctctgtaagaggaaatcgttgggcaggttggggagggctagtcgtggaacaaaactataagccagacagggtgggaggagggggaggtgatagaaggattatagggctggggagtggaggctgaggaagaattaggacctggctcagcctggtgaggagcagcctggtgaggaggggagaggtcagatgggtccatagaaaaggaggattcaaaggactcagagcttggggtggagactgaaggaacagacaggagagaaagaagatttgtgatgagtcgcactgggagcagagactagggagggactgatgtgtaaaagaatgcctggatgtcaggcatctcagaccatttgcacatttttcaagaaaaatcatccaggtcttgtaagatggagaaatcaaaagtgctgttttctggccatttagaaccattgttgagtttgtattggggccaagcagtgttgcagaagaaaataaggcagtaaggttttaggtcaggcgtgagatgaagaggttttaagttcttgagaacacaggctaagggagaagaagggggaatggagggtggaagcttgcccatagtgaaggaggtaagtttaaagagaaaggtagagacacagagaagggggtggtgagcagccctgggctgtaatgtgggtgagcagccaaagcaggcgtctccacaattgatttgccaccaagggaatgtgggtgaatgaccaaggcaggcgtccccacagtgatcagacactagtggaatgtgggtgaataatcaggcaggcatccccacagtgatcagacactagtggaatgtgggtgaataatcaggcaggcatccccacagtgatcagacactagtggaatgtgggtgaataatcaggcaggcatccccacagtgatcagacaccagtggaatgtgggtgaatgatcagggcaggcatccacacggtgattaaacaccaagggaagactgtcttcccaagtccgtgacccacgctggagttttgtgtccacagataaaatgtgtctcctttgtctctattagagaggaaaaagaactggaattggaaggacagggagattgaaaggtagcgagagaagctggagaagagagtgaaaagaccgcttgcccg

SEQ ID NO: 11883 - DNA, 1409 bp, Artificial sequence
  DNA replication origin
gcccaaggccgtgcatctccaggaggtagggaagcctgcgagcctccgggtccccgcccccagctcttccaggcaccggcgcatcccggagccgggcgcggggcgcggggcacggagccggggagggggtgtggcgggccagggcggtgcagggaccctgcccagaggctgaaccggcctgggcgaccttccttcccgacaggagcagtagatgcgtgggggagggcgaagggggaggcctcaccccccagcgagcagccgggaggaggaaccggtcgcggagggcggggagcgcggctgagcagcccggcgcgggagtgagtgtgggcgagccagccagggtgagcgcgggcgccgggccgcggccgccggccgcagcgggctgagattgttgtcctctgtcaccagggcggctgggctcccgcagtcctgcagaccgcgcccgatcccggcgacagggcgggcggacagccgcgcatccccggggtcccgccgagcctgggcgcagagagccgggaggaagcgttcgctcgcttcgccttgctgctgggaaactgaacgaggccgagagagaaggtaaaaggaaagacagagactgggagacagggagagacagagacagggagaggagagagaggtgcaagacgaacacattgcagacaaattgtcagcaagtttgtgcctgcacgctggggctctgcgtgcttgatgggagggggtggtggcagtgatgtgtgtacgtgtgcgatactcatagataaggagactaggaggttggggagcctctttgcatctcgtacgtagatgtccctattaatatccccctctctgagttgtcatttccgcttgtggcacatctcctgggctccaatggtgcagaagcaaaaggcagccagcctcttattgtgatggtcggtactgttgctactatcagatgggagaggtagggcgttgaacagattctaggagcctcccttcctccaccccctgactattttaggaagggctgggggagggaaatggcttgaaggctgcgcggaggccctggcgcgtcagactccagcggcgctgtcatggtgcagttgcttcccggcagagcctgcactagagggcaagagaactttcgtctcctctttataaagatacgtttcacatagagagatcttgcattgctggcggaggagttctgggaaatggtggtgcacaggcggccaggtgcatcccaacgggcaggcatccgtgcaaaacgaagcagccatcagccgcacaggaagaagccccttgggaaggcaggctgggtgtgctgactgggatcccagactttggatgctggaagttctgcccccttccgtaaatagagtcaggtccagcccagagggaaatatcagcaatgaagccttagcatccca

SEQ ID NO: 11884 - DNA, 1137 bp, Artificial sequence
  DNA replication origin
ggcggatggcagcaaaccggctccgctagaggaccgagccgcccagccccgctcccccggacccatcggcgcgctgcccacacctccaggcgaccgggtaagacgctgcctccaaaacaagcggtgctaagtaaatgacatcaaaatgtctgctttgcaccaatggatggatttttttcaaggtaggggggaggtgaaggaaggagggggcggagagcgcgaccgcccatgccccggcgggggcggctgcgcggcgctggggtctcagctgtggccgcggcgccctgagcgggagcgggggccgcgccgcgggtccgggaagttgaatcccgcgtcgctgcctggacgcggtccgctcgccgccctcagctgctgcagggaaccgggcgagtgtcctgcccgccggggaacgctcggccaggtcccagagttcccgcggagagcggggcgcctgctgggggcggccgggagggccgggccaggggcgcgggagaccccgcggggacgcgaggtgttgcgggttttgtgcggttggttgggaacgaggagaatgtgccatcaacagtgtccaatcgactgatcaccttgggtgctgtgtttcctcccttatctctctttacctttgggaaaatgcactgctcaggtggggaaggtgttcgaagaagaggttgcgaaaatgaatcctttgaccagcagtaaaataccggaggggtgtgtgtgtgtgtgtgtgtgtgtgtatgtgtatgtatgtatagggggtggggggtctcttttgttccttcccctccccttagtcaaaggaaagggagtcctggcgtgtgcggcgcggggtggattccacagccaccgagggggcgaggacgaggaacgcccaccaaccgcgagtcgctgcccgggtgggcgcatcggagcctcctttgctgtaggtgatggtggtctttccgtgatcgatggaatcatagtttaatctctgcctccccgccagcctccctgctgtccctcatcgagtgctgcggcagaggctgggtgcagacacggccgctttctcctcttctctctgcctccctgtctccctgaataaatgccggaggactaggggatggcggagggacagagctggactcggaagccgcgggt

SEQ ID NO: 11885 - DNA, 1488 bp, Artificial sequence
  DNA replication origin
gcgaggagagagggagagcggcgaggatgcagaggagggggagggggaggagggagcggtgggcggggagggagcgagagccgctcggcagcgcgcatgcgcctcgcgggccggcgcagcccctcgcccggcgcggccggaggggcagcttcccagcccctgcgcgcggccgcgagagtcccggccccgccccctccccgggcggcccccggccccgcccgacctcgcgcgctcgcctgggcgcggcgcccaccgtgcggaggggctcggccgggactctcggcttcggtgacgcccgtccggagcttcgcgggaggcccggagtcccgagagcttccctgggtgacagcggctctccgcccgggcccctgcaactccactcgcccgtagcccgcgcgctgctgtcctgggctgcgcgggagccttgcacccaggagccggcctgccaggcacagcagcctgcctgctccgggtcccggaggaagcattccctgcgtgggggttcaaggaagtgtgaagttaagcaagttttgcttcccgaaggactttatgaagcgtcctttactttattgacttcctcgcccagaaagaggaccttttctcctaagaatcagtgcaggtgctctctggcctagcccatgccagctgcctcaggcgcccggaccactcgctggagcagagttttgagtgagaaaagccgatgacaaggcaagagtggagaattattaacggaggtgctgatgcttggggcctagagcatccttaggggacagcttggtagttaccaggtctgataatcgttctgtgcccaagtggagcccagcttggtagggaaggagcttgggatacttaatgcaacccgagcgctagattgcatctccaatgattagactaaagtgtttgtgcggaggaagtggagaagcagtgtcttgctcttcagataccacatctgtgggaagaggagggagttcctgcaggagtgaatgggcttttttttcttacacctaattaaaacagattacttgtaaatctgtgtgagttccccttccttgtgtgttcatgtaagcaagcgttgtgttatttcagcctactgaactctcctgtgcctccatcctcatagactcacgggtacttgggttaaatatgtctcagggcctcctccagggcctcccatggctttgagtactagtgctcttcaaagtgtcttcatttttgttggatttcacagaagtatttgtctttgtcttccaggctgctataacaaaataccatagactggatggcttataaacaacagaaactgatttcttacagttctggagactgggaagtccaagatcaagatgtaggcagataccttatttggtgagggcccaattccgagctcatgaactgctgactccttgctgtgtcttcacgtggtggaagtgagcaagggagctctctggggtctcttttataaggacactagtcccattcatgagggct

SEQ ID NO: 11886 - DNA, 1987 bp, Artificial sequence
  DNA replication origin
ttaactgactaagcataattaacctaattagaaatattattttgcctgtctttattactcctgttctagaacaggcacaaaaataaatgcctaaaagaccaagccttggttagagtcatgtcatgtctccagcaagatgcttcacaaaacaaaaacaatcaagaaatattaaacacaatgagtactaataaacattttttatcttcattgtttgtaatgtgatttcgatgtaaggaagttctcaactcctgcaagtaaatgaaaacacataaaacagagattgctattttgttaggataacaaatatgttgtattatttgccatttaaatagtcaaaacatctataaataatagaggctcttatttgggagcacttactaatggccatgcactgtgagagttttatctatattatttcactttattttcaccatcccctaataaggcaggagttaatgcttcattttataggtgagaaaaatgagaccttaagagatcaactattttgcccaaggtcaaacaactagtaagtgatgggccctgatactgatcatagctatctgagctcaaaacctgtcttcttgatgacactattatacttcctcttatcaagtgtttgactcctggtaaatctatgagttactgtttatttgtgttgctataaaggaacacctggggctgggtaatttataaagaaaagaggtttatttggctcatggttctgcagactatacaagcacagcaccagcatggcctccgcttctggggaggcctcaggaagtttgtagttatggtggaaggcagaggggagacagggaagtgaagagagggaaagtgacagtgggggagagagagagagaaagaagaaggaggaggagtaggggaaggggaaggagaaggggaaggagaagaggaaggagaaggagaaggggaagaggaaggagaaggaggaggagaaggggaaggggaaggagaaggggaaggagaagagggaggagaagaggaaggggaaggagaaggggaaggagaagaggaaggagaaggagaaggagaaggggaagaggaaggagaaggagaaggggaaggggaaggagaaggggaaggagaagaggaaggagaaggagaaggggaaggggaaggggaagggaaagaggaggaggagaaggagaaggagcaggaggaggaagaggaggagccaggctcttttaaacaaccagctctccagcgaaagtaactgtgcgagaactcactcatcaccaaggggatggcgccaagccattcgtgagtggtccctccccatgatccaacacctcccaataggccccatctcaaacatcactggatcacatttcaacgtgatatttggaggggacacacatttaaaccatttcagctacatcatcaagtattaaccctctggacaatacaataccattgtccttttaagtatttaaagccagtttcagactacctccataaaatgtgctgcataaataatagggtatgcgtctggatttctaggtgagacatcttgaagctcttccttctcatgctggaaaggctgtcagaaagttcaagtcctcctcttgacatagtacatgcctatttgctcattgggataggctaaccttttcaagcaatgtgcggcaccccttagcttcaataaagtgttcaatgtaagaagaatatgctctgtatccataataaaatcaccacaaatcaaaaaaatgaccaagttgcattccctagtctaattcttaatccttggagtctgtctctttttgcatcaaaaatccaggcaatgacatgctaggatccccaccaattagatagtgttgcttgatcaagacgtattttctcctgatttaaatgctaaaaagattggaacagtgtatgtcaccatgactgcatttattgtctttgttcaatataatcttgatgaacaatacatcagttgatgaaatggcctgaactcatctttaattgt

SEQ ID NO: 11887 - DNA, 1002 bp, Artificial sequence
  DNA replication origin
tcggcactcgggccggggggcgctctccctgcctggccccggtgcggtgcccggcgacccgggggcccgagtgcagaggcacaaggtgcctttgtgtgggtgactcccgcgggacctcgtccatgccgcctgcccagagccgtccgcaggcgtgacagggctgtcggacaggtagagggagactccggcgggtccgccgagcctgtctgtttttgttggagaaggcgagagggccgcgcaaaagccaacaccatagcatttgcgccagggagaaacctcgagccaggactccccgggaggcagtgacttttgctccgggaggcgccagtatccccggtggcgctgcattttcaggccacatgtaagcactgggaaggagaaatataattgtttggaaccactgtcttgattcatacaatatttgggatgaggaaggcagtggggctggggcggtgggggggtggtggggggaatgagcagaggtagaagcttgtcctcctagctggctcgcttacttttcaatgtctcctacgatttcgagggaaaggtactagagtttactcaacccttttctgtactttcaagagaacaaagtccaccaagaacaatctgtattttcatggtttccccccacccccaacgacatctctgtttcaagttactatttgtttttctatctgctcttccaggtgaggaatggtgttctttctcagtaataactagaattgtgtagcgctttacagtttgctaagagctctctctgttattgtccttggtcatcacagtaagcctgtgaggtaggtaatactggtaagaccaggtcgtctttcaaaccgtcccacccatggctgcagcataatgaaaactgatcaccgctacatctcatttctcacgcctgtgacttacacatagaccacgtggaataggatgtccgaggtgtgtggggtgtgtcagtgggtatgtctgaccatttcctgctcctctgggagaactccttgagaa

SEQ ID NO: 11888 - DNA, 923 bp, Artificial sequence
  DNA replication origin
gctgaaactttgcaacccgagcgcgcacgctctgcgctcggccctgccagggcggcacgggagggcggcgcaggaggtgggacctgcgccgggaaggctccgggacgccagcgcacgcggagcggggaccccggagagccagcaggcgagaagaccggccgagggagagccgatcgcgcctcgagagatccgaggaagtggtcgcgggccgggaggctcccgtgccgagccgaggccaggggtctggggtcgcagcccggcgtgcctgcagctgccgtcgctcgggagcagcagctgtgcccgggatcccggcggcggcgggggaaggaggagctgcagctggactgtggcagctggagggagagggccgggctcccctggcggagccgcgctgggacgactggctgaccgcggccatgcagtcttgacggagtcgctcgggcgcaggggagcagccgcgggcgcgccctcccgggaaggggcaccggagcgcaggcagcagcactttatctgcgactctccagcccagcgagaggcgaagcggtttaccatggaacccgtgaccaagtggagccccaaacaagtggtggactggactagaggtgcgcgggccttgggggggtccggagtcctccagcctcggggatggggcggacgaggagctggggaagagggtacttggcccttcctcccggcgagaagcggtgagggcacagcccggtgacaatgcaaacttctgccgagtggcctgtgcgctcctatctctcgtacctgctccgagctcttcctttccagggtgcggattgtggcaagccgaggggagccctatctttaaaccagggagtaggggtggcctttctgtggcggttgagggctggggatgccgatctcgggactcggcactcgggccggggggcgctctc

SEQ ID NO: 11889 - DNA, 901 bp, Artificial sequence
  DNA replication origin
cgcggtcagccagtcgtcccagcgcggctccgccaggggagcccggccctctccctccagctgccacagtccagctgcagctcctccttcccccgccgccgccgggatcccgggcacagctgctgctcccgagcgacggcagctgcaggcacgccgggctgcgaccccagacccctggcctcggctcggcacgggagcctcccggcccgcgaccacttcctcggatctctcgaggcgcgatcggctctccctcggccggtcttctcgcctgctggctctccggggtccccgctccgcgtgcgctggcgtcccggagccttcccggcgcaggtcccacctcctgcgccgccctcccgtgccgccctggcagggccgagcgcagagcgtgcgcgctcgggttgcaaagtttcagctccggttgctgcaaaccgaataaaagagagggcggggccgagggtctagggaaactcgtgggagggggcgggtccgcccgaagcggcggactcgggttactttccctctctaagccggtccggctcacacccgcagcgtcccgggccccgctttccttttcaaggggcgggttgtagatcgcgcgcgcaccctggagagcccgctggtttgtgtgaggccctggccctgtgggtagcagaacactctgtctcgctgtgagcaacaatacactaaaaaaaaaagaaaagaaaaaaaaaagtaagatctgcatgttctgttcattttaaatgctttatatcgtaatactactctgccattaagccgtcattttaggtttcttaaagtagaacaatttttttttttagatggagcctcgctctgtcgcccaggctggagtgcagtggcgcgatctcagctcactgcagcctctgcctcccaggttccagcg

SEQ ID NO: 11890 - DNA, 1101 bp, Artificial sequence
  DNA replication origin
ctcccagacggggtggtggccgggcagaggggctcctcacttcccagtaggggcggccaggcagaggcgcccctcacctcccggactgggcggctggtcgggcagggggctgaccccccccacctccctcccggacggggcggctggccgggcagaggggctcctcacttcccagtaggggcggccgggcagaggggctcctcacttcccagtaggggcggccgggcagaggcgcccctcacctcccggatggggcggctggccgggcggggggctgacccccccacctccctcccggacggggtggctgctgggcggagacgctcctcacttcccagacggggtggctgccgggcggagaggctcctcacttctcagacggggcggccgggcagagacgcccctcacctcccagacggggtcgcggccgggccgaggcgctcctcacatcccagacggggcggcgtggcagaggtgctccccacatcctagacgatgggcggccgggcagagacgctcctcacttcctagatgggatggcggcgggaagaggcgctcctcactttccagactgggcagccaggcagaggggctcctcacatcccagacgatgggcggccaggcagagacgctcctcacttcccagacggggtggcggccgggcagaggctgcaatcttggcactttgggaggccaaggcaggcggctgggagatggaggttgtagcgagccgagatcacgccactgcactccagcctgggcgccattgagcaccgagtgaaccagactccgtctgcaatcccggcacctcgggaggccgaggctggcggatcactcgcggttaggagctggagaccagcccggccaacacagcggaaccccgtctccaccaaaaaaatacgaaaaccagtcaggcggggcggcgcgcgcctgcaatcgcaggtactcggcaagctgaggcaggagaatcaggcagggaggttgcagtgagccgagatggcagcagtatagtccagcttcggctcggcatgagagggagaccgtggaaagagagggagagggagaccatggggagagggagaccatggggagagggagagg

SEQ ID NO: 11891 - DNA, 1000 bp, Artificial sequence
  DNA replication origin
ccgccatcccatctaggaagtgaggagcgtctctgcccggccgcccatcgtctaggatgtggggagcacctctgccacgccgccccgtctgggatgtgaggagcgcctcggcccggccgcgaccccgtctgggaggtgaggggcgtctctgcccggccgccccgtctgagaagtgaggagcctctccgcccggcagccaccccgtctgggaagtgaggagcgtctccgcccagcagccaccccgtccgggagggaggtgggggggtcagccccccgcccggccagccgccccatccgggaggtgaggggcgcctctgcccggccgcccctactgggaagtgaggagcccctctgcccggccgcccctactgggaagtgaggagcccctctgcccggccagccgccccgtccgggagggaggtggggggggtcagccccctgcccgaccagccgcccagtccgggaggtgaggggcgcctctgcctggccgcccctactgggaagtgaggagcccctctgcccggccaccaccccgtctgggaggtgtgcccaacagctcattgagaacgggccatgatgacaatggcggttttgtagaatagaaaggggggaaaggtggggaagagattgagaaatcggatggttgccgtgtctgtgtagaaagaagtagacatgggagacttttcattttgttctgtactaagaaaaattcttctgccttgggatcctgttgatctgtgaccttacccccaaccctgtgctctctgaaacatgtgctgtgtccactcagagttaaatggattaagggcggtgcaagatgtgctttgttaaacagatgcttgaaggcagcatgctcgttaagagtcatcaccactccctaatctcaagtacccagggacacaaacactgcggaaggccgcagggtcctctgcctaggaaaaccagagacctttgttcacttgtttatctgctgaccctccctccactattgtcctatgac

SEQ ID NO: 11892 - DNA, 1035 bp, Artificial sequence
  DNA replication origin
gggcgggtcggcggcgggcgggggaggggctgggccgcggcgccttctcttctctgccccgctccgtttcggtccccctccctctagccccttcccctacactctccactcccttctgccccttcctccgacgggctcctgtttcacctccccgccgctcgggccgcaggaaccagccccgctcggcgaagacagaggaggaagcgctggcagcagcggctgcggcatccaatatggcggactcgagtcgggccgcgcagttcggggatccgcggcgccggctagcgcgccccctggcgactggaccgtgcgagccccggcggccgcgcggaaaccatcgagcgcgctggggccagagcgtcgccgcccgtaggcccggctgggctccgctgccctcgccttggctccggggccgcccgcgcctcgccccctccccgcgccccgcggacgcgggagtgagcgctgcggcatccgggggaacgccgcggcgggtttgtacagcaggaggaggcaactccaaagcgcggctctaataagagcctaaacgtgcccaagaagcggcaagttgaggaaatgtgcgcgtttcccttgtttcccggtggattggtccttttgcacaagcggcagggtttagttgcttttcacaactttactggacagtgccctaaacatccgcagccttcgccaagaaaaagttcctggtcatctatttagtaactgaactcaattgttttaactgcacagggagggaacattagaaaccaaagccttggattcgggttggggcaggcggcgagggaaacaggcatgcagcagctccttgcaggaaatgcccgctgcataggatccagggactggagtggcacaatgagcgcatttgtctgcaaggcgggaaggggaccctagaatgcacaacacttgaataggtgaaaagggaacccgtctgtttcggaagatgaattgttctaaaggaattttgccctaggatacttggagtaaaggtaaatacagtatttcttagatggattaggagat

SEQ ID NO: 11893 - DNA, 1229 bp, Artificial sequence
  DNA replication origin
cgcccgccgccgacccgccccggcagcgcctctgttccctagaacggcgctccccccgccctagcggccatgccggtgccgctctgccgctgagggagcccttccccgccagcgcgtgcccttccactccgccccgaggtcgcagcggcccgctctcccgccagcgccccctcctcgcggccacgcagcagcccgcgtctcgctctccccacccagtgcagtggccgccgcctcttccgccgccgggctcggggcctccgcagcgacaacatggaggccgtgaagaccttcaatagcgaggttggtatggcagccgggttcccctgctcctgcccgcaccgcccccacccctggtcgaggccggggcccggagggtgggcgcgggcctgcgggttttttaagggtggggtgagcggtggcctagcagtgcccgtgggggaggggtgtttctcctctgggtgcccctcccccgggtccgggaggagggttgggggagggccgccctggggcggagggaggttctggcgtctccggcgtcctatggaatggctgcgagctcggagggaaagacccggttgggccctcacccggagactcccgacaggtccctcgaggtcagttccgccgaggcctggcccgcccacctccttcctgggcctttgaggatttaagtggacgctggacatgactctccagaccttcccgggtcctcactgaggctaacaccgattgggggcggtgggggaaatgaacctacggggtgttgatctgtggtcacgttacacgtagtgtttataattgaggcattgttgactaggtaatttgccagctagggacttgagctaattggatggttggtaggcaggcaaaggttattctgcaatatcttttatttttactcgctcctcttctaatccatcacgacataaagacaaatggtagggagagatctgtgcatcgagagatggaagattatgggggaaacatttctcgctggttcattcacgtgtcaaacaagattttaaaaagcagattccattttcactgtgtagttgaatttactagtctggaagaagacaggttttgatgtattcaatttctttttaaactccgacttcaataggccttaatgtaaacatcaaacatagcaagtacacatctgcacagtcagcattagtatccctacccgtacgccttggaaagtgtaattatggccgggaacagtggct

SEQ ID NO: 11894 - DNA, 792 bp, Artificial sequence
  DNA replication origin
tgaggagaccctccgcccggcagccgccccgtctgagaagtgaggagcccctctgcccggcagccgccccgtctgagaagtgaggagcccctccacccggcagccgccccgtctgagaagtgaggagcccctccacctggcagccgccccgtctgagaagtgaggagcccctccgcccggcagccgccccgtccgggagggaggtgggggtcagcccccaccaggccagccgccccgtccgggagggaggtggggggtccagctccccgccaggccagccgccccgtccgggagggaggtggagggggccagccccccgcccggccagccgccccgtctgggaggtgaggggtgcctctgcccggccgcccctactgggaagtgaggagcccctctgcccggccaccaccccgtctgggaggtgtacccaacagctcattgagaacgggccatgatgacaatggcggttttgtggaatagaaaagggggaaaggtggggaaaagattgagaaagcggatggctgctgtgtctgtgtagaaagaagtagacatgggagacttttcattttgttctgtactaagaaaaattcttctgccttgggatcctgttgatctatgaccttacccccaacccggtgctctctgaaacatgtgctgtgtccactcagggttaaatggattaagggcggtgcaagatgtgctttgttaaacagatgcttgaaggcagcatgcttgctaagagtcatcaccactccctaatctcaagtacccagggacacaaacactgtggaa

SEQ ID NO: 11895 - DNA, 1495 bp, Artificial sequence
  DNA replication origin
ccgggttgggggtaaggtcatagatcaacaggatcccaaggcagaagaatttttcttagtacagaacaaaatgaaaagtctcccatgtctacttctttctacacagacacagcagccatccgctttctcaatcttttccccacctttcccccttttctattccacaaaaccgccattgtcatcatggcccgttctcaatgagctgttgggtacacctcccagacggggtggtggccgggcagaggggctcctcacttcccagtaggggcggccgggcagaggcacccctcacctcccagacggggcggctggccgggcggggggctggccccctccacctccctcccggacggggcggctggcctggcggggagctggaccccccacctccctcccggacggggcggctggcctggtgggggctgacccccacctccctcccggacggggcggctgccgggcggaggggctcctcacttctcagacggggcggctgccaggtggaggggctcctcacttctcagacggggcggctgccgggtggaggggctcctcacttctcagacggggcggctgccgggcagaggggctcctcacttctcagacggggcggctgccgggcggagggtctcctcacttctcagacggggtggccgggcagagacgctcctcacctccccaacggggttgcggccgggcagaggcgctcctcacatcgcagacggggcgacggggcagaggcgcttcccacatctcagacgatgggcggccaggcagagacgctcctcacttcctagatgggatggtggccgggaagaggcgctcctcactttccagactgggcagccaggcatagggtttcctcacatcccagacgatgggcagccgggcagagacgctcctcacttcctagatgtgatggtggccgggaagaggcgctcctcacttcctagatgggatggcggccgggcagagacgctcctcactttccagactgggcagccaggcagaggggctcctgaagtcccagacgatgggcggccaggcagagacactcctcacttcccagacggggtggcggccaggcagaggctgcactcttggcactttgggaggccaaggcaggcggctgggaggtggaggttgtagcgagccaagatcacgccactgcactccagcctgggcaccattgagcactgagtgaaccagactccgtctgcaatcccggcacctcgggaggccgaggctggcggatcactcgcggttaggagctggagaccagctcggccaacacagcggaaccccgtctccaccaaaaaaatacgaaaaccagtcaggcgtggcggcgcgctcctgcaatcgcaggcactgggcaggctgaggcaggagaatcaggcagggaggttgcagtgagctgagatggcagcagtatagtccagcttcggctcggcatgagagggagaccgtggaaagagagggagagggagaccgtggg

SEQ ID NO: 11896 - DNA, 1120 bp, Artificial sequence
  DNA replication origin
gcctgggcaccattgagcactgagtgaaccagactccgtctgcaatcccggcacctcgggaggccgaggctggcggatcactcgcggttaggagctggagaccagctcggccaacacagcggaaccccgtctccaccaaaaaaatacgaaaaccagtcaggcgtggcggcgcgctcctgcaatcgcaggcactgggcaggctgaggcaggagaatcaggcagggaggttgcagtgagctgagatggcagcagtatagtccagcttcggctcggcatgagagggagaccgtggaaagagagggagagggagaccgtggggagagagagggagagggggagggggagggggagggcaaaaattttattttttatttaaaaaaatattttgtagagacgaaggctgggtgcggtggctcatgcctgtaatcccagcactttgggaggccaaggcagcctgatcacttgaggtcaggagttcgaaaccagcctggccaacatggtgaaaccctgtctctactaaaaagagtacaaaaattagctgggcatggtggtgcgtgcctgtaagtctagctacaggggaggctgaggcaggagagtcgcttgagtccaggaggcggaggttgcagtgagctgagatcacaccactgcactccagcctggacgacagagtgagactccatctcggaaaaaaaattgcagaaacgaggtctctctatgttgcctaggctggtctcaaactcttgggctcaagtagtccttctgcctagtcttcccaaagtgttggcattacaagtgtgagccactgagcacagcctgaaatattctttgggtaaaatttgcctttcaaaaatttaggtttgagatttagcaatcagatacggctttgttttggcttttatgtttttaaaatgttttctacgtcatcctttcaggaggaggagcctagaaaacactgtgaatgaactatttcagataaaatgtagactttagtagagggaaaaccacatgaggtcagggtgtttgcacatttccacattctcaacactcagccctttcccaaaatatactgcacactcctaagtgttgaataaatgaattaataaataaacaaatggcggag

SEQ ID NO: 11897 - DNA, 945 bp, Artificial sequence
  DNA replication origin
cttccccaaggaatttaaagacggctcttcccgggtcccaccgaggaaaggcacgcaaaactgaggtcagcggccgcagagactttccatctccttccccttctgagaggagatggcttcgcagcggagatggcaatcgagtcggcactccaagacccagtcgaattgggactttccaggtggagaagctgcgatttttattattattttttcagactgagtttcgctcttgttgcccaggctggagtgcaatggcgtgatctcggctcaccgcaacctccgcctcctgggttgaagcgattctcctgcctcagcctcccgagtagctgggactacaggcacgcgccaccacgcccggctaattttgtatttttagtagagatgggggtttcatcatgttagtcaggctggtctcgaactcccgacctcaggtgatccacccgcctcggcctcccaaagtgctgggcttacaggcgtgagccaccgcactgggccaaagctgcgatttttattagaaaagcctgagtggcccagtgggcccagatgctgggaagggcgagggagctaaggagacccaggaatgaaagctgcctggaatcactctcctcgccttgaaaaaggctgcaccctggagaggagagggaagggaaggtagatgcaggccatgtgttagggtgggtcctacgagaagcagcgcccactcaggactagatgcggagggttttcttgggggaaatggccgtggaactaaatgaggagggagccgtgagagctggagagggccggaccttctgcaaatcagagcccaagtgaaggagggagggaagcacccatcccggcctccctgcagtctaagaaaagctcagcaagatcatccgtgagcccttcagccaaaattacgcatcatggggatcccgattctccccggaacctgcctgccttcgt

SEQ ID NO: 11898 - DNA, 965 bp, Artificial sequence
  DNA replication origin
cccttcccctttgttggccgcccctctctgcccccgctttcctgggagtcccgcggaaggtcgcggctgcggggcgcggcctggcaccctctccccggagggcggcagcgtccgggcacagcctggcacgggggacgaagcactttccagaaggctctgaaactaggtcccctggtcccctcgcgctgcgcgacacgccaggacccactttcagccccggtcccatcccggatgggaggaggcggcgccccggcctcctgataccgaggttctcgcccaaagccgagccgtgggtgcccggaggggagcgcccgctgcgcccacgcccgcccggcgacctcggagcctcagaaaggcgctgcggcgaagcaggatcccaggcggtcggctcagcgagtgtagaccgtgcggtccctgctcagcccctccggcctttccgagcgcgggagccatcccggacgggcgcggctcctgggggggctgaggtgccaagtttctgtgaaagccgacacgttgtgcccctaatggatcctatttaccaaaaacagttcagaaagaaaagagtccattcttccagccattcgttgctgacagccgctggaaaggtctgggagtaacattgcacgaggtatttctatctttaaggagcggcgaaatttaatattgatgagcttgcatgccgtttttttaaaatagacaaataggttaactttatttaaagagggagaaggctgcttgattccaaagataatttcattcagggggaggttttcctgcttttctctgcagaattcaggcaagaggccacttggtgacactcctcagcctccttgggtaatggtgagacctttatttactatgcgatgaagggcctgggattctcttctcatggttattcacacattctaccttttgctccccaaatgatgctgaccaccttattttaacagacaacaccggctatc

SEQ ID NO: 11899 - DNA, 1053 bp, Artificial sequence
  DNA replication origin
aggcaacgtggagaggggaaggatgctgcaatttttaaaaggcgaggaagcctctctgaatggtgacacttcagcagagacttgcaaggaggagacaccaagtgtatttcagggaaagggcaccgtgggcaggggcaacagaaagtgcaagtgccggagaggcagggaccagcatggccgcagcagagcaagcgaggggaagaagggcaagagaggtcagagaggggccacagagccagtgaaggcagccttgagggacagtttaaggactttggctttcaccttgagaaaaaaagtcataattagagggtgtgatagagaaggctcatcatgggacattttaaaaggatctgtgtagctgctgtgtggatatggattgtcagcgacacagtggaagcagcagggggacctgctaggctaccggaacgatgcaggggagaggcaatgcgccccagcttgggtgggggtggtaagggaggggggtggtaggggaggaggctgcctccggacacagctgaagctctggagggccgaagggagagccagcaggactcgagggcaggtggaagcaagtgtgagtgacaccaaggatgattccacactgttccattaaagccatgggagaatgcagacggcagagcagagcaggcttccgcgggcaagatgaggagttcagttttggacaagctgggtttgaggtgtccactggatacttaagtggtaataccagtctggagttcaggagagaagtgggctgctcacccacacaaagatggtatttaaaacacaaactggatgggttctccataagtaaacaaaggaaagacatggggtccaaggaggccctggggcaccttgacattaaggggtcaaggaaatgaggagaagcccataatggagacagaaggggcagttggtgaactgaattaagaggaaccaagagacctggcacggtggtggctcacacctgtaatcccagcactttgggaggctgaggcgggcagatcacctgaggtcaggagttcgagaccagcctggccaacgaaaccccgt

SEQ ID NO: 11900 - DNA, 1098 bp, Artificial sequence
  DNA replication origin
ggaaaatgaacttctatacttaatcctgaattcaggcacataaattaggtccatgacatgagatttgcatttttttaccccatggtaggtacccatcgcctgtgaagatcacactgaggccaagctgagaaaccagtgatctctggagaaaaatatttttctctcattttacttttctctggtttatcaagtatttagttactgcctgttgtgtcaggcattgatctaggagggctagagataaacagtgaacacagcaggtaaaaaagcatccttgcccacgtggagcttacttgtattttagtgtgtggacatacagagtaagcgggaacctcacaattaataagttatataatgtattcacagatgataagtgtgacggaacaaaaattgatcagggtgggagggatggggagtaggggccaggctggttgcagttgtgcatagggcaggccggtagtgctcagggaacaatggacacctaggagcacaggcttgtgggaggtcagggatggggccacgtggccgtcagggggcaaagccttctaggctgagggaacaatcacatgtgccccgatgtggcctgtttttcggcaggtgtgcctggaagggcaagggaagagcagagcagtgagaggtgaggcccagaggaagtgtgaggccagatcaggctgacctcaaagaccattgtgaggtccatttattggagggaagggagaagccgttgcagagaaggaggagcagggaagtagtgacatgatctgacgagtgattggtaaggatcactgagtgttgctgaaaatggactgaaggaggcagtggtgcaacagaggctttgccgtcacccaggcgagaggtgagggggtggagtctgcttggggtggtggcagtggcagtagagccaacagagctcgcccagagactggaaggagagggatcagaggtgacccccaggttttggcgtgagcatccagaaagttggagtttccatcagttaaaataggaagatgggtgtggagcagctttggggaacgatgaggaattggtttgggaactccttgtgtttaacttctgttcatgttgaatatttcacctgct

SEQ ID NO: 11901 - DNA, 1067 bp, Artificial sequence
  DNA replication origin
cgtgtctacctctttctacacagacacggcaaccatccgatttctcaatcttttccccgcctttcccccctttctattccacaaaaccgccattgtcatcatggccccttctcaatgagctgttgggtacacctcccagacggggtggtggctgggcagaggggatcctcacttcccagtaggggcggccgggcagaggcgcccctcacctcccggactgggcggctggccgggcggggggctgaccccccccacctccctcccggacggggcggctggccaggcggggggctgacccccccacctccctcccggacggggcggtggccgggccgggggctgacccccccacctccctcccggacggggcggctggccgggcggggggctgacccccccacctccctcccagaaggggcggctggcctggggggggctgacccccacctccctcccggatggggtggctgccgggcggagacgctcctcacttcccagacagggtggctgccggtcagaggggctcctcacttctcatatggggcggttgccaggcggagggtctcctcacttctcagacagggcagccgggcagagacgctcctcacctcccagacggggtcgcggccaggtagaggcgctcctcactttccagactgggtagccaggcagaggggctcctcacgtcccagacgatgggcagccaggcagagacgctcctcacttcccagacggggtggcggccgggcagaggctgcaatctcggcactttgggaggccaaggcaggcggctgggaggtggaggttgtagcgagccgagatcacgccactgcactgcagcctgggcagcattgagcactgagtgaaccagactccgtctgcaatcccggcacctcgggaggccgaggctggcggatcactcgcggttaggagctggagaccagcccggccaacacagcgaaaccccgtctccaccaaaaaaatacgaaaaccagtcaggcgtggcggcgcgcgcctgcaatcgcaggcactgggcaggctgaggcaggagaatcaggcagggaggc

SEQ ID NO: 11902 - DNA, 881 bp, Artificial sequence
  DNA replication origin
ctgtctgagaagtgaggagaccctccgcctggcaaccgccccatatgagaagtgaggagcccctctgaccggcagccaccctgtctgggaagtgaggagcgtctccgcccggcagccaccccatccgggagggaggtgggggtcagccccccccaggccagccgccccttctgggagggaggtgggggggtcagccccccgcccggccagccgccccgtccgggagggaggtgggggggtcagcccccggcccggccaccgccccgtccgggagggaggtgggggggtcagccccccgcctggccagccgccccgtccgggagggaggtggggggggtcagccccccgcccggccagccgcccagtccgggaggtgaggggcgcctctgcccggccgcccctactgggaagtgaggatcccctctgcccagccaccaccccgtctgggaggtgtacccaacagctcattgagaaggggccatgatgacaatggcggttttgtggaatagaaaggggggaaaggcggggaaaagattgagaaatcggatggttgccgtgtctgtgtagaaagaggtagacacgggagacttttcattttgttctgtactaagaaaaattcttctgccttgggatcctgttgatcagtgaccttacccccaaccctgtgctctctgaaacatgtgctgtgtccactcagggttaaatggattaagggcggtgcaagatgtgctttgttaaacagatgcttgaaggcagcatgctcgttaagagtcatcaccactccctaatctcaagtacccagggacacaaacactgcggaaggccgcagggtcctctgcataggaaaaccagagacctttgttcacttgtttatctgctga

SEQ ID NO: 11903 - DNA, 1479 bp, Artificial sequence
  DNA replication origin
gcattcgaggcttatttgtgtggcacgatctttactggggcggaaaacacgcggcgggggaggagcgggcacagacgcagccgggcggggagagccaggaatgttcctcccggcgtggggagaggagaggacacgggcagagaaaatagtccccgcccggcgcggggcgcgcggggtccgggtcccgggcggctccgggtggcgcggcggcgcgagggttccggccgcgcggagtcggggcgcagggagcctcagacgccgcgggcgcgcgtgcgcggtgcggcccccacgccccggccgcggcggcctcggcggcgccagcctccggctcggcgagcgcggcggcgggcgggccgcaaaacctgggccggagccgggcgcggagcgggcggcgccgcggagtttgggcggcagcgcggcccggcgaggagctggagaagccggcggcagggggacgcgcacgccgaagaaaagcccctctcccgcgtccctcactcgctcctggaggccgaagagcggggctcgcgatgccggtgcaagattcccaatcaggcctgggaggaaatggatgcaattagggcacacccccgtcccgcagttgccaggagcctgaagatctatgaccgacttaagccatttctggaaaagtcatattttccaggctttcgtgaaatactcattgctcctattctaaatctggaggcgaatgtgcatctatttcagggggaatgaaagatgtgaaaagtagactgggctccgggaaatgtgggtaatgggactggacctgcgcctggggtccgcccacccgtcatctcccgggagccccccgacgtgtgccattaagcataaggcgcgttaagcgctgccacaaagtcccgaaaaggcgaattaaaaaggatcacttctccctcaggatcttgatttttactaagggaaaacgtgcgttaaagaaaagccagcgagcgctggcgtggccctgtcattatcttggcgtctctgctgacctccatttcagcctggactacactgggttccagttctgttttcctatttccccggactcctagagggtggataccaaggctgattgttgtctgttctgccccagccctccagggtacaccataggtgctcagtagatgactcctgagtatatattggaggtgatagtaaaatgctaccaagcacagaggaaagaacagttaaagggtcagacggtgctttgtgaaaggccaggcatttgagctggattctgaagaccaactctagatgacagtaaaggccactccaggttgagggaacaacatgagcaaagcagggaacctacaatgagtaggaaagtgatgaatctgcatagggggttactcagggggcatagaaaaggaagccaggaagccactgaataccttgccacacaggtaacagccaggaaaagcacaaaacatgctgttcagtggttctggaatatgggcatgcaaa

SEQ ID NO: 11904 - DNA, 841 bp, Artificial sequence
  DNA replication origin
cctcctgtgcgcatccacgcggcccgccgggaagccgcgaccccctccccctccgcaggccccgccggagcgccgggccgggcacgccttacgctctgggcctgctcctgctgtgtgctttcatggtgaaagtttttagttcaggtttaaatgaaacttttctcttttcctctctagcccggatatgggtaaatacacgactagctgagcctatcgggcccagcatggcttgagaggcagcgggcgagctcgagcaactattatccacttcgctcgcattactcccgcgcactcgcaaaacgcggactggactcgtccccgggccgccgccgcccgccccggcgcagcctcgcgggacccagccgggcttgggctaaggctggggccggggccggggccggggcggctcggcggccgctcggagcgcggcggcgtggggcggccggaacctgcactttccccccgggccgctgtctccttgccaaccgggcgttcgcatgtttgttttcacgtctaaaaggaacgatacaaaggtggaaaacgagtctgacgagcagacaaaagagggagaagggctgggaaacaaagttgtctattggcctcagaggttacaaggagccgacggagaaagaaaatatttaggcaatctgcaaaagcacggtctctcccaggagttatgtaattttcagaacgttcgcctctgccttgatttcgggccatcggcgtaattcccacaacttcttccaactgcaaaattaggaaagatttgaaatgaaggttagccccggtcagagagccctatggcctgtacccagtaggtactcaataaatgcttatgact

SEQ ID NO: 11905 - DNA, 783 bp, Artificial sequence
  DNA replication origin
gccgccgccgccgcccgcgccgggccggctgtagcccggataatggttgcactggctgttggggtacccttcgtgggagttctgcagggggtccatgctgccgggggccccggcggcggcggcggaggcggagtgcatcatccccatcccggggctttgttgtccgccatgttgatcaaagcaaggcccagcgcggccgccggggccgccgctcgcaggggcagcgctgccatagtaattattaaactccgggacggccgccgggccgccgccgcccccgggcacggcgaccggcggctgctgcgtgcccagggcgcccaagcccgggtgctcgtagcggccgcccgccggctcccccatcttgggcggcgcgtcgtcctcgtcgcccggcttgctcagcagcggcgggcccggggggtcggcctggccgcccgcagcactgtccttggcgcctccatgttgcggctgctccatgtcggggccgggctgaggcgcgccgccgcccgcgccgcccaagctgttgttgttggaaatgggatgttgctgttgctgctgctgctgctgctgctgttgctgctgctgctgctgctgctggaactggtttagctgctgctgtagtgcgtggtggtggtggaggtggtgggcatggtggtggtggtggtgggcatggtggtggtggtggtgctgctggtggggcggcgcggcgggggcttcgccaacggttttcagtttgtggttggggagcagccccgtctccatggccgagcccgggcccgacgagga

SEQ ID NO: 11906 - DNA, 1195 bp, Artificial sequence
  DNA replication origin
acgccgctgccagcccggcctgggcggccgcgcaacaaaggagtcacccggcgatgagccccggcacccccggaccgaccatgggcagatcccaggtaaccctcgcgccagccgggcctgcttccgcccggcggcctcgccgcgccgcgagcctgagtttctttctttgccgcgtacttttccccgtcttcccgcgggggcggcgggggcgcggcgcccaaagccatcttgacgggcggccgcctcccgccgcggtcggggcgccccgggggccggcgcgctgtccaggcctgggagggcttcgccgggccgggccgggccgggtggcttctaccccgccggcccgcacccgcgtcccccccctcccccaggcccgggaacgcgaagcgagatcccgaggcgccacccgcgcggtcgccgtttggggcggcggggaccgttcgggtgcttttgtaacaaataggctctcccggccaggacggctggggcgaagagccacccgatcggttctgggagcgcccacaatgtgctttaacgggggaaagaatgaggaactttctcacacctttagccacagcacgttccctcttggcttccgaggtccaggcagggaaaataggttagctttgtgacaagcgagtgggtttttcctacttagggagagccattcagagacactcggtgcgggcttcgagctcgaacgtttgctggtaggaataataacaaaatttacaacgacatggaggtgcaatattgtaaaatacatcgattcgttccttagaatagccagggaaatccattattgggcttacgggctgcttgcagggagtcaccttcaacaggcaggctatgtgaaaggagcacgttccggatcaattgaacttattttgatcatggattaggcatgcattttattcagcaaatccagtaagatagcagaccagtgaaaattgatcttttgggatcgtatttatttggattttctttattttgctgtcacccgagtcctacagcgctgttaggaagtgtcctgcactcttgctgtttcttgctagtaggctgagcctaaagactgacttgatctcctttgcaaggtttggaatttgaattgtggaggtaaactggctgtaatagtctccagacagctgcctctgagttgacatctaatctgccatctgattggctcccctctcac

SEQ ID NO: 11907 - DNA, 1427 bp, Artificial sequence
  DNA replication origin
tcataaatcttattttcttaaggtgaaaccacacacattatttggaaaaaaagaaaaaaaaagtgggcttgatagagaagagccaaagatttcaaagggtcagaaaggatggattgacatacatattgttgggatgggggaaaatatagacagggcaggtttgtggataaagggctgggtggccagaggcccgctttggatatgttgattttccaaagcctgttgggcattcaaattagtgattacctgcaggagctggacatacatagatgtagaaaggacaagacagatccaagttgcaaaagtacatatgaaagtcacaagtctccagatacgtaaagctttgaaagtaaaagaaatcatacaggtaaggtgggtagagccacaaaaaaagaggggccaacactgagccctggtcatgggccagtatttggaggccagaaagataaagaaaatctagcaaggaaaggcaaggagcggccacaaagtaggaagagagccaggagagggtggcgtcccaggaaccaagcaagacaggtgctccgaggaggaagataccgtcagctgcatggaatcctaatgacaggcgaaggatggaaggaatgactatcacccatcaggctgaataacagaacactggaggctttgaaaagagctgtttcataccgcatgatctcactcaaatgtggcctctaggaaaggtaatctcagaagtggagagtggaatgggggcaccacgggctgggaagggctgggagctggggagtagagtggaatgggggcaccacaggctggggtggcgctggcagttcgggagtggagagtggaaagggggcaccatgggctgggagttggggagtggagagtggaatgggggcaccacaggctggggtggggctggcagttcgggagtagagagtggaatgggggcaccacgggctgggaagggctgggagttggggagtggagagtagaatgggggcaccatgggctgggatgggctggtcgttggggagtggagagtggaatgggatcaccgggggctgggatgggctggttgctgggaagtgaagagtgggatggtggctcatgggctggggttggctggttgttgggaagtggagagtgggatggtggttcacgggctgggatggactggttgttggggagtggagagtggaatgggggtaccatgggctggcatgggctgggagttgggaagtggatagtaggatggtggctcacgggctggggcgggctggttgttggaaagtagagagtgggatgggggcaccacgggctggggtgggctggaagttgggaagatgtcgatcaaagatacaaaatttcagttagatgggaagaataagttcaagagatctgttgtacaacatggtgactgtagttaataatatattgtattcttg

SEQ ID NO: 11908 - DNA, 3691 bp, Artificial sequence
  DNA replication origin
ctttctaaaatattatatttgctttttaaaccacattttggtttggacagatagatatgcctggaaaaataaaatataacataagaatgtcaagtatataaatctcacacatatacatttagacaaacacacaatacacgtatgtatacatacgaagtttgtattttaggaagattcttgtggtagggtgaaaaaaaggtggggagtgtgttccttttgaatgttttagattttaaatcgttcctaagcgtatttcctgcttaaaagtcactgcttcaattggtaccacgcagacacttccctgtgcaaccagatctggtttgctgctgcaatgactattcacaggcatttcaaatcacctcccacgactgatgtgctcaccgctcacattccttcctcatgtatcataaaacatggtttgtcacttagttctctgacctcgatgctacagaatatatttaacacaaaaagaacggccaagcacagtgacattctactgctctgtgtgaccccagggaacaatgcagctatgtgcgcagtcacgtggtcacgggtagacacacagcgtacctgcccggggcgtgctcctgggtggcgtacctgctttgtgctgagttcgcagcagcctgcatcactgctgcggctgcctcctgtgccttacggttcacagttggcattggcggccccattcctggccctccctgctgagacatgccaggagaactgggggtcatgctgctcatatttccaggaaatggtctgttctgcatcccagctgatggcattcgtcccaggggcacagcaccacatggctggcttggcccttgtccatgcatctggttgttggcactgatacccataccgggccctgggccgctgtagcttgcactgggcaccccactatacgctgggggtctggagtagttacctaaacaaaaagcaaacacaaagtaaagccttttatttaaacttgtgacaacattcactggaaatactttttgtccaacaatgcgatcagcacggagtattagtcatgaccgttataggcccttcctgttgctgctggtgcagctgccagtctcaaacatgctctctctgcacactcccaggccctcagagagtgactcaaatacagacagccccagaggaccactgcactgatgaagagaaattcaggctggtcataaaaagaaacaaacaaaaaaacaaaaaacaaaccctatgaataggcaagggacaccgagtgctgcctcaatccattcaacaccacatattcttatattttaaccaaaatggtgagcaccactcttgagatcacaccactagatcactgctaccttcaacagtcatgtgaaagggctcaaaaagacaacgtgtaagacgacatgcacatatggtcaaaatcatcctttaaaaccccacaggaaggtgtcacgcgggaacctgacatgagccccagttttcctctaagttgggaataatatttttctttctttctttctttttttgcttgagtaccagatcgagcagctggtttgtgctggctgccacatctcggaaaactgtcccagcacaagcacggcacacggcagcaggagagctggcgggcagggtcaaaggcgagggtgagggcgggcgggcagggtcggaggcggaggtgagggacggagggcagggtcggagaagggggtgagggctggcgggcagggccggaggcgggggtgggggacggcgggcagggccggaggcggaggtgagggacggagggcagggccggaggcggaggtgagggacggagggcagggtcggaggcggaggtgagggacggagggcagggtcggaggcgggggtgagggacggagggcagggtcggaggcgggggtgagggctggcgggcagggtcggaggctggggtgggggacggagggcagggtcggaggcgggggtgggggacggcgggcagggccggaggcggaggtgagggacggagggcagggtcggaggcggaggtgagggacggaggtcagggccggaggcgggggtgagggacggaggtcagggtcggaggcggaggtgagggacggaggtcagggccggaggcgggggtgagggacggaggtcagggtcggaggcggaggtgagggacggatggcagggtcggaggcgggggtgagggctggcgggcagggccggaggcgggggtgagggacggaggtcagggtcggaggcggaggtgagggacggagggcagggtcggaggcgggggtgagggctggcgggcagggtcggaggctggggtgggggacggacggcagggtcggaggtgagggacggagggcagggccggaggcgggggtgagggatggcagttgttttccctttcctttcacaccttttgattgtgtgtagatagattcaagtaaatcaaaggtacacatgatactacttcaatcataacagctgctgaaccacagtgtgtgctgggcacttggttaagtgctttgcaccaatgaattcattcatttcttccaataaccacatgaaatatagataccccaggactccatttacaaatgagaaaaatcaagagctagaagattagtactgaagctcaagcaaactggctcggggacccatgtatttgaccaataaaatgtgctgcctcctgataactgaatgttgaaattacataaatgcgaaagacaagtgtgtgtggaatatggattagtgtttcccaatcagtccttactattttttggaagcctttctccatccatgtaacataactatacacttactacattccagaagctgttctaggcacaggtgacgtaaagctaaatacaatccagttcttgcactcgagaagctcacatctacatgggtatgtgtgtgtgtgtgcatgcacgtgcacgtatgggtatgcatgtgtgtgtgtgtgcagtaaagcagcaagggtgaaaacaagaaaaaggataaaagcaaaacaaagcatgcaatgtgaaaagtgcaagagagaagggagagtgagtctgatgggggctgagggcttgagggtccccttggtgggggttggtggagagtcctctgaatgagcacttctggagctgaaccctcaggagctggcttcaggggctgggagagcctgcagctgggtgagcctctgcactgcctgcctgtaggaccttaggggagttgcttgcatcttttcttgtttcattctcttctctgtaaaacagataatcctaacactgtccacatgaagaggtgttctcaggattaaaccatataatggatgtaaagtatcaaaattgttggtgccacttgatgggggtttcattgttggctggggactgtggcagaagaggggaaagggcacttatggctgagaggctggggacaccggcttaatggcaagggcagactgacttgggacagccactggggcgctgtgtgtggctgacggggggatagaggggagaggctgggtctggcagggccttgtgtaccaggcttctaagtttgagatttatcctgtccataaggaggagcttctcaaggatttccagcagaggtaggattggattaataactgcaataaaagcaaacacttaacatttactatgtgctaagctcagttccaagttctttgtgttaactcacttaatccccagatcaagcctaggaggta

SEQ ID NO: 11909 - DNA, 1160 bp, Artificial sequence
  DNA replication origin
cggatacctgccacctccttacacgtgccaagttacgttcctcatctagaaattgggaaaataataggacccgcttccaaaggcatggcgaggattaagttcctgcaacagagctcagagaagagtggctggcagccgcggtaagtaagcacgcacttcacggcacttggcatggtggtgtgctagtgtgcgctgggcgctagctcgtggattggtaaatcagagtcgctgcccaccttcagggaatcacagactccctgccttcttacttcctgggaggaagcaaaaaataagttaagcacaaataagcagttaaagattgtggttggtggaagacaggaaagtgaaaggaagaaaggatacagatagcagtggcactgggtggcgcggtgggagagagggaaagcgatttagactgagtggtcgggagggaagggccctgaggacctgtcatgggggtggtggtgggaatgagcttggtgtatgaggaggtggtgggtgtccagagcacagtgagcatgggcccggggacaggctgaggtcgttgaggccggcggggccaaagcctttcggtgtctgtgggcgtattgatgaatctggatttttccccaaggtgaaagatgttatgcagggaagtgatgtgagtagtttttttttgtgataaataaataaatgactggccatctctggagaatgtactggaaagaggtaagagtagctttggggagaccactgtgagagtctagggggagctggccaactggagccggacaccagcagcacagagggaacccgccggcagagtgtatgtcagaggtgctggtggagtgaacgcgggccctgagggagaagctaaccgtgactgggcgggtgaagacattattccctgcaatgcagaggattggaaaaggaccgggctagagaggggaacctggagtccctctggggtgtgtcccggtggtaaggcatggagtgcatggctggagctgagcagatgttgggatcggtatgatcttggagtagtaagtgtagaaatggcatctgcagtgatgggattgatgagatccttgagacagagagtgcagaagtttatgactgccatcaggagacaccaggctggcccttcccttgatgcctgccgactcccaaggttgaggtgg

SEQ ID NO: 11910 - DNA, 1509 bp, Artificial sequence
  DNA replication origin
gctctactttgacagaaacttttacataaaaaaggtttgatccattctgcaagtgtttctgtgtgtgtgtgcgaatgtgagtatgtgcctcacctactgtaatgattctcaagtgtggccccagagccatcacctgggaacctattagaaacacaaatgagtaagcccaaagccagacctgctgaatcagaaactctaggtggagtcctggaatctgtgttttaagaagccctctgggtgattctcttgcatgatagagtttgagacccacttatctactgttgttttataggatctactcctcaccaaggatagagggaagttgtgcctctgttaagatagaaacatgtaaataatagcattctcgacaccattgcaggaggtcagcaaactttttttcctgcaaatttcttcattcactatttaacttacaaaatgtgtatatgtgcatgtgtgtgtgtgtgtgtacacatgatgatggctagcgatggaggtggaagtggtggtgttagtgttgttggtagtaggagtaataatattattggtgatggtggtggtagtaatggtgttgatggtgatgatggtagtggtggtgatggtggtggtggtgatggtgtttgtggtggtaatagagttggtgttgtgatgatggtgatagtggtgatggtggtggtgacagtgatagtgctagtgttgatggtggtggtggttgtgctggcaatggtggtggtagcaatggtgctgctgctggtgttggtggtgatgatgttgttggtgatggctattatggtagtgatggcttgggcagtgatggtgatcgtggtcatgatggtggtggtagggatggtggtggtggtaatggtgttggtgatggtattgtggtggtgttggtattggtggtggtgttggtattggtggtgatggtttagtgttggtgttggtgagggtggtggtggtggtaatggtgttggtgtcattggtggtggtaatggtgttggtgttggtggtgttatggtgatggtggtagtggtggtgatgctgttggtagtattgatattgatggtgttggtggtggtgatgctgttggtggtgatggtgggagtgctggttacatatcagcccctcagatcatattgcctgactcccccgtgtctcacccaaaaggcctgcctggcttgtgccatggtgcgtgtgataatgtgtgtgcatatggatgtgtgtgagtctgtgtctggccacttcagccttagtgcctctgaagtttacaaaacccccaaagttttaaaataaaattggggttaaaccatttggatcctgtaaattagaaaaaataaatgaaccacccagcagcagttacaggcaattaatgtgattctgggagggcttcactgcaagataatgggaaagctgattataaatgagccaagggtaatgagggaggtcatgagtcccttaactctgaaggagaagccagggctccactccggctgatgctggctgcttcgaggt

SEQ ID NO: 11911 - DNA, 1280 bp, Artificial sequence
  DNA replication origin
acggggcgggaggccgctgtggggacgcgccgccgggcctcgctgtcaggtcgcccgcgccccgctccgcccgccccgtacaggcggcgacagccccgcctaggcccgcgcctcggccgccctctgctgggcgaagcgagcaccacggccgagcggcggccccgggagcgccgcggggactgcagagcgcggggaagcggcggcagcggaggctcggcctggaaggcaggggccttgggggcgtccggggagagggccggggacatctgtccagcgtgggccgtgcgcggtgccgagcgcgcggggagggccgaggagctagacgcggacccagctcctctaggagccgggagggatgggagggacggagggtaaacgggcagtgccggccgaagcccggtgggactcggcggcagacagacaggcggcttccgagggaggacccggggccgggcgcgggcggcgggaggcgaggccctggaggcctggcgcttctctgcaccgcgaagacccggaggcttcaagcaacagacgcggttctggaggccggaagtccagagtcaaggtccccgaaggctgggggagagaatctgttccatgcctttctcttggcctctggggtacagggtcctcagtgttcggggcttgtctcccgtcactccagtctctgcctctgtggccacatggccctgtgtccctgtgtctgtcttttctccttttacaaggacaacagtggtcttggagtagagcccactctcatcaaatttagcttcattttggacgggcgctgtggctcacgcctgcaatcccaacactttgggaggccaagaagggcgaatcacctgaggtcaggagttcgagaccagcctggccaacatggtgaaaccccatctctacccaaaatgcaaaaattagccaggggtggtggcgggcgcttgtaatcccagctactcaggaggctgagacaggagaatcgcttgaacctgggaggcggaggtttcagtgagccgagatcgcgccactgcactcctgcctgagcgaccaagtgagactccgtttaaaacaaaacaaaacaaaaaaaacctcctgtaatcccggcactttgggagtccaaggcaggcggatcacctgaggtcaggagtttgtgactagcctagccaacatgatgaaaccccatctctactaaaagtacgaaaaattaggctggtggcgggtgcctgtaatcccagtcactcaggaggctgagacaggagaatcgcttgaacctaggaggcggagat

SEQ ID NO: 11912 - DNA, 1134 bp, Artificial sequence
  DNA replication origin
cgtgcctttctgactcatctccttctctccgtcttgcctatcccaccacccactgcaccgtggtctcgggctcactgtgccaccaacaagtcttcctcttggcgccagcttcttctgctcctctgagcttctcctgctcctctctgcctcatctcccaaagccccttcctctttggcctcttccaggtcattctctctgactctcatctgcactgtcctctccctttctggggtcatcagccacaccaaggtcttggtcagttaactcagcgtgaccttgtctgcctctccaattatatcataaacaacctgtggaccgcaccttggggggccttcctaagtgctccccatgtctttccgcatggctcctgaaggggtccagggtctcgtgttgtcatgtgcctgtgcttctgcccactcctcgggtgctcacaagggtagggctgcctgggtgacagtacggcctcctgcagctgcgggagagggagtccagaggtggcaggagagggagtccagaggtggcgggagagggagtccagaggtggcgggagagggagtccagaggtggcgggagagggagtccagaggtggcgggagagggagtccagaggtggcgggagagggagtccagaggtggcgggagagggagtccagaggtggcgggagagggagtccagaggtggcgggagagggagtccagaggtggcgggagagggagtccagaggtggcgggagagggagtccagaggtggcgggagagggagtccagaggtggcgggagagggagtccagaggtggcgggagagggagtccagaggtggcgggagagggagtccagaggtggcgggagagggagtccagaggtggcgggagagggagtccagaggtggcaggagagggaggcagccatggagggtgacacccactgatgcatttctcagtccagtgaatgcagtcactttggatttgtgagaattgggaccagtgttactgccactatctacagaggcctcacaaggttgtctgtgctagcaagtgagtgattagcaaagacgcactcctgtgacacattatgttgaaagtgccatcatcagaaccacaccacagggcagtggttctccggcaacggcagcc

SEQ ID NO: 11913 - DNA, 3805 bp, Artificial sequence
  DNA replication origin
actatgatgaggccgggtgagcgcacacagggacactatgatgaggccgggtgagcgcacactgggacacaatgatgaggccgggtgagcgcacactggggctctatgatgaggccgggtgagcgcacactgcggcactatgacgaggccgggtgagtgcacactgagacactatgaggctaggtgagcgcacactggggcactatgatgaggccaggtgagcggacactgggacactgtgatgaggccaggtgagcgcacactgggacactgtgatgaggccaggtgagcgcacactggggcactgtgatgaggctaggggagtgcacactggggcactgtgatgaggctaggtgagcgcacactggggcgctctgatgaggccacgtgagcgcacactgggacactatgattaggccaggtgagcgcacagtgggtcactgtgatgaggccgggtgagcacacacggggacactatgatgaggccaggtgagcgcacattgggacactatgatggggctaggtgaatgcacactgggacactgtgatgtggctaggtgagagcacactggggcactatgatggggttaggtgagcgcacactgggacactatgatgaggctaggtgagcgaacactggggcactatgatgacgccagatgactgcacactggggtactatgatgagtctaggtgagtgcacactggggcactatgatgaggccaggtgagcgcagactggggcactatgatgaggccaggtgagcgcacactggacactgtaataaggcccggtgagcgtacactgaggcactatgatgaggccaggtgagcgcacactggggcactatgatgaggccaggtgagcgcacactgggacactatgatgatgccggatgagcgcacactgggacactatgatgaggccaggtgagcacactctgcgacactatgatgaggccaggtgagggcacactgaggcactatgatgaggccgggtgagcgcacagtgggacactatgatgaggccaggtgagcgcacactgggacactatgatgaggccgggtgagcacacactgggacactttgatgaggccaggtgagtgcatactgggaccctatgatgaggccaggtgagtgcacactgggacactatgatgaggctaggtgagcggacactgggacactatgatgaggctaggtgagcgcacactgaggcactatgatgaggccgggtgagcgcacactggggcactatgatgatgccgggtgagcgcacagtgggacactatgatgaggctaggtgagtgcacactgggacactatgatgaggccaggtgagtgcacactgtggcactatgatgaggctagttgagttcacactggggcattatgatgaagctaggtgagcgcacactgtgacagtaagatgaggccaggtgagcgcacactgggacagtaagatgaggccaggtgagcgcacactgggacactatgatgaggctaggtgagtgcaccctggggcactatgatgaggccgggtgagtgcacactgcgacactatggtgaggctaggtgagtgcacactgcggcactatgatgaggccgggtgagcgtacactggggcactatgatgaggctagctgagtgcacactggggcggtatgatgaggctcggtgagtgcacactgggacactatgatgaggctaggtgagtgcacgctggggcactatgaggctcggtgagtgcacactgtgacactatgatgaggctaggtgagtggatactgcggtactatgatgagggcaggtgagtgcacactgggacatgatgaggctaggtgattgcacactggggcactataatgaggtcagatcaacgcacactggggcactatgttgaggctaggtgagtgcacactgggaaactatgataaggctagatgagtgtacactggggcactatgatgacgctagctcagtgcacactgggacactatgatgaggccgggtgagtgcacactgggacactatgatgaggccaggtgagcgcacactgggacactatgatgaggctaggtgaggggacactagggcactatgttgaggctaggtgagcgcacactgggacactatgatgaggccggttgagtgcacactggggcactatgctgaggctaggtgagtgctcactggggcactatgatgaggccaggtgattgcacactgggacactatgatgaggccgtatgcgtgcacactggaacactatgatgaggctaggtgagcgcacactggaacactatgatgaggctaggtgagcgcacactgggacactatgatgaggctaggtgaacacacactgggacactataatgaggctcggtgtgtgcacacgggggcactatgatgaggctaggtgagtgcacactgggaaactatgataaggctagatgagtgtacactggggcactatgatgacgctagctcagtgcacactgggacactatgatgaggccgggtgagtgcacactgggacactatgatgaggccaggtgagcgcacactgggacactatgatgaggctaggtgaggggacactagggcactatgttgaggctaggtgagcgcacactgggacactatgatgaggccggttgagtgcacactggggcactatgctgaggctaggtgagtgctcactggggcactatgatgaggccaggtgattgcacactgggacactatgatgaggccgtatgcgtgcacactggaacactatgatgaggctaggtgagcgcacactggaacactatgatgaggctaggtgagcgcacactgggacactatgatgaggctaggtgaacacacactgggacactataatgaggctcggtgtgtgcacacgggggcactatgatgaggctaggtgagcgcacactgggacactatgatgaggctaggtgagcgcacagtcggacagtatgatcaggctgggtgagcgcacattcggacactatgatggggctaggtgagtgcacactgggacactatgatggggctaggtgagtgcacactgggacactatgatgtggctaggtgtgagcacactggggcactatgatggggttaggtgagcgcacactgggacactatgatgaggctaggtgactgcacactggggaggctaggttagcgcatactgggacactatgatgaggccaggtgagtgcacactggggcactatgatgaggctaggtgagtgcacactggggcactatgatgaggctaggtgagtgcacactggggcactatgatgaggctaggtgagtgcacactgggacactatgatgaggccgggtgagtgcacactgggaccctatgatgaggccgggtgagtgcacactgggaccctatgatgaggccgggtgagtgcacactgggacactatgatgaggctagctgagtgcacactggggcactatgatgaggctaggtgagcgcacactgggacactatgatgaggccgggtgagcgaacactgggacactatgatgaggctaggtgagggcacactggggcactatgatgaggccgggtgagcgcacactggggcactatgatgaggctaggtgagcgcacactgggataccatgatgaggccaggtgagtgtacactgggacactatgatgaggctaggtgagcacacactggggcactgtgatgaggctaggtgagtgcacactgggacactatgatgaggccaggtgagtgcccactgggacactatgatgaggccagg

SEQ ID NO: 11914 - DNA, 1034 bp, Artificial sequence
  DNA replication origin
tgctggcctaaaagggaacatgtttaaaatgcttaaagtgaaacttcggtttctttaaagtattttggttttactgtttgtttattcataattattctggaatttcatttcacatagaatgcatataataacattaaatataaacacatgtgtattttacacactgttatatcatttaaccagaggatctaaagaaggagaggtagcagaagatgtcttgttagaccaaggcaggtaagtttgcccagcattgacaatggggagaaatcagtgccagttcagtatctaccctgctccccggcccaccctggccaacaagcacggcttgactgttcagtttgtgttcatcgattactttcaactatggtattttattatttgattataattaagatagcaccaattttatcacaataacttaattctggaaaaaaagatgaacatttactttgggtttgtagtctcctaaatcagctgtgtacatgatcatgggaatgcatgctgggacactatgatgaggccaggtgagtgcacactgggacactatgatgaggccaggtgagtgcacactgcgacactatgatgaggccaggtgagcgcacactgggacactatgatgaggccaggtgagtgcacactggggcactatgatgaggccaggtgagcgcacactgggacactatgatgaggccgggtgagcgcacacagggacactatgatgaggccgggtgagcgcacactgggacacaatgatgaggccgggtgagcgcacactggggctctatgatgaggccgggtgagcgcacactgcggcactatgacgaggccgggtgagtgcacactgagacactatgaggctaggtgagcgcacactggggcactatgatgaggccaggtgagcggacactgggacactgtgatgaggccaggtgagcgcacactgggacactgtgatgaggccaggtgagcgcacactggggcactgtgatgaggctaggggagtgcacactggggcactgtgatgaggctaggtg

SEQ ID NO: 11915 - DNA, 1119 bp, Artificial sequence
  DNA replication origin
tgcgggcgagggtctcggggcccggctcggccggcttccgggccgagaaagaagggcagaggaagcggtcagggtcccctccggccccggcctccctcccggagtataagcccttggaggccaggttttgggttgctgccgcccagctctttcggtctccacttctccccacggacgtttacagctgctcgctttatttctccctccattcccccgtggagccccctcggcagcggaggggtcgcgtgcttctcctctcccgcctgcgcctccccccttcccacccgacagcccaggaggagctgcgggcgcggccctgggacggccggagcctggggcttctgctcgctcgcgccctcccaggcgttgccgcgggtccgagcccccgcagaggtgggcatagccccggggccgcagaaaacgaaggcagctgggcagggatgctcaatttcccgagccccactttcctttcacagcccactgggatgtgtagttcttccgcccgcaggcctgcgccgaggagaagcacgactcggggccttagaaactacaagtccctgcatcccccgcgacaagggcaggagaggcgtggtgctgggcgttctggggctaggtggtgggagatgggaaccaacaaagggggttgtggggaacggtgccttctctgtactgggcagtttgcacgttacacatgttctttgtctaatcttcgccggaacccggtgaggcattattgtatccagcttagagaaagcttaactactggccaaacatcacaaagctcccaagtagtagagatggcatcgaacccagagccctaagtatgtcccttacaaagcgtgcctcagtgaggagtgtcgaagggggatgagattggcttatccaagagggccagttgggaggagctgtggtaaggaaaaagtgatgggaatagcaattagagtatgacatgcaattacaaggagttttgaatacaagtgaaatttacaggggtccattccaaagccggttagagtctagggagaatggatcttaagcacacgataataattgggttttaattattttagatattgtatgagagacaagcatattacagggacaattaagtatttgtgg

SEQ ID NO: 11916 - DNA, 1362 bp, Artificial sequence
  DNA replication origin
ccggaggaaggagtggacccaacctggccgcgccgcagaagtggctcccgaggaagccggcgccggggccgccgcctcgtgtcccctcggggcgcagtgctcgggggtcggcgggccagagccgaggcgcggccggggagccgggggctgcggggccgagcgggcagccgcgcgagggggcgggcgctcggcgacccgggggccggccgggctgagccccgcgccccgggacgcgggctggaagcgacggaggagtgctgccgcgggctgcggaccagcgccgtcccctcacggagcggggattctgctatgacagttgggctccccggagggttaacctgggtgtcctcggcaaagttgtcgccgagccgggagcccgtgtaggggccgcggcgccgcggctcggggggcggccgggcggccggcggcggtcgtggctcggcggggcccgcgcggccggggggctcctgggggtgtgcgcccccagccggctgccctcgtggatgcctcccggcggcggcgggcccatgaaagactgcgagtacagccagatcagcacccacagctcctcccccatggagtcgccccacaagaagaagaaaatcgcggcccggaggaaatgggaggtgttcccgggaagaaacaagttcttctgtaacgggaggatcatgatggcccggcagacgggcgtcttctacctgacgctcgtcctcatcctggtcactagcggactcttcttcgccttcgagtaagtggtggcgaccgctcccccgacgccgcactcccctggtctcccctgtcccccgcccctcctcgggctgctttcgttttctagaagtcttatctactgtaaattgttatataatgccagtctgcgctccctcttttttcttttaaaggtctgattgcttttgggcccccggaaagaacgccgttctgggctgggcttctgggagcagggagggaaggggtccacttgcaaggggggccaggccttgccaatccaggtggcggatgggacccagcaggtggggccgccggtccctgatccttggggcgctctctaccgagtttggggacccagcaaatcagcccagatgtagcctgccgtgggaaggtggggtgcgatagattcctaagtcagggatacatggaactgactttttcccccttgctgacaacatatagggcatcttcttaagctcagttgactgaatctcccatgtaacttcgacgaataattgaggaatcttggctatttcaggtttcaaagtgtcggctgcctagtgtgccctggatagatcattgcattctccagcctcctacatgctcactctggattaacaatttcttatttgccat

SEQ ID NO: 11917 - DNA, 806 bp, Artificial sequence
  DNA replication origin
gtcagagtgtgaggatcctggggcagtgaatctgaggctgccagaccaggggtggaaggtctaaaggaggcggtcatgctgctcacgttcagatgtgagagcctcccgcaaggtggtggttctgggttgggcaggagggatctggcacaaggaacgttatggagatgagagctgcacagcttgacactgaatggatgctgggtggggaggtggggaagggacagctaggatgacctaaggactcgacttggatgattggatggtgtcattcactgagatggggattccaagaagagaggcaattttaagggaaaaatcaatgaatttggtttggaacattcaacagtcatttatggaatgccaatggcatgccacatgccgcattagggtcttaggatcgagggtgacccacagagcagtttggcccccacttcatggagctgactcgttgagtttgaggggcctacggggcactcagggggagaagcgcaccagctcgcaggatgtgtgggtctggcacccagaagagagggtagcctggtgcttgacactggggaagccctggctgtgggtttggatgaggagaatcctgggagaaggtggaagagccgatcagaaggggatgctggaggaaaacagcggtcaggtgtgtgggagggaacagaaaggatggggagctggaagccgcactaggagggagtcaggccacgggagaggggccagcgtgaggttctacagagctcaggagagaagccgggaagccgtctcacctttggccattgggaggccgttcacctccataagag

SEQ ID NO: 11918 - DNA, 1136 bp, Artificial sequence
  DNA replication origin
gcaggatgtgtgggtctggcacccagaagagagggtagcctggtgcttgacactggggaagccctggctgtgggtttggatgaggagaatcctgggagaaggtggaagagccgatcagaaggggatgctggaggaaaacagcggtcaggtgtgtgggagggaacagaaaggatggggagctggaagccgcactaggagggagtcaggccacgggagaggggccagcgtgaggttctacagagctcaggagagaagccgggaagccgtctcacctttggccattgggaggccgttcacctccataagagcgttttccgtggaaacggagacttcattgtagtgggttgaaaagtgacagctggggctgagggaccaggaagtgggcgcatccattgcagacggcctttctataaaaggcagctgtaagggaaggagaacttaagatagtgtctggaggagaaggtaggtgaggaatcggtctagaggaaaaggaggagaggcacggtgcgagctggggtggcaggggagcaagggccccagggagaagagagggaaggaagagggcgtgcagggcggagggacaaggctcaggcgtagacctggaggggcatcgggcctgggagcacaggaggaaggaggaagggcgggtggaggggcagctgtgggagggctcgcctcatgcccttggtttatctgtgttcagaagccagtgtgatggttgattttaaacataatacagcaagtgggcagagatgtgagggttggggtctcagcgtttggaaatgtcactcagtgaaataggaagggaaagtgtctacagagatgcgcaggatgcagggccccgaggactggagggcatttatgttttggggaatctgcttcccactctgctttctccagcagggcctaccagcatgggttggcgtgggggtgaggatggttggctgggttcactcagggttggagtttaacagagcaaatgcaggaccaggaggctggaaagtcaacagcaatggcaaaagggaaactgatgtgataaatcacggggtccaggctggcagagatatgagaggagaacagaggggcccgcaggcagaggaacgtgagtattgagatgtcggcatgggaggtggctt

SEQ ID NO: 11919 - DNA, 973 bp, Artificial sequence
  DNA replication origin
caggtgtcagtttcagaaccttggataacttaatgtttccgatcctcctttttttccttatttgtaaaatggagataatgaagatgcaaatggagataatgaaggtgcaaatggagatacgaggttgtttggaagattaaataacataagatctgtcaaatgcttgccactgagtccacacgcagtgaagcatgtgcttggtaacagttggctattgttgttatcctgaattcaccagacaatgggagagcatgactttcctgtagggaagcgatacgattgggtctgggcttttaggtcagtgaatctggcagcagtaggatggattggagcagaggcaatgaccctgaaggagatgcagtagtgagttaataagcatgagagtcgcccaggtgagaagtcatgaggacttgaactgctgggggagggggggcgggtaaaggggggttgcaggaataatgtgatgatgggcacaggcgtcagagccctcagagaggtctgcgggacttggcagtgaactaacggagagggacgaaggcttgaatctgagcccctagaggcatagtggtgctattcatgggaagagggaagccaggcacgtttgcttcaggaagatgatgagttcagtttgggtcatgttggctgcatagtgcctgtggaatttccagatgtggaaggaggcccagatgctggagggaggtcgaggcagggcagtcatcagggagatcatctacgcagagctgtctgcagggagtacaggggtggtctgaggtgcctggagtggaaggtggtggggattggggttgtggaggaggccttcatccacggggcaaggggcatcctgagacttagcagccactgaaaaggggagagggctgtgactgtgcatgtgacatggtgacaacagctgggcctgcttccatagccctaccctgggactgcaggtctacacagtgcagcacaggcctttccc

SEQ ID NO: 11920 - DNA, 1138 bp, Artificial sequence
  DNA replication origin
tggtgctgtgccatgcaaataaggcagagagagttcttgtgttcccctctgggagtctgcttaccaagagttcagagacccacattcggttcctgcagtgttcccagaggcagggatggcagctggctgggtatggccaggtttggaggaaggagtcctcatataagcctggcgggaggaatggaaaattgggaacacagaaaggcccaaggaatggtcagtgtcacaccagacttgggctggttctgtgggtcatgtggccaccattgactgcccatgtgcggtggagccagttccgtgccaggcgctgggggtgcacgggagaggggctggctctgtgccaggcgctgggggtgcacgggagaggggctggctctgtgccaggcgctgggggtgcacgggagaggggctggctctgtgccaggcgctgtgggtgcacgggagaggggctggctctgtgccaggcactgggggtgcacgggagaggggccagcttctgggcagcagggactgtccatgggcaggcagtgcacagtgaggtgcgtgggccgcccaagagtaggtctaagctgtgaactctcccaagggtgagaaggagttcggaggaggaagcggtggggaggagcagggttttgaaagacaaagggggcagctgtgcagggacccgagggtgagggtcctggctcatcccaggaaacactgatggggttaatgtcaggagtggggggcgaagggagctgggccgagaaccaagaggtgagacaagacaaggggcgagtccaggtgaggaggagaaggacgggcagagcctcattgggccgtgtccagagcttcgcagcactgggagcccagctgctacattaaacaggctggacgcgatgggatgctggccgagaacgcttgatttttttctccctgctgtcccttcagactcttttgatgacctagttctttttccgctcctggataaaatcccctgcaagccccttaatttctcttgtcattaaaaaaaaaagagagagagagagcaagagagagcacgtcagagcactttgcctccaaaatagtgtcatttcagtgcatcagaactgccaagtttattgacagttaacacttcccatcacttcacctgaccctg

SEQ ID NO: 11921 - DNA, 1068 bp, Artificial sequence
  DNA replication origin
ctctgaatgcactggtcttggtcgcactggagagcgggaggcgccagcaaagagaaggtggagaggagggggcagaggtggggagggacagggatggggacagggcacgggcggggagggtggggtgcgagaagagagaaaccgttagtgacacctcagtcagccaggcagggagcgcctacagtggtccaggtgcattgggagagacacccagcgcctggtgctgcaattgcctctgctcaaatgaagtcaccacgggtgcccagtcataacatgcagccactggttatgaagccagtggtcttggttcccaatttaaaggacataattaaaaaaatctcttggacagagtcacaggccatctacagcagtgggtggctgtttcttgtatgctgaaaaccattttttaaaccacattgttttaaaaatacaggagttgtacacccatgttcatagcaatgttattgatagtaagtcaaaagtcaaaagtgactcaagtgtccactgatggatgacagcagggacaaggtgcggtgtagacacacagtgttactgattcagccttaaaaaggaagtgcattcggacacatccacgagatgggtggaccttgaggaaagcatgctaagtgaaacaagccagtcacaaaaagacgaataactgtgtgattccactcaaacaaggtccctggagggtcatgttcttagagagaaggaagaatggtggctgctggggcgggaggaagagggagctggtgtttaaggcatgcagagttccagccatggaagatgaagaagccctggagatgggtggtagtggtggttgcagaacaacatcaacggacttaatactactgaacttatacttacaaatggttaaagtggcaaatattatgccatgtctattttaccaccaaaaaaagaaaagactgtttggtaaaagcctagaattccccactgctaaatttccaacagcttcaagagccattcccgaagcctctgtggtctgagaatgcccacgtttgagaagacgtttcctattcttccacgcgttcttaagtcacatgatat

SEQ ID NO: 11922 - DNA, 968 bp, Artificial sequence
  DNA replication origin
ggaggacaggtgaacaggttgacacagagtgcacaggaggagaacgctgcatttccgtgaagcagagccttaggattaggagggggctccaccccacacagaaggggaggctggactgggaggcagtaaggagatggcccacgagcctctcaggaggttggaggttggaatcaccgaaggcctgggagacatgaatggggcaagggcagggaggggacatgcagttcaaggcagatggggtggatgtgtgaaggcacgcggcggggtcggggaagctgcatttcagggttattggagtttgggtttgaggatgagtgatcagggattcaaacagggaagagacaggactgggtttgcttttcaggaggaccctggccagtgggaaggacagatgggacggaatgacaaggaagggagggaactggtaggtggcaggtacgggatggagtgacaaggaagggagggaactggtaggtggcaggtacgggacggagtgacaaggaagggagggaactggtaggtggcaggtactggacggagtgacaaggaagggagggaactggtaggtggcaggtactggacggagtgacaaggaagagagggatctggtagggtggcaggtacgggacagagtgacaaggaagggagggaactggtagggtggcagtggcaggtactggatggagtgacaaggaagggagggaactggtaggtggcaggtactggacggagtgacaaggaagagagggatctggtagggtggcaggtacgggacggagtgacaaggaagagagggatctggtagggtggcaggtacgggacagagtgacaaggaagggagggaactggtagggtggcagtggcaggtactggacggagtgacaaggaagggagggaactggtagggtggcagtggcaggtactggacagagtgacaaggaagggaggaaactggtagggtggtaggt

SEQ ID NO: 11923 - DNA, 1061 bp, Artificial sequence
  DNA replication origin
gggagccaaagtgttgtttttgagcaggagcagagagcaggctccagcggaggtgatgaggtcgcctgtgcacgtgttaaaggtgaggtgctatggcacgattaattggagaaactgcgagtgaacaatttgatattcctggacaccctctctggagtttggagaactggaagtctgcacagaccctgagatcccatgaagaaagcgtctggactgaacagacgagagccaacttgagatgaaggtgcacaagggcagaggagcctgcccaggggaccgcaaagggatagggtcagagagaaagaggcagacgcagcccagagggagaggacccaatggaaaggccagccaagctgcactgggcttggcagtgaggaagggattgggaaagagactttccaggggagtggaggaggtggaggagtggaggaggtgggggagtggaggaggtggggtagtggaggagggatgtgggagggaaggtgagagttgggctagaagtgagaggctacagctggaggggatgcccaggagagaaagcatctttgtaagtggaacagatgtgagcatgagtgggttccacactggtgggaggaagccgtagagaggaggaggttgaagataaggaggggggcttccaaggtgaagtggagggtgaggggcagagcacagatggggcgatctgcctcagatagggggaggaaggccctgcggtcatcgacccacgtgtctgccttaggaatggccccgtctgcaacagacaggtctctgcacacctgccggggtctccttcctctggcatacttgggggaaagctgggaggagcgccggatcacatttcctcttgcattggtccatgctgcaacccctcacctccgaagccttcacatctgctgtgctttctgctctcttcgctgctcatctcccttgagacccaggacaaacctcatcttctgaaatgtgctccaccctccccgatggcctggggagagggagagagggatcacacttcttcccactgtctgtccaaagcaggtgtgaggcctgtcttttaattcccc

SEQ ID NO: 11924 - DNA, 1455 bp, Artificial sequence
  DNA replication origin
gcgcggcggccgctcctccgcctcggccccgagtctcgacgctcaggcccagccgctgggcgctcggctactcccgcgccgcacgctcctgcagttcctgaaagtccccggctgcgcggcccccgcccctgtcggccgagcctcccatttaccgcggcgcgcgcgacgcccgccggaagcgcgccctgggccctcggccgcggcccggcctcctcgcctcctggccgcccccgcgccgcgccgccgccccgggcagtcaccgccgccgccgccgccgccgcccccgggcgcccttggtcgaggctgggagcggcgtcccgcgcagcggcggggtccggacgggcgccccaggccatggcccgcaaccctgcgtggccgccccaggggaagcgatccgcggcccacagagccgctcggggtagccgaaccccgactccggttcacgctcggccggcgccgcacgccgtggctcggcgctttccgtgcatgaggcgggagggggcggcaggaactctcgacgccccgggcagacaggagccccgcaaccccgctgtctttgccccacgcctggggtgttgcggggtcgccgtgcccttggccgagtaccctgagtaccacataaacagctgggaaggagcggagcgatggcttcctgggcctcttcctcctgcccggaggctccctcaggccggggtcctggcttgaagcccctgggacgggacggtggggggtttcgttctgtgacgccccgttaacctcattctggaatcttgataagcttaaaaataccggagggcccgagaggtttgggggacaacaggctctctgaagtggaaacgaggtctctaaaattttccatctttctgtcagtgtttctttccagagttggagatatatatatgggtgttatgaataaacgaatgacttgaattgagcagcaagatttttcactcaaggacaaaacacgactggaagatgtgtcttaattggcatactagtggagtgcttttttattattatgagggatatatttgtaagaagagacaactatcaaatgtaaatctctggtgtttaatgtcaagtttgtgtcttcttaaatacattctatttgacctgagatttcactagttatattcaataatggggtttaaaatagatacggtattgcagaattttctgtgaatttttgtgtttgttgagctcatggttaagctatagtcatcataatatgcataaatagttgtctttctccgtaaaaaaaaatattgggaggccaacattcattgacggcctgcttgctgtatactaggcttccacatccccatctcatttaatccttataagaaacatttgagaaactcattattgtccactgtttacaaagaagagcgactcagggatcacttaaataacttgcccatttggtaatacttattcaaatcgaaaatgaccgta

SEQ ID NO: 11925 - DNA, 1309 bp, Artificial sequence
  DNA replication origin
gggcggcgcggagagggtcggggccggggccgcggggagggtcggggccaggggtggtcgaggggccactccgcttcctcggtggagtccccgggcgggtccgcggcccagccagtcccttctgggcatgggtgcggcgggcagtgcagacagaccaccaggatcgcaccgggggacggcgtcgggtctgggcgcgggttgggaccccgggcgcagcgaggtttgggaagtttgcacctgagcgtgggctgcggcgggctcgccgggaggggccgcgggacggaaacttcccgcagcccggggaggcccccgaggcgactggcgctctgtggcgtccggcgtccccgccgcccccacgtcccctcccgctgccgcctgggggaccctcgcccccgcggggcgggtgggggtcgagacctcggcggagaggacgcggcgcttcccgtcccggcctgcgggggctcgcggccggggagggaccgaggctgggacgccccgcgcccctttgccttcgctgctgttatttttttcttttgttttgctaccttttcattgtgaatggcattgccggcatgaataaaatatcaagagggaaatgactgtgctttcgattacgtgtttgcctgaaaaaaggcccaggcccgaattacgtggtggaactttgactcctgcttcgtcattggctaggagcggtggtttgcttgttttacgttattgtttatgaaattagcagtcactcttggctacctgaattttcaaaagccaccctcccccgctccttttccttgggcgttttcagtagttacttgatgtagaatagccactggggaagtcacggtcacggaagggaggacctgggggaggaggctctatacctgagccattaactgatctgtgatacactgtgaggagtgggtttacttttgcacttagtttttgtaatgtcactttgttagcatcagcacccctttgtctatttgtttttgagatctctgagctacttttgggttgctagaaacgttattttttatttttcgataggtgtttgctttttttgtggagtgttaaggtagaaaatggtaagaaatgtgaaatctctttgaaagatcagcattgcttgacttcggtctgctagatgttgtgctgtggtaaattttgtgctctgaatccatctaggtgcagcgtttgtagagaaatggggattctcctccagggaacctgttgctgctgttactgaaataattaccttcttgttaatatattattgcctgtgctgtgctttggttttattaatgcgatagaacttgcc

SEQ ID NO: 11926 - DNA, 1366 bp, Artificial sequence
  DNA replication origin
tcattttgtctcccaagctgacatgcagtggcaccatcttggctcactgcagcctggaactcctgggctcaagtgaccctcccacctcagtctcccaagtagctgggattacaggcacgcactaccacacccggctaaatttttgtattttttgtagagatgaggttttgccatgttactaaggctggtcttgaactgctgagctcaaagcgatccccctgcctcggcctccaaaagtgctgggattacaagtgtaagccactgcacctggccgattcttttttcaatccaagacatataaagtacgttttctaaatatgctcactattcaaaaactaccatcacttctgccgttcctcattctccctcctcgatcttggcactgccacagttctcactctctccttccacaggagctctgtgtgagcatgcgagtgtgcgtgtgcatgacagcaggtgagtgtgtctgaggggtgtgtgcgtgcttgcacgggtgagtgctgcatctgtgtgagagcaggagagtgtgggtatgtgtgagagcaggtgagagtgtctgaggggtgtgtgtgcttgcacgggtgagtgcatatatgtgtgagagcaggtgagtgtctgaggggtgtgcatgcttgcacaggtgagtgcatgtatgtatgagagcaggtgagactatctgcagggtgtatgtgcttgcacaggtgagtgctgcatctgtgtgagagcaggagagtgtgggtatgtgtgagggcaggtgagagtgtctgaggggtgtgtgtgcttgcacgggtgagtgcatatatgtgtgagagcaggtgagagtgtctgaggggtgtgcgtgcttgcacaggtgagtgcatgtatgtgtgagagcaggtgagactatctgcagggtgtatgtgcttgcacgggtgagtgctgcatctgtgtgacagcatgtgagtgtgcgtgtgtgagagcaggtgacagtgtctgaggggtacatgcactcacacgggtgagtgctgcatgtgtgagagcatgagtgtgagtgtgagcgcaggtgagagagtaggtgtgtgtgcgtgctcacacgtgagtgcatatgtgagagcatgagcgtggggatgtgagagagcaggtgagagtgtctgaggggatgtgtgtgcttgcatgtgtgagtgcatatgtgtatgtgtgagagcatgagtgtgggtgtgcatgagagcaggtgagtgaggggtgtgtgtgctcacatgtgtgagtgcaggtgtatgtgtgacagcatgagtgcggatgagggcaagtgagagtgaagagggtgtgtgtgcgtgctcacacgtgtgagtgctgcctatgtgtgtgagcatgcgactgtgggtgtgca

SEQ ID NO: 11927 - DNA, 1156 bp, Artificial sequence
  DNA replication origin
attagtctctattataataaatctttgactggtttaccctgttgtcatccaggtctccccctgtcaggtaagctcctgtgcagggtttcttctgttttgctttgtttagtcctatttgttcgtggtgtatccctggtgcctagaacagtgcctggcacctgctaggcagccaggagtccttgtgcaatgagtaagtggatctccttcctaccatctgatctctgtgggagtggaggattcacaaccttctggggctgtccattgcagagattcttatgctgcttgctggattgattgaataaatatttactaggcacctactatacggcaagcattgttccaggtgctgggggatacaggaacaaagaaaacagacaaaaatccctggtacggagaagaaatcaaacaaagaaatcaaacaaagtacatcatgtgctcatggcagtagtgccatggaagacaaatgagtggggaaaagggggtgcagaactctaaatgggggacagctgaggccttgcagggaagtggcatttgagtgaaaaatgaaacaagtgaggggcgagccgtgtgggcatctgagggcagggcatgtcagggaaaaactgggaggaggaagaggaaccccggggagcagggggaggtggttgaagaggaggccagaggaggaaaggggcccaggctgttggccactataataacttgggcctttatgctgagtgacagggcagagaaagagacatgctcagatttatgttttcaccaagcattctagctgctgagttgaaacttgagtggaagggtggaggcagggagaccaggtgagaccaggaaggaggctgctgccgttgcccagggtgggagaacaaggctgatggtggcggggtggtgagaaacggttggattctggctagatttttgaagggtgagtcagcaggagttgcttttacagcagatgtgggatgtaagggaaagacaggggtttggaagatggagattttggtcagggcaactggaaggatggcgttgcatcagcagagacgagtttgcatggggaggagcaggtggctgggggtggagcgggcaatttggggcaggctggttttgagacgcagattacacattcagtcgcaggtgttgagtggacagtagagtatgc

SEQ ID NO: 11928 - DNA, 1337 bp, Artificial sequence
  DNA replication origin
actttgcgccgccgctcccgccgcgccaggctcctccccggcctcctccccttcctcctcctccccactcgcgcctccccagcctggggcaggtgagggcgcgccgccgcctcccgcccggccccgcgctccccccagcggccaggcagctgcgcgaggccgcgccccggggctgaggctccccgcaggcgggcgtggagcggaagagcctcccggatgccacgcattcctcgctgcggaggaggatgccccgcgcggggcgaccccgggagcctggctgcgatgccggccgcccgcagccttatatgggcagcccggcccgggagtccgccaggctggacccgctgactgttcccgccgggggcgctgcgcctccctgtgtggtcggctcctgcgaccctggacgagtcctttcgaccctgcgtgcctcggtctccctgcggggaagcggggtcataactgcgcctacttcggcgcggaggcctgagttaattcgcggaggcgcttagcgggtgcggagcgcgtggagcgggctggagaaaggttacctttcactagcgttctatcccggaggctgttgcggtcaccgaccccgccagggagaggtgttgggggtcaacggtgcgttgtcgcgaagagacctggagccgtgatccccagaccacgacccccacttaccacgtgaccctgacttctctgcgctccaccttcctctcctgtcagatggtgacagcgcctctcccaccggctctggacaccggcacgtgtccgcgcgtgtacgctggagtgtgtggcccggccttctggcgcggggttctagcgcccaggcttggcctgtcagagctgcaggggaggtggggtgggtatgggtgtttagggctgagttggagtcactctttggggtggtttggcggcttaattcccttcgcttgtgatgggtacgtgaggatggcccgagaagcctccatcagctgtttccatcctgcccgcaaacgaactcagttcctctctcaccccattctgctgtactgggccaagctgtttgtctctgggacttgtcctagaaagggcagagcccccagagccaagcagaacactgccatgcccctgcagacattcagtaatgaccagacaagccatcctcaggggacaacctctcaggtgatggttgggtaataaatttgaacaaccccagcagagattatcttgacccttagcccctttccttgcccacaaactctgcccaggtcaagcatgatgtgctcaatatcccaggcatgatgctcatcagctgtccgagcagcttctttctgtgtagatggaaacattactacctc

SEQ ID NO: 11929 - DNA, 1347 bp, Artificial sequence
  DNA replication origin
gagcctcagccccggggcgcggcctcgcgcagctgcctggccgctggggggagcgcggggccgggcgggaggcggcggcgcgccctcacctgccccaggctggggaggcgcgagtggggaggaggaggaaggggaggaggccggggaggagcctggcgcggcgggagcggcggcgcaaagtgaaactctggcaagttgcgggcgcgcggggagctgtcgcgggcagcgcgccctcgggaggacgtggccccggcccccgcccgcagtgggcccgaccctcatggccctgagcaaagggctgcggctgctggggcgcctgggggccgagggggactgtagcgtgctgctggaggcgcgcggccgcgacgactgcctgctgttcgaggccggcacggtggccacgctgggtgagtccgggccgggggcagcgacgcccggaggagagggcgcccgcattcgcccagcctcgggaagacgggtacccccccttcccgaggggatcgggcggcgctgggactgccggggcgtaggggtcgcgcgcagaggggtggctgtttgaatgaagtggggctggggactcgagagagcactctggctgggccggtggcgcacggaggccggccgcccctccacggggatctccggcccgcgccgccagaggatatggttgctggatagccggctggggcgctttgcgtattcatgaggatcccggggtgttgacttagccggcctgaccctgtgcctggcgccttttcttttgcacctgttgatgaaaccagtgattgccctttggtttgtgttggcggctccactcctggaggggatggggacaaaagccccaaaacataggctctggagaaaccgctgatggcagctttgtcccacgtaaatacttggtcgagaagcatcggtgctgcaatttatagaacttgtaaacaaatataccatgacctttatgctgtcttagatcctgccaagccagcgaatttcacctatggacttcagaagccttgaaactggcattgtgctatgggctttagtacgtgatctcacttaattctcacaattctactaaaaagctattattatccccattttgcagatgagcaaactgaggcctaaagaggctaagttgcttgccaaggtgacaccatccacctgacttttatgtggctgtttctgtaatgtcattcaatgcgtggcttcctggtatcgctaacctgggtcccttgttttgtgctaaccattataaggaaaacctgggtagcaccaaagcacgtgaaaccaggtctgattgttagacttctaaatgtggacacccgagagtaagctcccaccactagg

SEQ ID NO: 11930 - DNA, 777 bp, Artificial sequence
  DNA replication origin
agacagggacagaggaggggtagagagacccagtgagcagggaactctgctccttaatgaatggagaggtgtggtcaaggaggaagatggattccagatggttcctcctacggagggaagaggagctgtggcccaaaggagcaccacgagacagggacagggtgtctaccccgcctccaccatcactcccaaggacagcagagtggtctcaagagaaggcccagcttggggggagtgcgtgctgtaagggaagtgttcaaagaagaggccgaccacagtgcggtgcgggtaggtcaggggtggcgggggttgtgtttactgaagacagttccagaaggctagggggtcggcggggagagttgatcaacttactaaaagtcagctcctactccatatttcaatccagaatccagaaaacaggccagaattcatttttcaggactttctgatttatttgttgttgtttggtgagaaaatgagcatgggttagggacccactgggacctgttttctcacctgggttagaggggctatgagacggcctactgagccccaggctctcaggagcctctgaacaccaggacatgtggtccaagaaagatgaaggaacaaacagccaaatccagctctgagtaaacacactgattctgcttccttattcacagccccacaggtggcacatctcaggcacatatggtttgtgactctccggccttctccatacatgtctgctcttacgtacagaggccctgtctgtctctaggagaaaacatcatg

SEQ ID NO: 11931 - DNA, 818 bp, Artificial sequence
  DNA replication origin
gtgcaggatgtaaccagggctgaggtttcaccaggtggggaggacccagcaagagaagggcgggtggggagggtgagtgcaaggcagggctggtcactgacatggcaaagagggaaggtgtgagacagacgaggggctatgagaaggccatgggttctaagggtcgccatcccagtggggtcaaagatcactgggggccgggcgtggtggctcacgcctctaatcccagcactttggaaggccaaggtgggtggatcacgaggtcaggagattgagaccatcctggctaacatggtgaaaccccatctctattaaaaatacaaaaaattagccgggcgtcgttgcgggcacctgtagtcccagctactagggaggctgaggcaggagaatggcgtgaacctgggaggcggagcttgcagtgagccgagatcgcgccactgcactccagcctgggcgacagagcaagactgtctcaaaaaaaaaaaaaaaaaatagtcactgggactgggaattgcaggatgagtgacaaggtgaaagtggagaaagaagagtgggatgtttgagacagatgctggaggggtcaggggcgtggcatgggagcgagtggctgcaggggtggggtcactcactggaggagagggggcgaaggtcctccgaaggatcaacgacgtggccactgaagacaccaagaacaagcgccagactcatagtgagaaatgacagcgagaaagagggaaaactcaccaaggaaccatgcaactgccgaaacgaggggcagtgagggacgcagtctcgtggtgttactggaaaggggtccc

SEQ ID NO: 11932 - DNA, 1379 bp, Artificial sequence
  DNA replication origin
ctcaaacaacaacaaaaattagctgggagtgtggcgtgcacctgtaatcccagcaataaaataaaataatcatgaggttggaggggatcccctagggagtgagtggagggcaccgacttctgggtgcagcatgtttgaaggtcagggtggactgagaagtgaccaagaagatacaagaaaacccagcagtgcgtggcatcctggcggccaggagaagaaagcgtttcaaggaagcaagagcagtcagcaggtcagaggctgcttctgcatctataatttgaggactgagaatttgtcactttagtcagactttggcagctcagagaggaacagtttcagtaaagttgaggggcaaaaacctgaatggggagggagagagaaaatggacacagtggcaacagatgattctctgaggaatttcctgtgtgtgcatgcattgtgtgcatggatcgtgcgtgtgtgcatacgtgtgtgcgcatgtgtgtgcgtgtgcatatgtgcatgtgtgcgtgtggcaagcagagaaatggagaggctgctggagaggaaagtgggtcaaaagatttccttaggccaggggcatttataccaagttttgtgctggcagaaatgagccaggagagaggcgaggattgatgcagctgagagagaggtcaggaccaatgcagccaagagagaggtcaggacggatgtggcaggagcagggagctccgaaagccatgccctggagcaggccatgggcatctgcacacaggtagcactggcctgaaacgtagacagtgcactgcggggagcaggtgggaagggggacagacatggtgggcgggtagtggtggtgcagggagccagcgggaattctcttccagtggcttcaaattttggggtggaatgagaggacgaggccatcagctgaaagtgaggatggggaggaggcacagcagagctgaggaaaggggagggtggagttgccatctgggagggtgggggagtggacagagcacagaaacgcaagtgaaaggcccaccttggctcaggggttgtgacctgatggtacgctctgcccgtgtggtagtggggcatctccagaaacttctactgcacagcggctggtgcaggcgtggagtgcaggatgtaaccagggctgaggtttcaccaggtggggaggacccagcaagagaagggcgggtggggagggtgagtgcaaggcagggctggtcactgacatggcaaagagggaaggtgtgagacagacgaggggctatgagaaggccatgggttctaagggtcgccatcccagtggggtcaaagatcactgggggccgggcgtggtggctcacgcctctaatcccagcactttggaaggccaaggtgggtggatc

SEQ ID NO: 11933 - DNA, 1263 bp, Artificial sequence
  DNA replication origin
tcctgggaagccaggcctctgggagtgctggaggtgggcagtgaggctgccaggcccctgccttctggggtggggtgcatgctcctgatacatcagaagggtcgggggaggacttggaggtgaaggcactgcaggaagagaggaagcttactggagagacggtcaatggggcagtcaggctttaaaaggacgggcccaccaagtgaaaagatgaccaagtgtttgggctgaattgtgtcctccaaaaggatatgttgaagcctaacccccgggacctcagaaggggatcttatttggagatagggttgttgcagttgtaacgctgagatgagattatactggagtagggtgggcccttaatccagtgtgactgctgttctaagaagatgtacatgtgacaatggagggacatgtggggagaggatggccacgtgatgatgggggggacatgttgggagaggatggccacgtgacaacagggggatgtcaggagaggatggcctcgtgacaacgggggaatgccaaaagaggatggcctcgtgatgacaggggacacatggggagaggatggccttgggacgacaggacatgtggggaggggatggccacgtgatgatgggaggacatgtggggagagaatggccacataatggtggggggacacatggagagagaatggccacataatggtggggggacacgtgaggagaggatggccacatgacaattgggggacaccacgcggggagaggatgaccacataacaacgaggggacatattgggagagaattgccacgcgacgacggaggaagggactggagtgaggaagtcataagccaaggaacgccaaggacagaacaagcagcaaacacaagacacagggccaggtaaggaggtccccggctccaggtatcagaggagccctgctgatgcctggatttcagctctctggcctctggacccagaagagaatgaagttctgctgcctggggcctcccagtttgtttacagtgagtctgttcatggtggagaaacatcttctcatgatgttcctgtccaccatggtcaaggcctgttttgagctcctgcattgtataagtcagaggtaaagctgtttttctcaaggggtcaataattgacagtattggaatgggacaaggtggtcctgttgggttttgtttgtttgtttttaaaatatgaggatagaaagtcgtgtttttacttgtgcttaattttcccagtggccgggatgtgaagtccac

SEQ ID NO: 11934 - DNA, 1166 bp, Artificial sequence
  DNA replication origin
cagggacactaatttccccctaaaatctgagtcatcctaatgatcaaatttgccttattattaatagaactatttatttaatactcaacttagttttagaaaatacatttaaaatacatattgttgctggagtcagcttaaaggggcttttgctggccaaatctgggacaatctgaacatcaaactgtatgaggacagtaatggattttaacctgatgaataaaatagaaattcatgaatctatactgatgataactagatgggtgaatagatggatggatggatggatggatgaatagctgggtggatgggtaggtgggtggatggatggatgaatgaatagctgagtggatggatgggtgggtggatggatgaatagctgagtggatggatggatggatggatggatggatagctgagtggatggatagatgggtggatgggtaggtgggtgggtgagtggatggatagatgaatgggtgaatggatgggtggatggctgaatggatggataatgggtggatggatgaatggggggatggatggatgggtgaatagatgggcgactgaatggatagatggatgggtgaatggggatggatggatgggtgggtggatggatggatcagtggatggatagaaaggtggataagagaatgggtgggtggatggatggatcagtggatgcatcagtagatggataggtgggtggatggatggacaggtgaatgtgaggatggatggatgggtgggtgaatgggtagatgaaagatggatggataggtaagtgggtgagtgggtgggtggatgggtgggtgcatggatgggtggatggctgggtggattgatggctggatggctggatgggtggatgactggatggatggatggatgactggctggatagagggatgggtggatggtgggtagacaagtaggtggataggtggatgggtgggtagataggtggacgatgagtggataagcaggtgggtgggtgaatgagtggatgaatggatgggttaatgggtgacagatgggtgaatcagtgtgcaggtgggtgggtgtgtaggtgggtgaatggggaacaagagagggctctatagtagaataccaagtaataaatttggaggaaatcatttaaaaatcatcattttacaactgtc

SEQ ID NO: 11935 - DNA, 965 bp, Artificial sequence
  DNA replication origin
ctgtgcccccagcacccggtggacaggcttctggggcttttctcttcctctcccctttctttgggacccctcagtgttcccacaccccactttccccagccgctcggacgctcgccacacacctcggcccacagatgcagaagcgcctcggcgttgccggcagagtgcgcctgcgccgatacgccatcgcgctagggacgctattgtgggtggagccagccggcgggaggcgggcccagagcgggccgagggggcggggtcacgagccgccagccgccgggtggagggtcccggccgggagccgcggaaagagtagggctccccagacaacggggtccgacgagcagttgggcacgggctgagtccgcctgccggcaggtaggacgtgaaggcaggggtggtgtgggggcggacgggggcgtcggcgcagctgggcgcggtggggagcggagaatggggagggcagggaccgggcacggccgagcaccgccgtctggcgcgcggaccggaccgaccagctgacgctcggctgggcgtgagggcctctctctctggtggtcgcgagcctgactcgtctttccctgtcgctgcctttctctggctgctgtcgaggccttggggagtgcacctgccggtccgtcttcccgggctcggtagtcacggagagatgaggaggaggaggaaagggcctcaccagtcacttctgagccttgcagaccaccgcttcctgctccctctctaaccccagagatggaatagattgaatgctgagagagctctaaactcggcaacggtcattttaaagtgaaagaccccagaaggttctaaagttactccctttccccaagtctgttctgtaagtctaaaggaacactgtcattatttttactagttgagatatgagattcttgttttctgttccttaggttaaattgtacttcccgcattaagctcatgctgccttt

SEQ ID NO: 11936 - DNA, 1692 bp, Artificial sequence
  DNA replication origin
ggctccggtggcgggcggcgcggcggcccgcggggtggcgttggggacgcgagccctgggccggggagggagggcggccggggggcgccaacggccggcggtgggggccggggcggtagcgccggccggggaggcgccgctcgccgcgccgggtcacgtggcgcggtcacgtggcgcgcagccgggccggcggcggcggcggtgaagggaggcggagactcggccgagacgcggggggaggcggcggcggcggcgatgcggggctgctggaggcggagaggcacggaggagccgctggggctgccgccacggccgcccggaggtgagcgggcgcggggccactgtcgccgccgcgcagtcccgcgggagggggcgccggcccgagcgtcgtccctgccccgccgggcgtgtgtgcccctgcggtgggccccggggtctgcgcggcgggcttggtgggcgcggcgggcgggggtcggggcggtggctgcgggagtcttgggagggggcggcgcaagggggcgtctgacccgggcccggcggccgtggccgctgcttggctgtgggagccttttgtctccgcgtgtgagaaaatggggcgaaagctgagcgcggggcgggcgtgcgtgtggggtggtgcgtgtggtgtgtgtgtgagatcgggaggcgtttggcttggagccatttttttttcttaattgtggagacagaaaatccctgaaaacggtttccccagggagactgggctgcgctcctcctcttcctccccggcgtcgggcccgagcggcttccccggccgcgccgccacctcccctgccggaccagtctccccagcccgcctgccccaccttccgcgaagcccccgggcgagccgggtgactgcagagcgggccgggtcacctgtcgtggcagctgcatggaaatcccggcgcttctgctgtctggagtctgtgctgtttcctctggcaaatcacggagattctgttccgagcaccaacccttcctctttgccatgcgctccacaacgcagagcaggacgccgattccgaagtttgacccgcttggggcaattagctgggaggtgtctacttcttcctgtggcgacaccgcttcagggatgggaaggtgagggtggtctggctttgtggaaggaaacgagggtgacacagccctctccgaggttgaggtccgttagggtcctaattccttctacctgctgaactgcccttgtcatcagaaagtctcttaagactttcctgtcggggataatcagctcccctcgccaggaactgtctcctggatctctttggggtctcccccacgcccttttgttttacagtagttcagcaccttaaggatatcctttaagtcattgcaataggcaggtttatgaaaaagcacagaggaagttatttctaaggttttgaaggacgtaaaaacccgttgcaggtgtgggtgtgggtcccttcctttgtgcctcttcctccgtgtctgggttctccatttcttagttgaagttcttgcagacaaacccgctgggaatggtgcggtggtcctggaaagttctccccgggctccgcagcgccagattgctggggtgtgaggttgtgatggatgagaagtgacagggcaccttgcacatagccacactgcaatccagagaggccatgggcacactcatctcgcgttgtgcag

SEQ ID NO: 11937 - DNA, 1127 bp, Artificial sequence
  DNA replication origin
ccgtccgggagggaggtgggggggtcagccccccgcccggccagccgccccgtccgggagggaggtggggggtgtcagcccccctgcccggccagccgccccgtccgggaggtgaggggcgcctctgcccggccgcccctactgggaagtgaggagcccctctgcccggccagccgcccggtccgggagggaggtgggggggtcagccccccgcccggccagccgtcccgtccgggagggaggtggggggggtcagccccccgcccggccagccgcctcgtccgggaggtgaggggcgcctctgcccggccgcccctactgggaagtgaggagcccctctgcccggccagccgccccgtccgggagggaggtgggggggtcagccccccgcccggccagccgcctcgtccgggaggtgaggggcgcctctgcccggccacccctactgggaagtgaggagcccctctgcccggccaccaccccgtctgggaggtgtgcccaacagctcattgagaacgggccaggatgacaatggcggctttgtggaatagaaaggcgggaaaggtggggaaaagattgagaaatcggatggttgccgtgtctgtgtagaaagaagtagacatgggagacttttcattttgttctgcactaagaaaaattcttctgccttgggatcctgttgatctgtgaccttacccccaaccctgtgctctctgaaacatgtgctgtgtccactcagggttaaatggattaagggcggtgcaagatgtgctttgttaaacagatgcttgaaggcagcatgctccttaagagtcatcaccaatccctaatctcaagtaatcagggacacaaacactgcggaaggccgcagggtcctctgcctaggaaaaccagagacctttgttcacttgtttatctgctgaccttccctccactattgtcccatgaccctgccaaatccccctctgtgagaaacacccaagaattatcaataaaaaaataaatttaaaaaaaaaaaaaaaaacaatttaacaaggcattacttgctatgtacacaaaccaggccgaacaatgcctcaaaatatctgccagtttacattcccaaagtcccgagcatctctcaccta

SEQ ID NO: 11938 - DNA, 1417 bp, Artificial sequence
  DNA replication origin
tcccagtaggggcggccgggcagaggcgcccctcacctcccagacggggcggctggctgggcggaaggctgacccccccacctccctcccggacagggcggctggccgggcggggggctgacccccccacctccctcccggacgggggcggctggccgggcagaggggctcctcacttcccagtaggggcggccgggcagaggcgcccctcacctcccagacggggcggctggccgggtggaggctgacccccccacctccctcccagacggggcagctggccaggcggggggctgaccccccccacctccctcccggacggggcggctggccgggcggggggctgacccccccacctccctcccggtcggcacggctggccaggcggggggctgaaccccccacctccctcccggatggcatggctggctgggcgggggggctgaccccccacctccctcccggacggggtggctgccgggcggagacgctcctcacttcccagatcgggtggctgccgggcggagaggctcctcacttctcagtcagggcagctgccgggcggaggggctcctcacttctcagacggggtggttgccaggcagagggtctcctcacttctcagatggggcggccgggtagagacgctcctcacctcccagacggggtctcggccgggcagaggcgctcctcacgtcccagagggggcggcggggcagaggcgctccccacatctcagacgatgggcggccgggcagagacgctcctcacttcctagatgtgatggcggctgggaagaggcgctcctcacttcctagatgggatggcggccgggcggagacgctcctcactttccagactgggcagccaggcagaggggctcctcacatcccagatgatgggcggccaggcagacactcctcacttcccagacggggtggcggccgggcagaggctgcaatctcggcactttgggaggccaaggcaggcggctgggaggtgtaggttgtagtgagctgagatcacgccactgcactccagcctgggcaccattgagcactgagtgaacgagactccgtctgcaatcccggcacctcgggaggccaaggctggcggatcactcgcggttaggggctggagaccgcccggccaatacagcgaaaccccgtctccaccaaaaccagtcaggcgtgaaattgttttttttttgagatggtgtctcgctctgtcacccaggctggagtgcagtggcgtgaccttggctcaccgcaacctctgcgtctctggttcaagcgattcttctgcctcagcctcccgagtagccgggactacaggcacgcaccatcacgcccagctaatttttgtatttttagtagagacggggttttaccgtattggccaggctggtctcgaactc

SEQ ID NO: 11939 - DNA, 953 bp, Artificial sequence
  DNA replication origin
tgtccgggagggaggtgggggggtcagccccctgcccggccagccgccccgtccgggagggaggtgggtgggtcagccccccgcccggccagccgccccgtccgggagggaggtgggggggtcagccccccacccggccagccgccccgtccgggaggtaaggggcgcctctgcccggccgcccctactgggaagtgaggagcccctctgcccggccagctgccccgtccgggagggaggtgggggggtcagccccccgcccggccagccgccccgtccaggaggtgaggggcgcctctgcccggccgcccctactgggaagtgaggagcccctctgcccggccagccgccccgtccgagagggaggtgggggggtcagccccccgcccgaccagccgccccgtccgggaggtgaggggcacctctgcccggccacccctactgggaagtgaagagcccctctgcccggccgccaccccgtctgggaggtgtacccaacagctcattgagaacgggccatgatgacaatggcggttttgtggaatagaaaggggggaaaggtggggaaaagattgagaaatcggatggttgccgtgtctgtgtagaaagaagtagacatgggaaacttttcattttgttctgtactaagaaaaattctttggccttgggatcctgttgatctgtgaccttacccccaaccctgtgctctctgaaacatgtgctgtgtccactcagggttaaatggattaagggcggtgcaagatgtgctttgttaaacagatgcttgaaggcagcatgctcgttaagagtcatcaccactccctaatctcaagtacccagggacacaaacactgcggaaggccgcaggttcctctgcctaggaaaaccagagacctttgttcacttgtttatctgctgaccttccctccactattgtcccatgaccctgccaa

SEQ ID NO: 11940 - DNA, 1248 bp, Artificial sequence
  DNA replication origin
cctccctctcggacggggcggctggccgggcagaggggctcctcacttcccagtaggggcggccgggcagaggcgcccctcacctcctggacggggcggctggccgggcggggggctgacccccccacctccctcccggacggggcagctggccgggcagaggggctcctcacttcccagtaggggcggccgggcagaggcgccccttacctcccggacggggcggctggccgggtggggggctgacccccccacctccctcccggacggggcggctggccgggcggggggctgacccacccacctccctcccggacggggcggctggccgggcagggggctgacccccccacctccctcccggacagggcggctggcctggcgggggctgacccccacctccctcccggacggggtggctgccgggcggagacgctcctcacttcccagacggtgtggttgctgggtggaggggctcctcatttctcagatggggcggctgccgggcagaggggctcctcacttctcagatggggtggttgccaggcggagggtctcctcacttctcagacgggacggccgggcagagacgctcctcacctcccagacggggtcgcggccgggcagaggcactcctcacatcccagacggggcggcggggcagaggcgctccccacatctcagaccatgggcagccgggcagagacgctcctcacttcctagatgggatggcggccgggcagagacgctcctcactttccagactgggcagccaggcagaggggctcctcacgtcccagacgatgggcggccaggcagagacgctcctcacttcccagacggggtggcggccgggcagaggctgcactctcggcgctttgggaggccaaggcaggcggctgggagatggaggttgtagcaagccgagatcatgccactgcactccagcctgggcaccattgagcaccgagtgaaccagactccgtctgcaatcccggcacctcgggaggctgaggctggcggatcactcgcggttaggagctggagaccagcctggccaacacagcgaaaccccgtctccaccaaaaaaatacgaaaaccagtcaggcgtggcggcgcgcctgcaatcgcaggcactcggcaggccgaggcaggagaatcaggcagggaggttgcagtgagccgagatggcagaagtacagtccagcttcggcttggcatcagagggagaccgtgggaagagaggga

SEQ ID NO: 11941 - DNA, 1143 bp, Artificial sequence
  DNA replication origin
ccaaggcaggcggctgggagatggaggttgtagcaagccgagatcatgccactgcactccagcctgggcaccattgagcaccgagtgaaccagactccgtctgcaatcccggcacctcgggaggctgaggctggcggatcactcgcggttaggagctggagaccagcctggccaacacagcgaaaccccgtctccaccaaaaaaatacgaaaaccagtcaggcgtggcggcgcgcctgcaatcgcaggcactcggcaggccgaggcaggagaatcaggcagggaggttgcagtgagccgagatggcagaagtacagtccagcttcggcttggcatcagagggagaccgtgggaagagagggagagggagaccgtggggagagggagagggggagggggagggggagagggagagggagctcagtttttattttcaacaacaaattctgttagttgttttccttaaagtggcaggcttactttgttcatgttcaagaaaatgtcggccaaatatcccagctggaacaaccataatttgtcattcatactttttagtaaacttggggtattagcccatttgcattactataaggaatacctgagactgggtaatttataaagaaaattgttttaattggctcatggctctgcaggctttacaggaagcatggtgctggcatctgtttctggtgaggcctcaggaagcttacaaacatggcagaaggtgacaaggaactagcatgtcacatagctagagcgggagcagcaagagaggtgggaggtgctacactttttttttttttttttttttgagacggagtttttctctttcgcccaggctggagtgcagtggtgcgatcttggctcaccgcaacctctgcctttcggtttcaagcaattcttctgcctcagcctcctgagtagttgggattacaggtgcccaccaccatgctcaggtaatttttgtatttttagtagagacagggtttcaccatgttggccaggctggtctcgaactcctggtgctacattcttttaaacaaccaggtatcgtgagagttcactcactgtcagaagacagcaccaagacattcatgagggactgcccccatgatccaaacacctcccaccaggccccacctct

SEQ ID NO: 11942 - DNA, 1131 bp, Artificial sequence
  DNA replication origin
ggcagaggcgcccctcacttcccagacggggtagcggctaggcagaggcgctcctcacatcccagacggggcagccgggcagaggtgctcctcacttcccagacgatgggcggccgggcagaggtgctcctcaattcccagacggggtggctgggcagaggcactcctcacttcctcccagacggggcggccgggcagaggcgctcctcacctcccagatggggcggccgggcagaggcgctcctcacctcccagacggggcggccgggcagagacgctcctcacctcctaggtggggcggccgggcagaggcactccccacttcccagacggtgtggcggccgggcagaggcactcctcacctcccaaacggggcggccgggcagaggcgctcctcacttcccaggcggggcagccgggcagaggcgctcctcacttcctcccagacggggcagccgggcagaggcactccacttcccagacggggcagccgggcagaggcgctcctcacttcccattcggggcaaccgagcagaggcgctcctcacttcctcccagacggggcggccgggcagaggctctcctcacttcctagacagggtgggggccaggcagaggtgctcttcacttcccagacggggcggccgggcagaggggctcctcacatcccagacgatgggcggccaggcagagacgctgctcacttcctagatggggtggcgggcgggcagaggctgtaatcttagcactttgggaggccaaggcaggcggctgggagggggaggttgtagcaagccgagatcacgccactgcactccagcctgggcaacattgagcactgagtgagtgagactctgtctgcaatcccagcacctcgggaggccgaggcaggcagatcacccgaggccaggagctggagaccagcccggtcaacacggcaaaaccccgtctccaccaaaaatacaaaaaccagtcaggaatggtggcatgtgcctggaatcccaggcactcggcaggccgaggcaggagaatcacgggagcccgaggcagggaggttgcagcgagctgagatcatggcagtacaatccaggcttggcaagagagggagaccgtagaaagaaaggaagaggg

SEQ ID NO: 11943 - DNA, 1249 bp, Artificial sequence
  DNA replication origin
ggcccgcgggctgtcggccagctgggccatcttgagcgtagcctcacggttgttcctccgcagggtagcgtggatgaggctattgtcggacctctgggcagccccccgcccctgggccagctggctggcaatttcaggatacgggggtgggtccccggtggggatggagtagcgagggacggtcaggcggttcagggtggcactgctgcagggctgagggaccttcttctcagtggccgtgagcctcaaggtggcagagctacccgggccggggagggtgtacgtgttctgggagcacagcatccgggtgcggggccggcacacctcctccacgttgccactgctgtcgaaggtggtgatcctctcatagcccaggggggtctggtagtgcactgacgtggggtagagggagaagtcgcccttcttcaagcacacatccactgggggctgtgggggcggcagagggggcgggggtgctgctgtggtgggggcagcggggatggttcctgggtacgggggtggagggtttatcttcgtcacctggacctcctggggggcactaaagaccactgcgtccccctcagctgccagctgcggtgttggccgcagggccttggctgacttctgcaggtgttcgtggtctcggtctccatggcccaccgtggacagctgcatgggcccctgcggcgggggaggcagggacagtggaggggggttctgaatgatgcggcccatttccacgcttccgaaaatcacctgtccaggattggagtaccggttggagactgggtactgggtggcactgtcacctgcatgttctgctgtccctacagctgtcgtctggttggtcaggacatctagctgcacattctgattggccagtagggactgcaccagccctatgctctgcgtgggggacatagcctgagccgagctgtggatcggtgcaatagggatgttcacggtacaaggtgggctgttctcagggacaccagatgctcctgtcactggaagaaaattagaaaaaggaactgcttacaaaaacactgccattaaaccagatcaggataagcaatacgtctggactcatccagtctccttctgtaaacaaaatgcaaattgccagagacagagacgtgtctgcttggggaaagctggcctgctcgcacaagggagatgggttcttgagggcagcctgctgctgtctgttagctaagggtactgtcagaacttttcgactaactcactt

SEQ ID NO: 11944 - DNA, 845 bp, Artificial sequence
  DNA replication origin
ggacagttttaaggggttgggccctgaagtctgtgctgtcctttcttgaggaacccaaacatcctcacccagcatggggtcccactggtaagggggtggccgtttcagggtgacagcagcttcaggcaggggagggtgcctcaagggcttctcaagctgacagtgctgggacagggcctcgtcctccgtgaaggccgagttgacgtagtcggtgcggtcgcgggcgctgtcgggtgggctcaggaggctgtaggaggactgggaggccaacggggaggcgctggcggtatgggccagggaggctccgggctgtgagctgggccctgtgccactgcactgactgcaggtgtacagggcaggtgggggccgcgctgggagctgtgtcaccacccccccgggcccgcccttggacttggccaggggctgcaggggggcccgcgggctgtcggccagctgggccatcttgagcgtagcctcacggttgttcctccgcagggtagcgtggatgaggctattgtcggacctctgggcagccccccgcccctgggccagctggctggcaatttcaggatacgggggtgggtccccggtggggatggagtagcgagggacggtcaggcggttcagggtggcactgctgcagggctgagggaccttcttctcagtggccgtgagcctcaaggtggcagagctacccgggccggggagggtgtacgtgttctgggagcacagcatccgggtgcggggccggcacacctcctccacgttgccactgctgtcgaaggtggtgatcctctcatagcccaggggggtctggtagtgcactgacgtggggtagagggaga

SEQ ID NO: 11945 - DNA, 1043 bp, Artificial sequence
  DNA replication origin
caggccaaggccggggcgcgccggggtcccggaggggactgcggcccggaagcctccggccgccccgccgctgcccgcgccgcgcccacctgtagtagcggtcatccttgaagggcgtgaggtcctccttgagctcgcggtacgcttcccgcagccgccggcacaggtgcttgagctcgctgcagagcgggggctcaaaggcagggtactcggcgtccatgccgcgcagcctcccgggtcccggtcccgccgctccaccctttgtgtcgccgcctgcgccccctctcttctcccagcactggggatcgggctgctggcgcgctgggcgggaccgaggaggaggagcaggtgcgggggaggtggtgagggggcgcgcaggactcggacccagtgcgctcagggctccgccgcgagcacgcgaggagctggacacggcgcgggtgggggctgggggacccggccccccgccccgtgaagaggcctgagtgggggagggagccgcgcccatccgcctccgcgcccatccgccgccgccccgggagaggcagaaggcgggggaggaagtgcaacacaaggtcgtctgccgcccaggacaaaaatctcagtgccgccctcgccattggcagcgctgggaagggaagacactggaggtgggagcacgaaggaaaatggtgcttgggggcggaccgaaggccctttcctgctggggaggtcaaaggctgaagccggctaccgcgttcagcaccgcggacagctcccgcgggcgacttctggcttcttgggctccacttggccgaatgcagaaacatttaaaactaagcccattagggttatagtcataataaatattatttttaaatgaagtgtgtccaagtgaggtgcttcttcccacatgtactaaaaccaccaaaaaaagtctaggcagaggagtttctcaccttctacaagctcaacactagtgtgcaaactatagttaaccagttaacacgtcttctacggaatggcttctccaaagcgtggtgtgatctcctcttgtgaatttt

SEQ ID NO: 11946 - DNA, 1464 bp, Artificial sequence
  DNA replication origin
ttccttctaaattttgttttatttctggggtgtgtgtactggtggagaactttggatttagtagaatatctgaggtgaatctaaatagattcttcccagtctcctggcttgtgtacctggacggttggagttgttgtgtcctgagatgggccaggccacaggcacaggaccaggggtttggtgtgaggcaggtcatgtgtgaggtacctgcttgatagccaaacgggcatgccaagtggttgagtaggggtctggagttgaggggagaggactgggctgaggtctagagcaggccattgttcatacctgcatcctctcgcaagcccgagacaggatgagattaccaagggagtgagagtagagaaggggaggggacagagagcagtgtgtcccaggatgatgatggtgagggaggtgatggggtgaggaagatgatggcgaggagttgatgagggaggtgatggtgagggaggtgatggtgagctcctgagggaggtgatggggtgaaggagatgatggtgaggagttgagggaggtgatggggtggagggaggtgatacggtgagggaggtgatggtgaggagttgagggaggtgatggggtggagggaggtgatacggtgagggaggtgatggtgagctcatgagggaggtgatggggtgagggaggtgatggggtgaaggagatgatggtgaagagttgagggaggtgatggggtgagggaagtgatacggtgagggaggtgatggtgaggagttgagggaggtgatgatgaggctgtggagagaccgacggaagttttccagctcctgtctcatttggattagacactccacaaacctcaccttgcttggaagcagtcttttgggaaagaaaagatgaataatgaggggagacctggctcacggtgatttgcattatggatgccattttggggataggcattccagtaaaggtgtgtttagtttttctaggaaacacatctgtgatattttaaagcacctgtgaaagtgagattaatttagaaagggcccaaagagtcaaggggaccttcaggggacagtttatttccttgcctttgacagatcttccaagggccccgcggctctaggcaggccagaatttgcgagtgtattagatgcctcttgtgaaaagctgcatgggccaggaggggaaactgacatgtggccccagcaagaagaagaggcagtgttgagagccggcaggggttttctaggaagtcttcctggcctgggtagctgggccgaggacttcctcagctggcatgctgacccggctgggcaggtggggaagcatggagccccttgcctagcatctctccaccaacttgagggaacaacacaaacgcttttggaataacgagtggaagttgagtttggtagatgattttgtatgcctcccacgtgccaagccgttcgccgtcaggcactctgctgtgtagtg

SEQ ID NO: 11947 - DNA, 1184 bp, Artificial sequence
  DNA replication origin
cttcaggggacagtttatttccttgcctttgacagatcttccaagggccccgcggctctaggcaggccagaatttgcgagtgtattagatgcctcttgtgaaaagctgcatgggccaggaggggaaactgacatgtggccccagcaagaagaagaggcagtgttgagagccggcaggggttttctaggaagtcttcctggcctgggtagctgggccgaggacttcctcagctggcatgctgacccggctgggcaggtggggaagcatggagccccttgcctagcatctctccaccaacttgagggaacaacacaaacgcttttggaataacgagtggaagttgagtttggtagatgattttgtatgcctcccacgtgccaagccgttcgccgtcaggcactctgctgtgtagtgcagactgcatctgttgtaatggtttcaactgtgggcagccgtgagagatggagggtgagggaacacttcagggagaaggtgggacacagctgaaccctggatgctgggtgggattgaggtagctttgctgggagaagagagagcatcttagatcagcagagcgctgtgtgagtgggccagcctggagtctggcttgaccctattgggcagcatcatagaattgaagctctggagttggatgcgcgggtttcagtgttgcacttagcagccttgtgatctagggcaagtaatggaaccttcctgagtctgagctttctcatctgaaaggggttgcagtagtacctatctcagggctgtgatgacggagggagtgcgtataattcacataggatatgtgcagggtggcaggaaggctggagagggattgtggggaaggatctcggggactttgaaaggcctgtctaaacttgatggagttggctgcggggcactgtacgcttcctgagcagggcgaggctgttaaagtgctgtaatggcacaaaggaaggtgcgtttggaggtgatggcagcagctggcaggagtttttggggcctgaacagtgggactggcgtgctggggatgaagaggaactggggagcaaggactcagctcttcctggctggctgaaagtgtggaaggagcgagagaagggcatctgagatggtgccaggtttcagggtacgagaatggagaaagggtggaggcaggaagtgggcagtggaagcgggct

SEQ ID NO: 11948 - DNA, 1622 bp, Artificial sequence
  DNA replication origin
attcttatctctctcgaagtacctgtgtgtattgcacttaattaatgtgaatgaattaatgaaattacatgtaagctaaattgtgcaaaaccaatgaccttgtgttaatacacatttggttgtacagctcaaatgaagtaatgcttcctgctattgttaaaatagtgttggttgctactgatgttgtatgtatgtatgtatgtatgtattttgagacggagtcttgctctgtcgcccaggctggagtgcagtggagcgatcttggctcactgcaaggtccgcctcctgggttcatgccattctcctgcctcagcctcctgagtagctgggactacaggtgcccgccaccacggccggctaattttttgtacttttagtagagacggggtttcactgtgttagccaggatggtctcgatctcctgacctcatgatctgccctccttggcctcccaaggtgctgggattacaggcatgagccaccgcacctggcctgttgtatttataagcaccacctcttatatggcaagccctcttctgggtaccagggacagcgagatgcagaagatgaggccatgtcctcaaaaaggggagagacagatgcatattgattacagtggagtcagaggagttttagtgcaggcgtgcacagtaaccacaatggggccagcctggtgaggacagtcatggaatccctgtgaatgaactcttagaagggtcatggaggaggtgagctggggtgtagatgaaggaggtgagctggggtgtagatgaaggagtgtgagctggggtgtagatgaaggagtgtgagctggggtgtagatgaaggagtgtgagctggggtgtagatgaaggagtgtgagctggggtgtagatgaaggagtgtgagctggggtgtagatgaaggagtgtgagctggggtgtagatgaaggagtgtgagctggggtgtagatgaaggagtgtgagctggggtgtagatgaagggctgtctgggggaggagccgtgggaagagggtcatggaggagtgtgagctggggtgtacatgaaggactgtctggggggaggagccatggggagagggtcatggaggagtgtgagctggggtgtagatgaagagctgttctgggggggaggaggcgtggggagaggcacaaggcctggagtgggcacaggcagctgggaggctctgtttgactggggctgagcgaaggagatgggggtggcagaaagggacagtggagaggcaggtagtcactcaagcacccgcggcctctggatttgcctcctggggctgcagtaacagagtgccacaacctggggatcctccaacaacagaaatgtatcatctcccagttctggaggctggtaggccgaaattgaggtgtcagtggggccatgcttcctctgctggtgctagggtagaacgctgcctccctcttcctgcttctagtgggtctcagcaattaccccagtctctgccctgatggtcacggggctgtctccacattgtctcccctctgtgcccatctgcctgtgtgtctagattcccccttcccttcttgtttttgagacagggttttactctgtcactcaggctggagtgcagtgctgcgattatagc

SEQ ID NO: 11949 - DNA, 1710 bp, Artificial sequence
  DNA replication origin
ggcccctccctggggccagcacagtgcaacgttccctctccagccttgacccaggccccgcctgtgccccgcgtcgctgcagccggcagggggcagcagaaagccacgcgcacgcccggtccgtgcaggagccgcagcggggacgcgggggatttgcgacccgggccgaagcggaggtttcctagctggggtctgagatgtggacctgaggcagaactgcccgtgggggatagcaggaggagacgaggtgggggtgacagtaatcgtgcaggcagggccggcctcaccgggtaggcagggcaataagggacaattggtttgctggagtgaaagggcaaggcctgcaggcggaggggtgaccccgcagggtggggcaccccggaagccacgtgggcctggacttcagaccacgccatagggagtcactgaagggttccaggtggtagtgtgatagcctcagattctctaagagggatgtggctttttggtgactgtgcctcaggatactgttgccacaaccagggacagagtgacagtgagggctgtaaggccacatagggcaggagggacccagggcagggtgacagtgagggctgtaaggccacatagggcaggagggacccagggcagggtgacagtgagggctgtaaggccacatagggcaggagggacccagggcagggtgacagtgagggctgtaaggccacatagggcaggagggacccggggcagggtgacagtgagggctgtaaggccacatagggcaggagggacccggggcagggtgacagtgagggctataaggccacatagggcaggagggacctggggacagggtgacagtgagggctgtaaggccacatagggcaggagggacccagggcagggtgacagtgagggctgtaaggccacatagggcaggagggacctggggacagggtgacagtgagggctgtaaggccacatagggcaggagggacctggggacagggtgacagtgagggctgtaaggccacatagggcaggagggacctggggacagggtgacagtgagggctgtaaggccacatagggcaggagggacccggggcagggtgacagtgagggctgtaaggccacgtaggacaggaggaacccggggcagggtaacactgagggccgtaaggtcacatagggcaggagggacctggggacagggtgacagggctataaggccacgtaggacaggaagaacccggggcagggtaacactgagggctgtaaggtcacatagagcagcggggggggacctgggggcagggtaacagtgagatctggaaagtcacatagagcaggagggactcggggcagggtgacagtgagggctgtaaggtcacatagacctggggacagggtgacagtgagggctgtaaggtcacatagacctggggacagggtgataggtgagggctgtaaggccacgtagggcatgggggacccaggaacagggtgacagtgatggctgtaaggccacatagggcagggggatccagagacaggagcaccctgtggtatattgccgcccgcagactgctgtgcaccagctgtctcccaggtctgtgctcgccccaggatgggcaggatgagcagcgtggctgtttttctcttgcttccatggccagcacactgcagtcaggctgttttttgcttggacctggatgttttctctca

SEQ ID NO: 11950 - DNA, 677 bp, Artificial sequence
  DNA replication origin
attacacaaggcgccacagatgctgtattcactggcagcccttacagcacacatgggaagggtgttctgtgttctgagtggagtgtggaccaccagcacagcgggcggctgacctggggagagtagcgccaagagggttgagtcaggcatgccagagagagggcgcctggctggcgttggacgggtttctagccatcttgaggaagttgtcatggatacagcagcaatgagctctgtgaagtgctttcctccagggtcactggaagacatcccctcaacctgtgacttggtctagggctctgtggctttgggggtgggaatggaaagcgagggctcctaggtccctgggctgagggtttgaatggctctggctttgtgtctttgcagagctctcggagcagattcagagggccctgcagctggaggaggagaggaagcgggcacaggaggaggccgagcgcctagaggctgaccgtatggctgcactgcgggctaaggaggagctggagagacaggcggtggatcagataaagagccaggagcagctggtaggaatggcctgagtttcaagatgctgaattatagagaggctgcttctgaggatggaaaatgtgacacctgccttgtaataattgtcatgactggaagctgtaaactgatctgctggggggctgaag

SEQ ID NO: 11951 - DNA, 978 bp, Artificial sequence
  DNA replication origin
ccctcttctccgcctctctccgctgggtgcacctcgagtgtcccccagacccctccccgcccggccggcgctctctcccctgaccctcctggccgagtgttccccggggcccgcgccccctccccccgatcctccccactgagtgttccccctgccctctctctcccgggcctgcgccccccaccagccccttcatgctgggggtcccctgggtgcgcaccccctctcctcggacccacccccaactggggggcacctccagtgcccgccggctgccccttgggcgcgcgcccccgctctcgggcgcctcctcgccgggggcccggcccggccccgccccgcccgtgccccctccccatgcccgcagtgctgggcggggcgctgactcacccgggcccgggctggccggttcttaagcggcagcgcgctgcgggcgccgagtgtcgggcgcggcaggaggacgaggcagggcgggcgggcgctctaagggttctgctctgactccaggttgggacagcgtcttcgctgctgctggatagtcgtgttttcggggatcgaggatactcaccagaaaccgaaaatgccgaaaccagtaagttgcccagtttctgggccgggcggacgggagaggcttcattggagaggggaggcacctgctcgaggtgttggggcagttcctggggaacagggttcttctcacacgcagaagacgataggaataggaggaggttttcgccgctctttgttacttgttgacccttttgtggagcgttaggaaaacaccattttgatgcttttctctgcagtctttttctttgtgagccccctccccagtagttacggtcttttctaaaaactagaggcctttttacactgcttccgtctgtttttaaagggtatagtaatacaacttagaagtttcttaaaaagtccaaatcacagggagactcagatggcttccgaccacacacaccagtt

SEQ ID NO: 11952 - DNA, 1078 bp, Artificial sequence
  DNA replication origin
agaaccctgttccccaggaactgccccaacacctcgagcaggtgcctcccctctccaatgaagcctctcccgtccgcccggcccagaaactgggcaacttactggtttcggcattttcggtttctggtgagtatcctcgatccccgaaaacacgactatccagcagcagcgaagacgctgtcccaacctggagtcagagcagaacccttagagcgcccgcccgccctgcctcgtcctcctgccgcgcccgacactcggcgcccgcagcgcgctgccgcttaagaaccggccagcccgggcccgggtgagtcagcgccccgcccagcactgcgggcatggggagggggcacgggcggggcggggccgggccgggcccccggcgaggaggcgcccgagagcgggggcgcgcgcccaaggggcagccggcgggcactggaggtgccccccagttgggggtgggtccgaggagagggggtgcgcacccaggggacccccagcatgaaggggctggtggggggcgcaggcccgggagagagagggcagggggaacactcagtggggaggatcggggggagggggcgcgggccccggggaacactcggccaggagggtcaggggagagagcgccggccgggcggggaggggtctgggggacactcgaggtgcacccagcggagagaggcggagaagagggggcgcgggcccagggatacccggcggggaaaggcccggggagagggagcgcgcgcctgggagagagagggcgaggggcaggaggaacacctaggaggaaggagtcccgggacagccagcgcgagcccgcggggcacccgacagggaggggtcaggggagagggggcacagggcgggcgggggggcactcgctggggagggatccgtggagagggggcgcgggctcggggtccgccgaggaacttcccggggctgccaggaagcccgtgagaagccgagcactcggcaagtttcactttgtgtagcaaccgttgccccgcggctgcagtcacaaccgtcaagcctttgagaaactctttcaaaaactgcaaccgctcgggagccg

SEQ ID NO: 11953 - DNA, 988 bp, Artificial sequence
  DNA replication origin
gaacttggcggaagtgcgcgctactcccctcgcagatgcaagtggggaggctgtttgtcccacagcgggcagggggaagtcaggaaaacgtaaataaatctggaggggcggacggcttgggggaatcgctggaccgcttggggccgggaccgggggccagttccgaggcctcggccctggggcggctgcacctggccccgagtctcggtgcacgtggccggcccagccgccgcctttccgaagctctggttaagtggcacgtttgtggcctcttttgacgtgactggcaaaaagctccatgggatttctctgaaattctaggaattaagtttttttgtttgtttttttgctaatggttctcaacaaatttttaagacacacaaaacacatactttgggggccagtagaatttgctgcgggagagctcactctagaaggggttctcaacgtctggcttccagacgagcagcaacagcattcactgggaacttgcataagtggaaattaggtgttgctcagccttaggattcagaaactctagggctgagcccagcaatcagtgtgttacaagcccttcgggtgattgtgatgttggctaaaggttgagaccagagcttctcctgaattcctctcctgggtttactcctccctttctgcttttagttttcttgtttgtaaagcggcataattatggcacctgtatcagagggttctaatgaggataatgagttagtacatgtacgatgcctggaacagtacctgacacttagtaagcacttaaatctatcctggtagaaagagaaaccaatgactttgggcgaagttccaaactctgtttcccaatttgttgagtgaacatactagtagccccacctacatagacttgtaaggattaaatgagatcgtgcatgtggaatgcttaactcgtgctagcctcatagtaattgatgcttaacctgtcttcctagggacacactgctgtttgggc

SEQ ID NO: 11954 - DNA, 1579 bp, Artificial sequence
  DNA replication origin
tgggcgatgtttctcagggctgcttcgagtgggattaggggtggcgtgggaacctactatgggagagattcaactgaagaaagattttggggtaaggggtgatattgtggggttgttaaaaggagcatttgtcgtatagaattattggtgatggcctggatgtggttttgtatgaaatgagaagctaaacgaaagacacaaggtccaaataaaagaaggtgaaaaacaggtattaaaggactaagaattgggagtacccaggacatccaattacagagtgtccaagagggttcagtgtaattatttgcttggttggcgagtttttgggctgtatccttgagtttttttttatgttgtcatataccaggccagactgatttaggtaaaaacaacactcttcatttaaaaatatacagagtcctcctttttcagcagtgagtaaatagaggccttggaggttctgaggacaactacagctaaaagagtcaatctgtgcttggagaacagatgaagtttgtgatatatctgtaatgctagcagagaagtcattagagaggctgtggaatgttgtggcagtggttgagatgcctgctattccagttccaagtgcaatagtggaggcagaaagtcctagacccacaagcaaagggattagtgggatgactctttcttgtcgtgttgatgtcatgagggggacaggcagtagtttgttcccatctgcaaactggattttgggggtaaggaagactagagtgcatgtgcctgtccagttgggaggtaggcacatgtaggtggaagagccacataaaaagaagagaccttgtgtcaggcagaactggaaatgtaaagtgaaaaggtgagagggtgtactgaaagaggaatcctgcaccccaaatcctagagatccagcaagggcagcagccgttagaggttgtaatgggggttgatggtgcgactgcgtaaagggaggggttcggttctcatggtgtatgagaaagcgcatagtgtctacaagtaacctttcactgctattcatggggctgggtataagcaagcaagaggaggggctaggaggagattcagacgagcagggggagggtagcccaggatggagtgagatgcagggtatgtgtcttcctaaacaatagtgactgccaatgtgttttagtttgtcagtaatgggcttatcagtaatgtgaagttggaatgctcccatctgtttggttatgtgtgtggctgggttctggagataaagagtaaaggaacatttggacagaagaaggttgcctaaagggattccagcaggctgttgtcgggagaagcataaaggagtggcaacagggatggttgtttgtgtggtcaggggtccaaatatggggtgggggtggaattgacataaggagaaaggtgccgtaagtagatgcggagaagtgtggcagcttgttggtgtgaaatgtctggggagttctcaccaaatctgtctagaaagtaaagaatttcctcaggcaggtatagatgagggctattaaaggaggttctgaggtgcagggagatggaacaggtagccaagttggcctgt

SEQ ID NO: 11955 - DNA, 769 bp, Artificial sequence
  DNA replication origin
tgtgaaatgtctggggagttctcaccaaatctgtctagaaagtaaagaatttcctcaggcaggtatagatgagggctattaaaggaggttctgaggtgcagggagatggaacaggtagccaagttggcctgtagagcggggatggctgtgtaaaagcaggaagaggccgggcgcggtagctcacgcctggaatcccagcactttgggaggctgaggcgggtggatcatgaggtcaggagatcgagaccatcctggctaacacggtgaaaccccatctctactaaaaatacaaaaaattggccgggcgtggtagcaggcacctgcagtcccagctacttgggaggctgaggcaggagaatggcatgaacctgggaggcggagcttgcagtgagccaagattgctgccactgcactccagcctgggcgacagagcgagactccgcttcaaaaaaaaaaaaaaaaaagcaggaagaaagggaaatgcatagccaacaattctttgctagaggaggattggaggattgaaggcagtgagaagagagtgggtgagattgatagtgtgctggagatgctggaggtaactagggaggggtagagagtggcataagaatgggaatgagaataagagggagtataaaagcaaagaatagaacttcatcagggtggaagtattggagtgtgccctgccaccaaagatcatctacctgctccaagagggagtcaagagtggtggtttggggatagcaccaggagataacagctgtgatgg

SEQ ID NO: 11956 - DNA, 1124 bp, Artificial sequence
  DNA replication origin
tttccttaagttcgtcataattaccagctttgtaagctgcctttttaagcccttcaactaggcaggaaaccatgtaatcttgcccagctgtacctggggaatctgcctgatagttccactggggatcctctcggggaactgctctaatgccttccaggaggtctggctcatgaagccggcggttatcagcacgagactgggctagagaaaaactttcccgttcatctggggaggggtagaaattaggatgacacttcagtcactccaggttaacttgtaggacagagttagatatcggaattcctgtgcacatttagtggggtctgatgagaaagagcctaaacgctggctgatttgggaaaggtccgatagagaaaaaggcatatgtaccctgactatgccttcagctccagccacgtctctaagaggaaattgttgggcaggtgggggagagctggtcacagaacgaaaccgtaaactagaccgggtgtggggagggaggtaatagaagggttatagggtgggggagcagaggctgaagaagagttggaggctgattagcctggcggggagcgagctgaggaggagcagtctggggaggaggtgaggggtcagatggctcagtagaaaagaaagattcacaagactcagtgatgcttggggttgagacttaagggataggcgggagggaaagaaggaggatttgggactagtcgcactggaaacagacactagagagggaacgaagcgtgagaaatgcctggatgtaaggcacctcagatcatttgcccatttttcgacaaaaattaggtctcggatggagaaatcaaaagtgccattttctggccatttagaaccattatcgagtttgtattggggccaagcggtattgcagaagaaaataggacgcttagattttaggtcaggtgagagttgaagaggttttaagttcttgaaaacacaggctaagggagaagaaggaggaatggagggtggaaggttgcccatagtgaaggaggcaagtttaaagagaagtgtagaggccgggcgcggtggctcacacctgtagtcccagcactttgggaggctgaggcaggcggatcctgaggtcaggagattgagac

SEQ ID NO: 11957 - DNA, 765 bp, Artificial sequence
  DNA replication origin
ccttggcaattatgcatgatttgacctgcaataactactgggtcccacataatgagcggaaggtcgggcaccctactacacctcataattcacatgggtaatttgatgtagttgttaatggtctgccgtaaaaaagagtcatcatcctaacagctccaaagctatttctgtaactgatctttatcctagcagtcacagccgaacacgcccacatggatcctcagtgaaaggcaaagttagaagctggcaagctctccattagctgcaatcatgctggtctaagatgaatccttttattggaaatctggtgggcaaagccacagaagctctcttttctctgggaaataatatagcttctaggtaatgtgtgctttacagcccacacctcctggccatgctttgccctagggatggggtgacacagtgggagagagtgagggggaagggaagggggagagggaggaggaagaaagagggagggaaagcgggtgggggaggaggagtgggcatgagggggaagagagaaggaaggggaagcggaaggggagagggagaagagggaggggaagtgagaaggaaggggaagagagggagaaggaggaggaaggaaagggacaagagggaaggatgagagggagagagaagggcttcaaacaaccttcaacacacacagaatggccctctgcttctatttctttcttttaaccaataatttaattgaaaaagaattttaaggcccagtgtattggctcatgcctgtaatcc

SEQ ID NO: 11958 - DNA, 1000 bp, Artificial sequence
  DNA replication origin
aggagggtgcgcggggagctgaggagcgccgggggcccgggcgcggcgcgtacctgaggccgccgccgaggaggcgacggggagcagcgcggccaagagcagcagcgccgcccaggacagccggcgcggcgcgcgcagggtcgccccggcctcgggggccatcgagagcccggggtgggccggggctgggtgcttgcggctggcaggggggcgctggccggagtctggggagtgccgaggcgccgccgtcgggtccccgccgccgtccgtctgttctgcgcgctctgcgcggtgcccgccgcgcccctgccccgcggcgatcgctcccggccgcacaccggcagccgcgctccgccactgaggccgccgacctcccgccgagccttttagctgcgctcgggcgccccctgccggtgtgcggggccggggccagggccggcgggggcgacccgggcgacaggggcgacgggggcggcggggcccgggctggaggcgggcggggcgcgggacgaaggggccggagcgccccggactgacttagcggttctgaacttggggcggtcgctgtgccgggccaagtggctgaggaagttcctcccctcgtctaaccctctcattttctggctggggaagtcgcccatcgcgccgaggagtgccctttgtccccttacagaaacacctctgcgccccaagtggggactcgggccgggacccctcacccggtccgcagcgctgtagttcctgtggctagcccagtccttccacgtccctacccgcacccggcgcgcccacgtcaggggttttcagcgtccttagaccctgctccgtctggctgtcatttctagggcgcgcacgatgcgggtcgaaaaggaacccagttttcagtgtgccttgttgcccaggccaaggactcagcggacctcgcctctcccttttctgtaattgtaacactgccccaggtctccctattcctccttctccctattcctccttccagcct

SEQ ID NO: 11959 - DNA, 1261 bp, Artificial sequence
  DNA replication origin
cggcggcctcagtggcggagcgcggctgccggtgtgcggccgggagcgatcgccgcggggcaggggcgcggcgggcaccgcgcagagcgcgcagaacagacggacggcggcggggacccgacggcggcgcctcggcactccccagactccggccagcgcccccctgccagccgcaagcacccagccccggcccaccccgggctctcgatggcccccgaggccggggcgaccctgcgcgcgccgcgccggctgtcctgggcggcgctgctgctcttggccgcgctgctccccgtcgcctcctcggcggcggcctcaggtacgcgccgcgcccgggcccccggcgctcctcagctccccgcgcaccctcctgcgctcgggccccgtcgtcccgctcagtgctggctacgggtcgtgtcactagcctgtgcgtcctcgtcactcgcgggtcggggcacttggcgccctgtgtgggtggcgggagcggggacgcctcggtgcccggggaccgcagcgcgctggcgtttaactttgccgtcgcccgccttggagtcgggaggctccagccgtctaagtgtcccgggagattcaggcacagcggggaaaaaaggaaaagaaaggcgactttcagcgtgcggactggggtaatgcctttctttgcccagaatttctcgggagcgtaggtggtcatcctactttctccgcgttcacctctcgcgaggcaggatgacgggcgcactcgggagaccggagggaggcagagcagggctgttctagaaggtcgtgggggaaaggctgcgagctgccgcagggcgtcgggtgcctctgcgctccagaggagaagcgctccagtgccagctcggctccaggcggcaggaggcccgcgcgcccggggggaacgttcaagctgggagaaaatgtttgtcttgagaggagggagagggaaatgagaaagctgattccagagaaactcgcccttccccaatggctgaggctgcagccaggatggatgcttcctttgagagcaatgcttttcagaaaatgctagcgcgctcctgtcagatttcttgcaagcttcctgcagagagagacaagtttgtggcgaggttttcattcctaagcctttggcggcccttgttaccacctcctttgcaggcatttttacacttgaaactggcttttaggttattggtttgtagaaatccaagaagcagacaatgatcgtcagatactattccaacgagggtaccagttttatgatgct

SEQ ID NO: 11960 - DNA, 1190 bp, Artificial sequence
  DNA replication origin
gaatgaccctccgtgtccgcgtctgtgctctgttgaacatcctgagccttggaggccagggaggagtacttgccctgaggatgtgtatctgcccctgtggatttggggttctctgggatgggttccttccgatgcaggctggcccctctctgcgggcttctccttaagtcctcccagccccgggagatgggctgcctggaggaggaaggcacgtggtcattgacaacggtggcaggaagcggcttctcatcctcctcgtctccatggatacctgagctaagcttagggtgggaatcagagtgagagggaaccctggggtgggctcgggagggcacagtcgactgtggggagctggagggctgcagccgaggtccccgcccaatgctgaacctgcttggagacctcccgttggcagcaaagggtttgtgtctgagcaaatggaagtgtccagaggcaggccgggcccgcagcgtctgggccgtggcctccgcctgccttccgccgtcttccctatcgccgtcaccgtggctttcaccatcagaagcctccgctccctcagagacctgcgtcctggacgagagatgagaagagacggaggaggacatggtggaccgtgatggcgcattggagttggtggctggggcgtcctcaccatccttcccgcccttggaaagtggagagctcaggtgtggctgggtgggcagcagccgagatgatcccccatggggtggagaaagtcttgagggtggggctgaggcactggaatcttcctctgcggcccctgaatggggggtcctccgggccggcgaggctggctttgcgccggggtgcacagagcttctgtcgcggagaacgctggacggggactggcggctgggggacagggctggccggggctgggcgaaggcgcccttggggtggagggagcccacagcgcgctcatcttcgtctgagtccaccaagtcgttgtcattcaagctggcaggcagggaaggacgatgagaggtgccctgggtggacgcgtggtgggcaggagaggccgaagccgaggggggcgcccctgggcggggctgcgtggccagggaaaagccaggcttatctacgccttcccttcggggcagcgctggcatccgggccctcactgcagtcctgccgggagcaaccaccgagtggccgtgtctacttggcgg

SEQ ID NO: 11961 - DNA, 892 bp, Artificial sequence
  DNA replication origin
cgtcctcctcctcgtcgtcctcggctgagaccgactgctgggacttggaggacaggggccgcttggaaggaggctccgacttccccggcgctgccctgctgggtacccgggcgcgggactgggggccgccgggtcggctgggcctggcgggggaggccgcatgtccgcgctgggacctgtggtcgccacctgcccctgcgcctgtgggagactccacctgctggtgcttgggaagggacgcagctgcctccttggcgcgcgcggcgtgcgcgggggcccgcacatcctgggcctcgacttctgtgctgtcgtcgtcgtagctgccctgggcatcctcgtcctggttctggagggccgtggggagcatccctctggagctcgccgtgtaagggtccgaggaggagtgggagcggccctgcgacgtggggcggggccgcccggcctgggtcagtgagagcctgggctgggaaggtgaccgacccgcgtctctgctctggggtcccgggtggtgctgggacgtggcgacgggaggagggggctgctgttgtggggcccggccgggtgtcatccttctgggaacactgggatgctgctgtgaccgtgctgcgggcggacgagcaggggacgcgtggcggtctgtggaccctggctgtgctttgggagaatgaccctccgtgtccgcgtctgtgctctgttgaacatcctgagccttggaggccagggaggagtacttgccctgaggatgtgtatctgcccctgtggatttggggttctctgggatgggttccttccgatgcaggctggcccctctctgcgggcttctccttaagtcctcccagccccgggagatgggctgcctggaggaggaaggcacgtggtcattgacaacggt

SEQ ID NO: 11962 - DNA, 1164 bp, Artificial sequence
  DNA replication origin
acaggtcccagcgcggacatgcggcctcccccgccaggcccagccgacccggcggcccccagtcccgcgcccgggtacccagcagggcagcgccggggaagtcggagcctccttccaagcggcccctgtcctccaagtcccagcagtcggtctcagccgaggacgacgaggaggaggacgcgggattttttaaaggcgggaaagaagaccttctgtcttcctctgtgccaaagtggccctcttcctccactcccaggggcggcaaagacgccgatgggagcctcgccaaggaagagagggagcctgccatcgcgcttgcccctcgcggagggagcctggctcctgtgaagcgacctctccccccacctccaggcagctcccccagggcctcccacgtcccttcccgactgccgcctcgcagcgctgccaccgtgagccccgtcgcgggcacccacccctggccgcagtacaccacgcgcgccccacctggccacttctccaccaccccgatgctgtccttgcgccagaggatgatgcatgccagattccgtaaccctctctcccgacagcctgccagaccctcttacagacaaggtagtttattttttcaaacagtctttctttaaggtgttcagtggtgttcatggcaatgcctaagaagtttttattctattgcatttagcacctactatgtccacgcaccgtgttaagagctttgcacatgtgacataatttcatcctctgaacggtccctagggtttgcattgttatccctgttttccagatgcagaagctgcggctcaggatctgaggggcttgccctaaggcagacacctcagagttgccattccaattccaaatggcctaatttcacagccattactaacccacattgcctctaattccacagtcttttcactgtcctacattgcctctttgaattctttggcatacactcttaacctgtgaaaatgtgtcacaaccatgatgcccaactcaggttcttcttagttgttcaagtgccgccatgtgtttaagggatccatagaagctggttagatacatatgtaggcttatcttgttcttgtctttatcttgttctcatcttctgcatgcaaaactctcaaccaaacaaaccctgagacaaactcagatatcttgggt

SEQ ID NO: 11963 - DNA, 997 bp, Artificial sequence
  DNA replication origin
atctctctttctttttcccacatttcccccttttctattcaacaaaaccgccatcgtcatcatggcccgttctcaaagagctgttgggtacacctcccagacggcagacagggtggtggccgggcagaggggctcctcacttcccagacggggtggccgggcggaggtgccccccacctcccggacggggcggctgccgggcaggggctgccccccacctccctcccggacggggcggctggctgggtgggggctgccccccacctccctcccggatggggcggctggctgggcgggggctggcccccacctccctcccggacggggcggctggccgggcgggggctgccccccacctcctggacggggcggctgccaggcggagatgctcctcacttcccagagggggcggctgccgggcggaggggctcctcacttctcagacggggcggccgggcagagacgctcctcacctcccagacggggtggcggtcgggcagagacactcctcagatcccagacggggtcgtggccgggcagaggcgctcctcacatcccagatggggcagcggggcagaggtgctccccacgtctcagacgatgggctgcagggcagaggcgctcctcatttcccagactgggcagccaggcagaggggctcctcacatcccagaggacgggcggccaggcagggacgctgctcacttcccagacggggtggcggctgggcagaggctgcaatctcggcactttgggaggccaaggcaggcggctggaggtggaggttgtagcgagcctagatcatgccactgcattccagcctgggcaacattgagcactgagtgagcgagactccgtctgcaatcccagcacctcgggaggcccaggtgggcagatcactcgcggtcaggagctggagaccaccccggccaacacggcgaaaccccgtctccaccaaaaagtacaaaaaccagtcaggcctggtggcatgcacctg

SEQ ID NO: 11964 - DNA, 1471 bp, Artificial sequence
  DNA replication origin
gtaatgctttcaacattcccatgtacaaataactatcttcttggcttttgggacagtattagggtggggtttctatggttttttttttttttttttttttttttaagcaataactcggaagtctccaggatcatcagggccaagggacaaagttaactagagaaaacagcttttcctgacttcagcattttatcagtttggcaacaggaaatgaggatggaaactactttttttctgggagtggcatcccttgaccgacatagctaaattaggcaaccatatttcaaatagtgtcctttatttttagaaagcttcaaataaaggaactgctagtacaaaaataacattaaaatggcgtagttcagcacttctcaaggttcaacattcacaagaatcacccaagcagcttgaaaagatgtggctggagcctaagattctgcatttccacccagctcctgggtcatggtagtgctcttgggcagtggtgacgctcccaggtggtggtggtgaagctccccgggtggtggtgctccccgggtggtgatggtgctccccgggtggtggtggtgctccccgggtggtggtgatgctgctcatgggtggtggtgacactccccggtagtggtggtgctcctgggcggtggtgactctccctggtggtggtgacgctccctggtggtggtagtgctcccaggtggtggtgttcctgagtggtggtgatgctcctgggcggtggtggtggtggtgctcccgggtggtggtggtggtgcttctgggcggtggtggtggtggtgctcccgggtggtggtggtggtgcttctgggcagtggtgacactccctggtgatggtgctcccgggtggtggtggtgctcccaggtggtggtgatgctcccaggtggtggtcgtgctctttggtgatggtgatcctccggggaggtggtgatgctccctggtagtggtggtgctcctcggtggtggtggtactcctgggtggtggtgttcctgggtggtggtgatgctcccaggcagtgctggtgctgctgctggagaagaaccacacttttgtagatttcctaggcagacatgaagtgcaggctgggatgttgccttatccctttacaaagagtgccacagaggaccacaggccctagtgcagctaattctgtgcatcagaatcaccccatgtggctttctaaatacacagggacacacctcagctccagttgacaaggtgttgaccagtgggctcaggcgtccctttctgagaagctctcaagtgattcagaggcacagctgtccagtgacaagttgagaactcctcccctggctccttctcggcccccttggctgtccagcctcagtggttgggggaggtttctgcgcctcttggctgtcgctgcaccccttgcctttactcaggagatgcacttgcttggatcctattttcagccttaggtatctttgttctag

SEQ ID NO: 11965 - DNA, 1428 bp, Artificial sequence
  DNA replication origin
tgccgaggccgaggctagcctgcagcctcctttctcccgtgccctgggcgcggggtgtacggcaagcgcgggcgggcgggacaggcacgcagggcacccccggggttgggcgcggcgggcgcggggcggggcccgcggggggggggggcggggcggcggtgcccttgcggcgcagctggggtcgcggccctgctccccgcgctttcttaaggcccgcgggcggcgcaggagcggcactcgtggctgtggtggcttcggcagcggcttcagcagatcggcggcatcagcggtagcaccagcactagcagcatgttgagccgggcagtgtgcgggtgagaagaaaggggacccggtcacggccccaagggcgaaggggctcgcggcgggcagggcctccgcggcaatggcgacagtggccgcaccgggcctggcgggaccggggcacctgcaggcggttctcccgggagtgcccggcgcggcggctggagcggggatccgcagggaggggacgcggggactcgggggacgccgcgcgctgccgttcctcggcagcccagcctgcgtagacggtcccgcggcgctgactgaccgggctgtgctttctcgtcttcagcaccagcaggcagctggctccggttttggggtatctgggctccaggcagaagcacagcctccccgacctgccctacgactacggcgccctggaacctcacatcaacgcgcagatcatgcagctgcaccacagcaagcaccacgcggcctacgtgaacaacctgaacgtcaccgaggagaagtaccaggaggcgttggccaagggtaggttccaggctgagcggcgggaggcagtccccggcagaggcgaccccagggagccaggccccatacggacgggcctctccgtggaggagaactcgcttcgtatttgtaccggttccgagttttccaggcacgatagtctctcttttaaacacatggtctacctcattgtagaaggagtgcctcgatgggtttgaacacacttctgtcatctcagggaacttggggtcctgcgaaggagcttgccttactgttgtgagccacattccgttacacatattgccagcactggtgaattgtagggcctgaaaagaaagctctactgtgtcactcgttttttttgcaaattgaaattgttcttgttgtataatgtgctttggggaaatgtttggtctctcaggtaggtgtgccagccgtttgcaggagggctgagagcgcctgtccactggtggccagacatcatcgggtccgcaggtgtctctgagtgtcagggtcacctcctgatagaagtgggagtggtgtcttactgccaggtcacactgaaggtgggagacaggaggacactactccgtgctaggaaccatggtccttgtcatcttcctgagagcaaac

SEQ ID NO: 11966 - DNA, 1446 bp, Artificial sequence
  DNA replication origin
agcagctgagtggtggttatggaggtggttatggaggtctgagcagctgagtggtggttatggaggtggttatggaggtctgagcagccgagtggtggttatggaggtggttatggaggtctgagcagtgtgagtggtggttatggaggtggttatggaggtctgagcagtgtgagtggtggttatggaggtggttatggtgatcagagcaatgtgagtggtggttgtggaggtggttatggtgatcagagcaatgtgagtggtggttatggagatcagagcagtgtgactggtggttatggaggtggttatggtggtcagagcagctgagtggtggttatggaggtggttatggtgatcagagcaatgtgagtggtggttatggaggtggttatggtgatcagagcaatgtgagtggtggttgtggaggtggttatggtgatcagagcagtgtgagtggtggttatggaggtggttatggtgatcagagcaatgtgagtggtggtattggaggtggttatggtggtcagagcagctgagtggtggttatggaggtggttatggtggtcagagcagtgtgagtggtggttgtggaggtggttatggtgatcagagcaatgtgagtggtggttatggaggtggttatggtgatcagagcaatgtgagtggtggttgtggaggtggttatggtgatcagagcaatgtgagtggtggttatggaggtggttatggtgatcagagcaatgtgagtggtggttgtggaggcggttatggtgatcagagctgttgagtggtggttatggaggtggttatggaggtcagagcagtgtgagtggtggttatggaggtggttatggaggtcagagcagtgtgagtggtggttatggaggtggttatggtgatcagagcaatgtgagtggtggttgtggaggtggttatggtgatcagagcaatgtgagtggtggttgtggaggtggttatggtgatcagagcaatgtgagtggtggttatggaggtggttatggtgatcagagcaatgtgagtggtggttatggaggtggttatggtgatcagagcaatgtgagtggtggttgtggaggcggttatggtgatcagagctgttgagtggtggttatggaggtggttatggaggtcagagcagtgtgagtggtggttatggaggtggttatggaggtcagagcagtgtgagtggtggttatggaggtggttatggtgatcagagcaatgtaagtggtggttgtcgaggcggttatggaggtcagagcagctgagtggtggttatgaggtggttatggtgatcagagcaatgtgagtggtggttgtggaggcggttatggaggtcagagcagctgagtggtggttatggaggtcagagcagtatgagtggtggttatggtggtcagagcagtgtgactggtggttatg

SEQ ID NO: 11967 - DNA, 1187 bp, Artificial sequence
  DNA replication origin
ggccaccgcgcagccggacagctctgccgccggccccgccgcgctcctagtcccgccgcaacccctgcgctcccctttatttgtgggtctcgctgccacaaaatggcgctgagggaggaaaccaggccccgccgcccggccccgccccgccgcacggctccgctccgccctgccccgccccacagccggtccgaacgcgccgcaggccagcgccactgcctcccgcctcccgcctcccgcctcccgccagcctccccgctccgccatgttcgccttctggcccactcacaggagagtcgcctttcaggcgtggccgcagtcactcgcccgccgccgaaccccgccaggagaggaaaggtgaagggagggaggccgtcggcctagcccgatcggggcctcgaggcacaatggagcagctgctccccggtaacactccccgtcctttcccaggagcctggcgcgagctccgcgggccccggagctcagcaagctcagtaagggaagcggccgaggggaggggcgggccagcgaggtcggaggtcagccccagggcatcacgggaagggaaggtggaagtactcgccggggccacctgcggctgcggggctgcctcgtgcggagggatctgggcgaaggcggcgcgtgattggccgctctgtgttcgtgacgctcatccgtgatgcttccgcgtgtcggaggaccaggtgccacctcaagagagaggccgtgggcggcgagccgcgggcgtttactcttagcagaagctcacctgtaagttttgagaacttagaaaccgatgccttccctctcatcagtcgtgaggcgcagtctcctggccgctgggttcgttcctccttgacatctctggagacgcatcgaggagctattgttctctggcgtcggaggttgcgctgtgtccgcggcgttgagggccccttgctaactggaacacggggaaggcggccctgtgaggtttagtgaactcaatcaaagaggtcctgcaagtggagtagactccctgaagtaagactgccatctggaccgccgagtaatggcggtgttacctggagaacgtgaaacagtctctaaacacttactagaagagcacgtaattcttttgattggtctgtccttagccggctttatcaaacctgttcatccccaaaggagtgtcttgtagtaaggtg

SEQ ID NO: 11968 - DNA, 1276 bp, Artificial sequence
  DNA replication origin
ctcctcgcggcttggcctgaccggcttcctccacatacgcccctctcctacacaagtccggccctcggcgctcctgccgaagcagcaggcgcctcggactctgcgcggctcccgccggccactcacctatgatggtccgcgccgccgagacgatgaccacaggatctgagcctgcattcatcttgcttctcctgccgccgtctgccctgcgctgcctgcaagctaggcaaagctcctcctcgcagcccacaggcctgccgcgggcgggacctgaggtagccccgcccctcgccctccacctccccgcgcaccacctccccgcgcatcccactgtgcgcaggcgcaaggccggagcaggggcgggcggaggcgcgcggggcgcggggcgcggggcgcggggcggaagtgaggccggggcgcggggcgcggggcggaagtgaggccggggtctgggcttgcgggcagaaccgcggacctcggacgcatttacagagcgcctgaaaccccagtgtttctggacaccccaatgttggagttccccgacttgacgtcttgggcttttttttaaaaaatcttagggtttctcgaaacagtaaagactggggggtgacaaagacttatctctcgttcagctcaggactggaatcccacgggcgagaatctcgagtgcgagcccggcccgcggcgggtctcagcacagctctgatgggtccttttgctctcggcggcttcgggaggtcctatgcgtttctcctggcgccagtcattcgctcgcgtgaggggcttgctaggagcgtctcggtgcgagccccctgccttctaagatcaactctggctgtgaacgggtgaggacgccgggagcgtcttagcgtcacaaaagttcctttggttgacgtttggacagtgaaaggagcatgtaacaagtggggtcagttttgtttaaaaccctttctgacttcccagcctcttactgggcaaagttcataatttttctgagctttctagggtttccaggcaagcttatgaggggccaccgttacagcaacttgttgggaacacctggatagtggaacaagaaagctttgtcacaaagtcatgaaggggaaaactgttgacggacctggagaatcttcctgaagaactttaaagttgattgaaagaatcattaaatcctggaaacctacattaagactttgcagagatatgcggatgggtcagataaatcagagaaggtaaagagtgtaggccccagaggtggggcaatagagaaggaaaa

SEQ ID NO: 11969 - DNA, 1263 bp, Artificial sequence
  DNA replication origin
ggggcggggctacctcaggtcccgcccgcggcaggcctgtgggctgcgaggaggagctttgcctagcttgcaggcagcgcagggcagacggcggcaggagaagcaagatgaatgcaggctcagatcctgtggtcatcgtctcggcggcgcggaccatcataggtgagtggccggcgggagccgcgcagagtccgaggcgcctgctgcttcggcaggagcgccgagggccggacttgtgtaggagaggggcgtatgtggaggaagccggtcaggccaagccgcgaggagccgcgggatccctggaaccctgcggctcccgcgttccctgacctggtgctacagccccaccctctcctctcccgatgtgcgcactccgtccctcgtgcttggattggctcccggggtagagccatcgcgtggcctgcctctcccattggttggcgtagggaggtgttctcctccggggcccctgattggccggctccgggaggcgccatcggtaatgcctgcggcaggggcggaactgctaggtggtctgagcccggctttgggctggggtcgggctgtcacacaatggctagaagtcgtgacttcgtctccttcgtgccgcatggttttcaacgcccttgacccgccggttccttttgtttgggaagcatggggtcgcatccagtccttcggatttggggaaatagaagggctacagcggcgtccctaggccgttctggaggtcgcctgtccagccctcggctgctgcgagttgtggcacccaccttgacctttgctcagaccagcaggtgtaggaacgtgtgggaggagagggcactgcctcctcgcgtggccttgccaaacagggtcatgaggctcccctgctcgtaggtggttcccgtattacccgcaggcttgtgatgtccacgctctccgcctttctattgtaggttccttcaatggtgccttagctgctgttcctgtccaggacctgggctccactgtcatcaaagaagtcttgaagagggccactgtggctccggaagatgtgtctgaggtcatctttggacatgtcttggcagcaggtaagtctcagtgattccaggagaagtcaggcttattagaaacagcccataaacacacacacacacacacactctcacacactcacacactctctcactcactcaagttcttgcctccttgcttttgctcagagttccctctgttatgattcctcctgttggcccccttcttccagccctgtcagtagct

SEQ ID NO: 11970 - DNA, 637 bp, Artificial sequence
  DNA replication origin
ggccagcaaggcaggaacggcccggcaaggagaacagtcaggtgctgaaggcaggggtctttggcgaccaggtccaaacgggctttgtgggctggtgcttttacccccagtgagataataaaccacaggaggttctgagaggaggaatgtggttaacttgggggactgaggcgtgaacagcctcggtatggcccctgtgttcaggtgacactctaggggccatggcaggaaggaggaggtcaggtgggaggtgaaggcactggcctagacacagggaggatgttagcataaatcaggttgtggcagaggtagtactatctggtgggaggtcttcgatttgattcactgacggaagagatacgtgttgtggtagaaagagagaatacgtgtttagccatttgctgaatggacaggtgcaggtgaagcgggttagcagggcctgtggagttcgagaagcctgtgaggcagccaggccatgtccaggggagtgtcaggagccggaggaaagttgtagcttgggtatataaatgtgggtgttgtatgcaaacaggtggaatttgaggccgtgaggcaagacgagggtatctgtgaggcaagatgagagtatctgtgaaatacgggccattaaaaaggagaa

SEQ ID NO: 11971 - DNA, 948 bp, Artificial sequence
  DNA replication origin
ggggcagcgacgagcagcagcagctgcagcaggagcagagagcgctgcgggcggcgggcgggcgcgggccccaggtgggggctccggccggcggcggcccccatcgcgccgggcccggactgcgcggcgggcgcgaggctaacggcgcgcgactgctgggggccgcgcccgggacggggtcgcgccgccagggcaaaggcggaggtggagacggagcgggagcccgaggtgagcgcggctcgactgggctcggcgacagcgacagcggcagcggcggccccggaaccgcgtcacgtgacagccgcccggcaccgcccccccacccccgccccccgctcacgtgactcccttgttcaggtgacccccgcccgccccggctcctcccaggcccgggtcacgtgagcgcagcgcgcgggacaggaagcggcgcgggcggggcgcaggctccaggtgcctcccggggcctgagcctctcggcgggctgggcgcggcgggggtgcctagccgggcctcagtttcccctcccaccgcgccctgctggatcgtggcgggtgcttcccaggttagagcaactgttcccaacctcgatcgaccagtaggggaaaatagggaacttggatcaaagtgccagggaggtaaatgccttcgcacagcctagtggcagcggatccgtggggggtgggaacacactttaactgcccgtggagtcaaatcatgggggtttacaaccttggcccgtcagagcctctcagaccttctgtgggaatgttatttcccaagcgtgggcttcctacagcaaggaaggcagcacaaatccagcaaggtgaaagagtggacaaaagtgtcgctgtcaagcaagtgccactcaacaaagctttattaattcactacgtggatggccatgagctagccacaatgaaagtagaacgatgaatctaaaagtcttga

SEQ ID NO: 11972 - DNA, 1501 bp, Artificial sequence
  DNA replication origin
gtgtgtgtgtgaggatattaaatagggtaagtgtcactgagaatgtgacacgtaagtaaagaccttgagttgagggagtgagctgtgtgtctctctgggggaacagccagttcaggggacaagaagggtagccaaggagtgtgttggtggtagcaagaaaataaaaatcttttaaaaagagtatccatataaatagagaagctggaggttaaaaaattggatgagtatttttttttttaatttggcaaaatagcgtgaatagtatatgttgaaggaaacgctaagtgggtggtgcaggggagagaggaagacttgcttgagcacatcgggaagtaggacaggaagggttctctgtttgccttgtaggttctaattgccatggcaataatataattgctgtggccgctgcggtaggcaggagggctgcctgtgaagtcaggatcaccaggctttgtggcttcaaggaggccaaatcaccatgggcttgcttgggcttggaggtgcgacctggtgggcctgcagaatgcgacttggtggcctgactgagcagcacgtgagggcctggtgcagcctggcatggtggtacccttgagagcgtggcctagagggctccgaggtgcagcctggccagtgtggtctggaggggtctggcaagcgctatctggagcactcagaggtgtggcctgtttttccgggtgggtctagtgagtgtagcttggagtgctgggtggtgtggcctggctggcaccgaggtccctgcggattctggagaacctcaaggtgcggccccgggggtgtggccaagtgtggtgtgtggagggcccttgtgtgcagcctggtggttcctgtgagcatggtttggagggcctggtgaatgtgtcctggtaggcctggtgagtgtgtgagcatggcctagagtgtcaccaaaccaaagtggacccgcctgcctgtgcaccagggaaagccaaacaccaaagcgcagggtttttgctggagagagtggactgcactgcgacgagacaggaggaaaggtcaaacctgtctccccaagctggcggctgggtcgggttttataagcataagcttattaccataaggtaatgaggtgtgttctgattggatcttgcaattagatgacaccagggctctatctgattggatcctggatcttgccatgtggtgtgcgcttcttatttcagtcccgctcctcagtccagcgcttaggttcctcccgtgttgcaagcttggttcatctgtgcaggctccggtgacatgatgtcgaactgggagccatggcagctgaaaaacaacgaacagctttgtacataaaagatgatacagcttggtctaatgtggttctaaggaggctctgccggcgagtcttaggggttccggcgggcagccgcgtgaacctggagcttggggtctgcagtgctgggaggccgaggcctggcatgttggggacaggtcttgggagctgactgggggcctggcgtggtgg

SEQ ID NO: 11973 - DNA, 1312 bp, Artificial sequence
  DNA replication origin
gtaaaacagatagtggttactgccaagatcctagatttttgttggaaacagtgctcgctacattatacaaaacaactaattttttaaaaggaaaaaggttagtctatggattaacacatggctcactgtacgtgccatgagctcgggatgatagctgatccaatcccatatacacctgaagtcttggggcaggggcggaccacgagtcagcgcgcccccacagcaccaggctgatggccccgtggttcttctgcctgcaagcaaaagtcagccacgatcatccttctccatctgcaacacccagggtcttttctaaaacttttgcccagtcggctcagccaaaaggacacagaagccctgcagaggctctgaaaccaaggtcagtgcctcgtggacagctcccgcgcctggacagctcccgcgcctggacagctccgcgcctggacagctcccactgtcccgcccgcagtgggcgtgtctgggaggcactgagcaggggcgggggtgggctcagcggtgctgaggtacccgcctagggagatgcgcagctggaggcgcatgagggctggagacgcggaaggcgcatggggcgcagcaggctcacggggtatgcagggtacagggaggcgcgaaggggggaggcgcgaggggggaggcgcgtggggcgcagcaggcgcacagggcatgcagggtacagggaggcgcgaggggggaggcgcgtggggcacagcaggcacacggggcatgcagggtacagggaggcgtgaggggtgaggcgcatggggcacggaggatgccgggtggtacaggggataggcagagaggcacaggggtggggaggtatggggcgcggaggggcatgaggaggcgaggggcgcggcgaggcggcgggcagaaggcaccgggagccccatgaggcgcaaaaggtgcggggaggcacggcggccgaggaggcgctgaggaccggggaggcgcaagaggcccaggatgcgcggggtcctggggaagcgcgagaggcctaggagtcgtgggggacatggggaggtgcaggggacccagggaggctcgaggggccaaggaggcgcggaaggctgcagttggggaggggagagaatggggcgggtgggggatggggggcggccgctgcaggaaaagggatgcggtgtttcctggcaagttcagaagccaagcccccaacctcgtaacctgttcacacatagggtgacccctctgtgtcaagagcccctacgggtccctcataatgtgcgggtcacgtcctgaaaaggaggcagaaaaaggccctggaagcggg

SEQ ID NO: 11974 - DNA, 1119 bp, Artificial sequence
  DNA replication origin
ccttcagcccaccactgcactgtgggagcccctttctgggctggccaaggccagagccagctccctcagcttgcagggaggtgtggagggagaggcgcgagcgggaactggggctgcgcgcggcacttgcgggccagctggaattccgggtgggcgtgggcttggcagaccccgcactcagagcagccggccggccctgccggcccgggcaatgaggggcttagcacccgggccagcagctgcggagggtgtaccgggtcccccagcagtgccagcccaccggcgctgcgctcgatttctcgccgggccttagctgccttcccgccgggaagggctcaggacctgcagccggccatgcctgaggctcccaccccctccctgggctcctgtgcggcctgagcctcccggatgagcaccaccccctgctccacggagcccagtcccatcgaccacccaagggctgaggagtgcgggcgcatggcagctccacctgcagccccggtgtgggatccactgggtgaagccagctgggctcctgagtctggtggggaaatggagaacctttatgttgctcagggattgtaaatacaccaatcggcactctgtctctagctcaaggtttgtaaacacaccagtcagcaccctgtgtctagctcagggtttgtgaatgcaccaatggacactctgtatctagttactctggtggggccttggagaacctttgtgtccacactctgtatctagctaatctggtggggacgtggagaacctttgtgtctagctctgggattgtaaacgcaccaatcagcgccctgtcaaaacagaccactcagctctaccaatcagcaggatgtgggtggggccagataagagaataaaagcaggctgccctagtcagcagtggtaacccgctcgggtccccttccacactgtggaagctttgttatttcgctctttgcaataaatcttgctactgctcactctttgggtccacactgcttttaagagctgtaacactcaccgcgaaggtctgcagcttcactcctgagccagcgagaccacgaatccaccagaaggaagaaactccgaacacatcccaacatcagaaggaacaaactc

SEQ ID NO: 11975 - DNA, 1270 bp, Artificial sequence
  DNA replication origin
gggggtggtgctcatccgggaggctcaggccgcacaggagcccagggagggggtgggagcctcaggcatggccggctgcaggtcctgagcccttcccggcgggaaggcagctaaggcccggcgagaaatcgagcgcagcgccggtgggctggcactgctgggggacccggtacaccctccgcagctgctggcccgggtgctaagcccctcattgcccgggccggcagggccggccggctgctctgagtgcggggtctgccaagcccacgcccacccggaattccagctggcccgcaagtgccgcgcgcagccccagttcccgctcgcgcctctccctccacacctccctgcaagctgagggagctggctctggccttggccagcccagaaaggggctcccacagtgcagtggtgggctgaagggctcctcaagtgccaccaaagtgggagcccgggcagaggaggtgccgagagcgagcgagggctgtgaggactgccagcacgctgtcacctctcaatggtacctgggctaaaatagacattcaggaccatgtttttgaacagttaggaaaatgagtggattttctgcatcaaattttcagtagttcccaggaacagttagcataatgggccacaagggcatgcagggtggtgagtggatgtggtgggggccgcctggatgacaggcctggcctggggctcctcatggccggaagtcagcctccctgtgttagctctgcccgcaggtcctgggcctcatctctggatttgtttgggagggctgccataataaagtaccacagactaggggcttcaacaacagaaatgtatgtcttccagttctggaggctgggagtccaacatcaaggtgttggcagggttgattccttctgagactgtgagggagaatctgttccaggttcctaggagcacagcgttccccttctgacaggcacaaagcaggaaacagccaaccctgggggcctgttgaggaggacagaagcctaggacacactgcggggccctgagcacagccccatggggaggggagtggcaggagcaggagtttccaccccaggcagctgccccctctgcacctgggaccatcgggtgggcagcaggcccagtgcccagtgactgacttgctcattcatggctgattttctcacacatatgtgcttccccagacctccatcatggcccttggggccaggactggtctgccctgtgtgctgacagccacttcactggcaggtacctggattcatgt

SEQ ID NO: 11976 - DNA, 1924 bp, Artificial sequence
  DNA replication origin
tgtcttatgaaaatgtagtaggagaaaactctgtgaaacagcccagggataccgagtttgatgaactgcatttgctttgctgaagagaggatggaagggtgtagtcctgactcacacatggttctgtgcttttcgtcctcctcttgccgtggtatgactggcagttcaacctggtgtgtgctgactcctggaagctggacctctttcagtcctgtttgaatgcgggcttcttgtttggctctctcggtgttggctactttgcagacaggtatgtaaaggccagtccaggtaagcctcctctgaatgtcatgagaacagattctaagggcgaatctgttctcagtggtggagaacatgaccagttggaattaactgcagaagctgctggagacaagacacagtggcccctgctttgggatactgtggggctaccaggggagtggtggagagatttgaggtgtgtttcagagtccaagctgcatgcagattgtacagttagtgggctgagagaaagcggggacacagccaagattgatgcttccagcaggtgcctggtcgtgaggccattttgagatgggatgcagagggttaggaagggattttgttgcagcggttgataggggagaggttatggaggaaactagggctcttagagatgttaggtttggagatgagttgcacggcctgagacatctacgaagagatgccaaggagccacttgggtatgtgagtgagctctggaaaggggtctgggctggagttcaatatcgggggtttgtcaccagtagttggtatttaaggctgtacagcatatcaggatgtgctggaagagggtgtcgagagagaactgcaatgcagaaaggtaggcagggaaagtgccctgggaaaggagacaggaaaaatggcagcgagatcgaaggacaactgttctccagggcgcttgtggaaatgcaccaggagaccacgaggaggagtggtcagaatctgctgtggggggcctggcacccaggacagggtggttggagaaaacccgaaggcaggagagtggagttgtgtgaacaactctttaaaagagtgtggggagggtccaggatgaggaggctgataggggagggagtcagggatgcaggaagaagacaggggccagggaacccaggcctggctgggggtctgaggcccagctcagaggtggagacagagagaagggacagagagccaggtgctgccgcaggagacagggagaggggacagagccaggtgctgccccaggagacagagagggtacagagccaggcgccactgcaggagacagggagaggggacagagccaggtgccgctggaggagacagggagagaggacagagccagtcactgccccaggagacagggagaggggacagagccaggcactgccccaggagacagggagaggagacagacccagatgccgctgcaggagacagggagaggggacgaagccaggtgccgccactggggctgagcatccctggttagaagacgtgggttctggcagaagttcctatgttttcacaaagggcaagggtttactggccggtttggggctgtcctgaggcggggtggaggtctgaggccaggggacacaaggtggacaagtgaagtggcctagtggaggcagatgggggtggcagaggggacgggggcggcaggcgggtggggagcgtgggtgggcgggcacactgcatggtctgcccttggcttctttccttggctcttggagaacatggggtgtggtcaaaaaattgggtgggaacagtgcaatcccagcgagtaatttgcccatttcattcccggaaaaaggagaagagaaacagccctgtatggctacactatcagagctgaatatggcactgaaaagcttccatgatggttgataagactatg

SEQ ID NO: 11977 - DNA, 1085 bp, Artificial sequence
  DNA replication origin
tactgagcacctacaatgcaccaagcactgttccagaaggtatcgatagaagaaaatacaaaactgtctgccctcatgaaacttgagttgtaatggagagacacagataagataaataaataaaatgaataagtataaatataaatatatgataaatgaataaaaacatatctatgacaatatatggtgatgataagtgctttggagacaaagcaggaaaggggggaatgtgctagtgtatgcagaggttggggtgggttgttgactggtcccagttccctgaaaattcactgacaagaggcagatggctagaagaaaaggtgtacttatttatttaaggtgtacatgggggccttcagaaggaaggcccaaagatacaggggaaattgcctagttttatgcttaggttcaacaaaacatggagagccctgtcgaaataggattggaccaaaagggtgtgatctgatgctgatactgagtgaggaaacccagcgaggccggtggctctagattcttcttggcctctctgagcagcctttttttccttctgggtaaggggcaggttcttctgtggaatgggaggtcttaggactgcaatcaacaaggtagaacagttgatttctttatggccagtttttacacagacaagtgagggaaaatcacagtgatatttttgttttatgactggctttggggaaaagcgttctggtttcgatggctagcctgggggagaatgggaccgagagacaggagggcagaagatgacacagagactgcttctgaggccttcattttggcgtattgttttctgagctccaacattggcaaaaggggttccaagccgagatgacctaagagtacaggcctgaggagtgagtggtgtccccgccatactgaggttctgagtctgggcccaggacatggttgcaccgaaaggcagggcaggaaaggggagctgggttggagggggacagactgagtctggggtccagcgggcagttgaaactgctggtgaggacatgaggccagtttgaatccaagcagcctggcttcaaactccttgttccggaggaggaaccgcaagt

SEQ ID NO: 11978 - DNA, 1019 bp, Artificial sequence
  DNA replication origin
ccctccttcgacgaggcgctgcagcgggtgggcgagttcgggcgcttccagaggcgcgtgtttttgctgctgtgcctgacgggcgtcaccttcgccttcctcttcgtcggcgtggtcttcctgggcacgcagcccgaccactactggtgccgcgggccaagtgccgcggcgctggccgagcgctgcggctggagcccggaggaggagtggaaccgcacggcgcccgcctcccgcggcccagagccccccgagcgccgcggccgctgccagcgctacctcctggaggcggccaacgacagcgcctccgccactagcgctctcagctgcgcggacccactcgccgccttccccaaccgctcggctccccttgtgccgtgccgcggcggctggcgctacgcccaggcccactccaccatcgtcagcgaggtaagggcgccccggccctttggaagccggcgggagaggacgatgctggctcccaggcggacaagccgcgtgtgagacgctggccgccaggggaggtcggtggagacggggaccggtcggctacctctggggacagacaggattcagcgcacccttggaagtgccgcgtcgtaaatgctgggaaaagcctttcgttatctgcctgagcccgtgagttaatgcacagatactttggtttcgggtgtgaacaaaaactttcttcgaagccgagttgtaaacgcctggcgcacgcctgctcaggagtcaaagacccagcaccgcgttccttatctttgaggtgtgcgggcgccgtcattggaaattatggttaggtgcgcgatagggaacttcagtctctggggtgagcgacgttggcagttccggattcgcttatggtctccagggtcaaaggaaagggcgaaccaacgtttgaaggcagcagcagcttttttccagttgcccaaatggttactcaaaatgcaaggggacaaaggtcgaggctttcccggggaatggttttggtaaaattgctttggggcaaagagcaacatctg

SEQ ID NO: 11979 - DNA, 976 bp, Artificial sequence
  DNA replication origin
gactgtgtagatgggtgagggagcacccttttcaaaatattttgctgaaaattaagttagatatcactgctctcagatctgctctcagagcaaggcaaacatcctgatcaggaggtaaacccaccactagttgccaggaaattgacgcggtctgtgagtatgtgctgccatccagtggccaatgtagagatggcacctctgagggcggggggccacgggtgaccttgaggattgaagccctccctgattgggtcctggggagagggccacaagattagcccagtgattgtggatggggctgacacggaagagccccttggcctcaacacctactctgcatttggaatatccaagtcaaggaaggtctggaaacatgaaggggagagggggagaatttcgacctccctctgagaagctgagaacacccattgatctgatgtcatcaacatatagaaaatcgataaacagatctgagttatgttttgtgactcctcctggtctagttagtgttctgagaatcattttctcagtggacatgtgggtgagaccagaggagacagggagccagtgcaggatggtggttagaaatgtgcagaagggggtgggagagaggacacagcgagtgggctctggggtcaaggcccggttacacgccggttatgtgatgtttatttatgatgatagtggtgatagtgatggtgatagtagtgataatagtgatgatggtggtggtgatgatggttgtggtaatgataatggtgatggtggtggtgatggtgatgatggtggtggtagtgataatggcaatggtggtgatggtgatggtggtgatggcggtggtagtggtagtaatgatgatgatggcggtggtgatggtgatgatggtgatggtggtggaatggtggtgatggtaatggtagtaatgatgatgacggtggtggtgatgatgttgatggggaggatgatgataagtggt

SEQ ID NO: 11980 - DNA, 956 bp, Artificial sequence
  DNA replication origin
ctggtctagttggtgttctgaaaatccttttctcagtggacatgtgggtgagaccagaggagactgggagcccagtgcaggatggtggttagaaatgtgtggatgggggtgggagagaggaaacagtgagtgggctctggggtcaacacccagctacaccctggttatgtgatgtttatttatgatgatggtggtgatgattaaaccaatggtgatagtgatggtgttaatgatggtgatggtgatggtggtgctggtgatgatggtggtgctggtgatgatgatggtggtgataatggtgatggtaatgataatggtgatggtggtggagtagtggtgatggtggtgggtagtaatgatggttacagtgatcattgtgatgatggtgatagtgatcatggtggtggtgatgatggttacagtgatggtggtattggagatggtgttgatggtgattatgatggtgacgatggtggtgatagtgatggtggtagtaatgataatacagatgaggaaatatagaggatagtgatgatggtggcagtgataatggcagtggtgatgatggtggtgatggtgatagtgatgatggtggtggtaatgttaatggtgatggcagtagaattgtggtgatggtgatgttggtagtagcggtggtaatgatgatggtggtggtgatggtgatgtcatgctgatagtagtgggacagtggtgatggtgatggtggtagtagtggtagtggtagtaatgatgatgatggtggtggtgatggtgatggtgatgatgttgagagtgatgatattggtgatggtggtggaatggtggtgatggtgatggtggtagtagtggtagtggtagtaatgatgatggtggtggtgatggtgatggtggtaatgatgttgacagtgatgatattggtgatggtggtggaatggtggtgatggtgatggtagtgc

SEQ ID NO: 11981 - DNA, 1413 bp, Artificial sequence
  DNA replication origin
agagggtgttgaacctcagaaacatgtgagaaatccctgggggttggaggttgaacctcagaaagaggtgagaaatccccggggcgggggttaaacctccgaaagaggtgagaaatccccagggtgggggttaaacctcagaaagaggtgagaaatccccatgaggggagttgaacctcagaaacaggtgagaaatccccgggggtgggggtgaacctcagaaataggtgagaaatccccagggggagttaaacctcagaaagagatgagaaatccccagcaggggttgaacctcagaaagaagtgagaaatccctagtggggttgaacctcagaaagaggtgaaaaatccccaggttaggggggtggttgaacctcagaaagtggtgagaaatcctgggggtgggggttaaacctcagaaagaggtgagaaatccccgggcagggggttggttgaacctcagaaagaggtgagaaatccctgggcagcggggtggttgaacctcagaaagaggtgagaaatccccatgaggggagttgaacctcagaaagaggtgagaaatccccaggttgggggttgaacctcagaaagaggtgagaaatccccatgagggggggttgaacctcagaaagaggtgagaaatccctgggcagcggggtggttgaacctcaggaagaggtgagaaatccccatgaggggagttgaacctcagaaagaggtgagaaatccccagagggggagttgaacctcagaaagaggtgagaaatccccacgagggggcgtcgaacctcacacaaaactcctgtagtaagaaaaatattcagaagccccctttcctttcttcttgggttaagaaagagtagctccactcccaccagtccttcccctaggggaaggggaaggggaaggaaaggggaaaacagcagcataggtggctggcagagacaaaggaaagaccagcagagaagaaaaagaaactaggagaggaagtcagagagaaagaaagcaaaaacagcaagcacagagccaaacagccaggcaggcacaccaagggttaagtatctctccccagcccagctctatgtgaaaaagatggtggggacaggcacctggaggagagcagaggaggtgaatgggcataattcttgcaatttgcacccagcacgagaaactaagtgtaagaagaaaggaaagaaagtaaaaaggggaattgggaaaaaaaaaagagagagagaaacagaaggcagtgtgtgcacgggggcagggcccatagaaattgggagaagaaagggaaacgggatgacagagagagagaggaaaatagagtgcaaatgagagagagagaaatagagggaaagagtaagtaagagagaaaccagaagagacagaaatcaaagaaagacacagagggtg

SEQ ID NO: 11982 - DNA, 1563 bp, Artificial sequence
  DNA replication origin
gagtgagttgagctgtctcggaaaaatcggattcaaatgaatctttggccaaccactgttcaagaaggatgttaacctcacacctaggaatgctacattttctagcgtttgacattttcagcgatcaagaattactatattttgtaatatcacaaaactcagtgagatctgcagaaaagaggtgcacaaattagtgtcacacagctgcacggtgggcttagcgagtatgtgacggtgataacctagaaaccgtttggatggtggtgggagcatcgtcaggaccctgaatacctgtgactgctcgctgctgccttcttgactcctgccgtctgcgctgagaaccagggtgcccctgccccctgctcccacactggcagggcaagcacaacctggacctctagctgaaaggtggggagggcaccagggtccatggcctcgacagcatgtgttctgggactgtcccgaggcgtctggtgtgaacgtcccctcctctttttctacttcagtctccaacagccccggcaggtggctctgacgtctccttcatgggcacctgggctccttcttctgtttcagggctccaaggtcctggccaagaaagagctggcctatgtcccaattatcggctggatgtggtacttcaccgagatggtcttctgttcgcgcaagtgggagcaggatcgcaagacggttgccaccagtttgcagcacctccgggactaccccgagaagtattttgtatgtaggcaccagagcagctgtgtcccaagggctcctgcaggactgtgaccgtgggacccccatgtgacttccacaggacacgtgactgtgtggtcctgtgcgactccagggctgtgtgtgaccatagggctgtgtataacctcagggatgtatgtgaccatggggccgtgtgtgaccgtggggccacgtatgactgtggggccgtgtatgaccatggggccgtgtgtgaccccagggctgtgtgtgaccccagggctgtgtgtgaccatggggccgtgtgtgatcatgtggccatatgtgaccctggggctatgtgtgaccccagggctgtgtgtgaccccagggctatgtgtgacctcagggctgtatgtaaccatggggccctgtgtgatcgtgtggccatatgtgcccctggggctgtgtgtgaccccagggccaggcatgacaccagggctgtgtgtgaccccagggctgtatgtgaccccagggctgtgtgtgacctcagggctgtatgtaaccatggggccctgtgtgatcgtgtggccatatgtgaccctggggctgtgtgtgaccccagggccatgcatgaccccagggctgtgtgtgaccccgaggctgcgtgcgactcctgcctccttccttccagttcctgattcactgtgagggcacacggttcacggagaagaagcatgagatcagcatgcaggtggcccgggccaaggggctgcctcgcctcaagcatcacctgttgccacgaaccaagggcttcgccatcaccgtgaggagcttgagaaatgtaggtaaggaagagtgcgtggccct

SEQ ID NO: 11983 - DNA, 1121 bp, Artificial sequence
  DNA replication origin
tcctcttctcccattgaggtgcattgagggtgggaagtgccaggcctctccctgcctcttgttatcctcactcaagccagtggtatgcctcggcgtttcctcttctgaaagctccacctgtgagcttttttccaccatggggtgggaagctgtgttcactcctgaggttgtccactccgcgtccatgtgctgtaatctccagatgtcaggactctctcccaaaagcagtgcccagtgtccctctcctgggttttagaggctatgtcatgggcagggagcagcagtgcccgcctctcaggccttattgtaccagccgctggctgcccaccctctttggaaggctccaggagccaggccatgccaagctggatgtagtgcctgtggcagcagccctttacccatgagctccagagagcactccaggctgagctggttccttcactccctgccagggacacatgcagcatggaaatgggcacctcaaggggctggggtgaggggatagggtgagaggctgggttgcagggctggggtgagggcatagggtgagaggctgggatgcagtgctggggtgaggggatagggtgacactgggatgcagggctggggtgaggggatagggtgagaggctgggatgcagggctggggtgagggcatagggtgagaggctgggatgcagggctggggtgaggggataggatgagaggctgggatgcagggctggggtgaggggatagggtgagaggctgggatgaggtgctgggatgagggtatagggtgagaggctgggatgaggtgcggggatgaggggatagggtgagaggctgggatgcagggctggggtgaggggatagggtaagaggctgggacgaggtgctggggcgaggggctgggctgtgctgagcactggtgtcatcaagaatctgctttgccctgctgcctgttcagagcagactggtcggggtcaaagatgggttgtggtgctactcaaatgttttcatcatttcccctctaaggaaccttttcagacactttttccctaatcatctcccatgatgctttatactgcagagggactatcattcatgtgctgtggacgtatctgtgctttacacataaaa

SEQ ID NO: 11984 - DNA, 1398 bp, Artificial sequence
  DNA replication origin
cataactatagaaagtgctgtgtgagagtccaggtgcagaggctcacaactgtaatcccagcactttgggagtcccaggtgggcggagcacttaaggccaggagtttgagaccagcctggccaacatagtgaaaacctgtctctaataaaaatacaaaaattagctgggcatggtggcgcatgcctgtaatcccagctactcaggaggctggggcagcagaatcgcttgaacccaggaggtggaggctgcagtgagctgagatcatgccactacactccagcctgggcgacagagagaagctctaagggaagggaagggaggggaggtgaggggaggagaggggaggggaggagaggggaggggaggagaggggaggagaggagaggggaggagaggagaggagaggagatgggagaagaggggaggggaggggaggggagggaggctgatccttctggggggcccagaaggcctctcagatgacgcgtatatgagaagagacctgagagagaggggagccagcctcgtggctctctggggacatggggaagcagggagggcttccatattcaaggacagcaaggaggcccaggagggtggagctcagtgggcaaggacgaagggaaggagagggtgccaaggggcctctgaaaggggtctggctcttactcttggtgagacaggaagtcactggaagtttagcgtgatgtatgacttgatccacctgaaatacagtctactagaacctgtgccacaaagggattggttttgcccactggtgtacatccagtgcctggaactggggacacatttcagagcatgactttggctgctgtgtggagaaagaagtgcagcaggttacgggtggaaggcaggtgttgaagcaggctactgcagtcagcccaacaggggtggtgggctcggtgggcatagtggaaatggtgagaaatgatcatatttaggatgatatatgctacaggcagagccagtggaacttgctgttgggttcaacgtggtgtaagagacagaggagaattcaggagtgaagctaaggtttttgtcctgaatagctggggaaggacttgctgttaactgggttggggagcatgggggagaggaaggtgtgtggagggagatagaggggcaggtgatggaggagtctggcatttgggtttgaacacatcagtcatccttggcttagtggtaggttctcgtgatgttctgtgtagccctggcctcccctggccctgccccggaccccccattcccacctgtcatcctctggcctctctgtccctgcttcctcccaggctctgtggtccacctctgttcctctcctacacctagtggcacgtctcctcacagcccatgcccagtcagtcatcagggacagttta

SEQ ID NO: 11985 - DNA, 1105 bp, Artificial sequence
  DNA replication origin
ctggtgggtgggactcgttgggtaaagggggaagcagacactgagatggaaagggaggagggcagactgggcagaggagaagcccagctcgggcacagcctaagaggcctgagctgacgtccaggagctctggggatggggcagctctcagggtggtcctgaatttcgttagtgggttgggtattatgaccaaccagtagtcatgggacatgagctctccggggaaggggagggagccagaactaattgtcttggcagaggtgatttcccagagggctcaaggccatccacaggcaggccccctgcagagggaatggcagtgcctccccctcgagagatgggatggtgttgacagtgccccccaacaggagggcaggggtctttggcagggtggtaaggggcggtctgactgagaagaggtcagctggggtaagatctgaaggacaggaaggagccagccatgggcagtgacgacacagaagcgtcctggggagaggagcgggactgtgtggttgcaatgtcagtggggacccccggggggaagggcaggactgacatggcctttgagaagtctacacgtctatgtagaggacggatcataaatatgcgagagtggaggcgagagcccttttgggaagctgtgcttggaagaggaggcgggcaagcagggcactggctggggacgtggagtcagaggtgggcagacgctggatcagagcacggggaaggccgtggtgaccggggattgaatgcagggtgaggaagagcatggaatgaaggatgagctttagcttagcggcttgaggaactgggcggtgctgttgactgaggtggggtgcaccctagaggaaaaggttttctaggagcagctagcactctgctttgtgaaatttgagctgtccattgaacaatcagtggagacactaaggaagcagctggctattggagtcggaccgaggggcgagatgagggtggggtgtagatttgggagccatcagtatgtggatagtatttaaggccacaagactgggctgtatgttatgtgtcacaaaggtgaagtgtctcaggtgtccccacaagccgacagtaagtgctgaaccaaaca

SEQ ID NO: 11986 - DNA, 1115 bp, Artificial sequence
  DNA replication origin
ttaaatgggctacacctctgtgcttgcggggtgctgagtttaaacgggctatgcctctgtgcttgcaaggaacaagtgtagagcaggtgaaccgttttcctcacacatggtcaacatgcttttctgtggagtgacaatattttgtcccccctgccagccccgtttttaatgaaggaattatgggggccaggatccagctgttagcttttcaaatctgcacacctctcagaaatgctcctcctggggacacagtccttcgattccctcttgcctgttgtcggctgggccactatgcaggcgtggctggggtgcctttcaaagtggcgttcactcccttttcccccaggtcattttatttttgtttctggacaaatccagcattttccttaagggtttagcgccatctggtgcatcagaggcgcactgcagctgcttccctcctgatactgagtggggtgtgcagagaattgccaggggcgctttcctttgaggagctccaaatgcccgtggggtatgcggtgtgtatgtgagtggcgagtgtgtgcagtgttatgtatctgtgtgtggtgtgtgttctgtgtgtatgtgtgttgtgtatatgcgtatgctgtatgtgcagtgtgtgtggtgtgtatgtatgtgtgtgtggtatatgtggtgcgcgtgtgttgtgtgtgtaacgcatggtgtgcatgttatgtatatgtgtgcgccgtgtgtgttgtgtatgtgtggtgtatgtggatgtggtgtgtatgtttatgtgtgtgtggtgcatatgtgtggtgtgtgtgatgggtgtgtggtgcatatgggtggtgtgtgtgatgggtgtgtggtgtgtgtggtgtgtgtgatgtatgtgtggtgtgtgtaatgggtgtgtggtgcatgtgtgtggtgtgtgatgtgtgtgtggtgtgtgtaatgggtgtgtggtgcatgtgtgtggtgtgtgtatgtgtgtatgtgtgtggcatgtgtgatgtatgtgtggtgtgtgtgtatgtgtgatgtgtgttatatatgtgtggtgtgtatgtgtgatgtgtgcgttatgtttatgtgtgtggcatgtgtgacatatgtgtggtgtgtgtgtgtgtgtggtgtgt

SEQ ID NO: 11987 - DNA, 1491 bp, Artificial sequence
  DNA replication origin
aaaatgtgttcattttaaatataataatgtaggtgtcattgctatccccgttttaccattgcagaaatggaatttcagaggtgtcaggggccagctcaaggtcactgatgaatcaggacccgcttatccagctctctctgccttcagagctctcttgacttttctgcatcacttcctttaccaggaatgatatttaaattattccaaaatgtaaaatatagttagttttccaggcagttgtatttatttctggatttttttttccctaaataaaacctgtatctacatgaaaactcctccaggatttcctttcctcatgaagtgtgtggtttcctcaaggactgcctgggaggccctgaggccgacccactcctcccagcaatgacttggggaggagggagtgggggaagacagagagcaggggggtgggatgggagggcagagaggagggggagggatgggagggcagagaggagggggagggatgggagggcagagaggagggggagggatgggaggacagagaggagggggtgggatgggagggcagagatgaagaggcagaatgggagagcagagagcaggggaggaggatgggagagacagagagcagaggctgggatgggagggcagagaggagggggcgagatgggagggcagagagcagggggcaggatgggagggcagagagcagagggtgggatgggagggcagagaagagggggcaagatgtgagggcagagagcaggggagtggaatgggagggacagagagcaggggccgggatgggagggcagagaggaggaggcgggatgggagggcctgctgtgtgccctcatcaggtggatttcattcgctgggatggaagaggaggcatggcatagagacatgaagttctagaatgtttttggccactctctgcaaactcaagacttttttgggggggggtgggcggagagtgcaaataatgcctttttggagttgtaattgctccctgggagggttaaatttttaatgatttgtaatgtcctggtaggttcctgcattcatgaactgcttgggtgaatggctgtgatttggaagtgaggatgggagagaaagagagaaaggcatgatgggaacgtgggtcaaattgaaactcctgctctgacctcatcccttccgggggatgactcttattatcctggttggctacttgcaggcatgtctatacacaggccacctggattaagagccattcctcagggtctcctggctattgaaatgtctgtatctgtaagagtagctttcagtgtctgaaattggcctttcctctctctctatgtgttaggttccacctggtattcacttagggagaccggtcaccctctgcagctctgtctcactactgggtacagtgaagaggtttacaagcttggtagcagtgcctatgaaaataacaactaggatgcttctgttaccatcacagtcacccccattatccaaggggga

SEQ ID NO: 11988 - DNA, 1457 bp, Artificial sequence
  DNA replication origin
caaaggtatgttcaggtaaactcatggaaatcagttggaattattggtctcatttaatcattgggataaatgataacattactgaatttccaaattcctgaaaatcactgtagtcattatagcaatcatttcaaaacattcaacttaaacgtttataaaatgaaaattcttactaaaattttttatagagcataatcctataaagcagtttgattgatttggttttattcccattcaactattttgcagtttcattcaatttatattatgttagatggatgttaatgtcctagctatatgtgcatttggcattgttgcctaattaaaacttcccttaatttatcaatgaaatcacaataaagtgtccatcactttgtattgcatggacacggggtttaagagcagaataatggcactgtgccctcttcaaagtcattatacagatgaaatcatgccaacatgtccagtagaaacagtcttgaaaagggaaataagttagaaaaggccgctgtctcagccatgccagcgcaggtggcggaggaggcggcgtatcagtgacagtggtgactgcgtgtgcatgcgtggcggaggaggtggcgtatcagtgacagtggtcactgcgtgtgcgtgcgtggcggaggaggtggcgtatcagtgacagtggtgactgcgtgtgcatgcgtggtggaggaggcggcgtatcagtgacagtggtgactgcgtgtgcgtgcgtggcggaggaggcggcgtatcagtgacagtggtcactgcgtgtgcgtgcgtggcggaggaggcggcgtatcagtgacagtggtgactgcgtgtgcgtgcgtggtggaggaggcggcgtatcagtgacagtggtgactgcgtgtgcgtgcgtggcggaggaggtggcgtatcagtgacagtggtgactgcgtgtgcgtgcgtggcggaggaggtggcgtatcagtgacagtggtgactgcgtgtgcgtgcgtggcggaggaggtggcgtatgagtgacagtggtgactgcgtgtgcgtgcgtggcggaggaggtggcgtatcagtgacagtggtcactgcgtgtgcgtgcgtggtggaggaggcggcgtattagtgacagtggtgactgcgtgtgcatgcgtggtggaggaggtggcgtatgagtgacagtggtgactgcgtgtgcgtgcgtggcggaggaggtggcgtgtcagtgagagtggtgactgcgtgtgcgtgcgtggcggaggaggtggtgtatcagtgacagtagtcactgcgttcatacgcgtggaggaggcgaaacgtcagtgacagggctcattgtatggatgggtggtgtttgatgcagcctcctaagccatggatgcatttacaaatagcccctattggttaagcacagtgggaccctgggagttgaatgccacaacccaaacaggattgggatcttgagtttaggatcttca

SEQ ID NO: 11989 - DNA, 1395 bp, Artificial sequence
  DNA replication origin
gcccctcacctcccggacggggcggctggccgggcggggggctgacccccccacctccctcccggacggggcggctggccgggcagaggggctcctcacttcccagtaggggccgccgggcagaggcgcccctcacctcccggacggggcggctggccgggcggggggctgacccccccacctccctcccggacggggcggctggccgggcgggggctgacccccccacctccctcccagacggcgcggctggccgggcggggggctgacccccccacctccctcccggacggggcggctggccgggcggggggctgacccccaccacctccctcccggacggggtggctgccgggcggagacgctcctcacttcccagatggggtggctgccgggcggagaggctcctcacttctcagacggggcggctgccgggcggaggggctcctcacttctcagacggggcggctgccggtcggaggggctcctcacttctcagacggggcggctgccgggcggaggggctcctcacttctcagacggggtggttgccgggcagagggtctcctcacttctcagacagggtggccgggcagagacgctcctcacctcccagacggggtcgcggccgggcagaggcgctcctcacatcccagatggggcggcggggcagaggcgctccccacatctcagacgatgggcggccgggcagagacgctcctcacttcctagatgtgatggtggccgggaagaggcgctcctcacttcctagatgggatggcggccgggcggagacgctcctcactttccagactgggcagccgggcagaggggctcctcacatcccagacaatgggcggccaggcagagacactcctcacttcccagacagggtggcggccgggcagaggctgcaatctcggcactttgggaggccaaggcaggcggctgggaggtgtaggttgtagtgagccgagatcacgccactgcactccagcctgggcaccattgagcactgagtgaaggagactccgtctgcaatcccggcacctcgggaggccgaggctggcggatcactcgcggttaggggctggagaccggcccggccaacacagcaaaaccccgtctccaccaaaaccagtcaggcatggcggcgcgtgcctgcagtagcaggcactcggcaggctgaggcaggagaatcaggcagggaggttgcagtgagccgagatggcagcagtacagtccagcttcggctccgcatgagagggagaccgtggaaagagagggagaccgtagggagagggagagggagagggagagaacactctttttcagagactacttcttttagatttacctattagccttatcatctcctgctgtggttataattgt

SEQ ID NO: 11990 - DNA, 957 bp, Artificial sequence
  DNA replication origin
ccccgtctgagaagtgaggagcctctccgcccggcagccaccccatctgggaagtgaggagcgtctccgcccggcagccaccccgtccgggagggaggtggtgggggtcagccccccgcccggccagccgccccgtccgggagggaggtgggggggtcagccccccgcccggccagccgcgccgtctgggagggaggtgggggggtcagcccccgcccggccagccgccccgtccgggagggaggtgggggggtcagccccccgcccggccagccgccccgtccgggaggtgaggggcgcctctgcccggcggcccctactgggaagtgaggagcccctctgcccggccagccgccccgtccgggagggaggtgggggggtcagccccccgcccggccagccgccccgtccgggaggtgaggggcgcctctgcccggccgcccctactgggaagtgaggagcccctctgcctggccaccaccccgtctgggaggtgtacccaacagctcattgagaatgggccatgatgacaatggtggctttgtggaatagaaaggggggaagggtgggaaaagattgagaaatcggatggttgccgtgtctgtgtagaaagaagtagacatgggagacttttcattttgttctgcactaagaaaaattcttctgccttgggatcctgttgatctgtgaccttacccccaaccctgtgctctctgaaacatgtgctgtgtccactcagggttgaatggattaagggcggtgcaagatgtgctttgttaaacagatgcttgaaggcagcatgctcgttaagagtcatcaccaatccctaatctcaagtaatcagggacacaaacactgcggaaggccgcagggtcctctgcctaggaaaaccagagacctttgttcacttgtttatctgctgaccttccctccactattgtcccatgaccctgccaa

SEQ ID NO: 11991 - DNA, 1692 bp, Artificial sequence
  DNA replication origin
atccacatggatccttatgtttgtggggtccacagcctgaccactgtaatccctcacattcatgtttccccgccgtgtagaaaagctatacagggtattcctgctgtacacgcagccactgtgcaaagatgaccctactctccttggcactgaggagccgaagtcatcccctgagagagaggcagcctacaaatgaatacctggggccaggggcctccagagaggggagttactacaccaggcaatgcttctctcccagacagcttgaatattaaatgtgtaaacatactagacagcaaagtagtgccgaaaccaagaaatggacacacggagagagagggggaaagggaaggggagagggagggagtgggagagggagacggagagtgagagggaaagggagggggagggggaggggaggaggagagagagaggcagaaggagaagaacagggagagggagagggagggaggggggagggggaggggaaagggggaggaagagggggagagggagagggaaagagagaggtaggaagagaccacgaggagagaggaggaggaagacaaagtaaaggcaggaggagaagcccagtctgggaggtagagacagcaacaacttgagtcatgcgctggacacagtgcccacttagcaggaaccgctgcagctacagatgggtcccaaatcatgaacgaggacgttctggttgcacttccatcctaagaggatggtggagggtgatgctttttgtttcttactcatttccctgtgcatccatacagttagccaataccctctaaagtaataaaagtgtatttctgctccgagtaacttggttgaactaatattcaaatccaaatctgcagactggtaggctgactaggctatgtgaatgtgtaaggaacacagaatgtgcatacaaattccatacagacagagaggactgggctggcattaaggaagaccagtcacttcagaggactggccaagaggccagtgacaccacgctcggtgacaccacagctcttctcatggtttcaaccccagaggcagatattcttggctgccttcttgagtgccctgacgggggccactccttttgtctctttctttgatttctctgggtgcagactaaaattctccttgaatctagttcaaactgtccaaaagaggggatctattcagttcgattcatcacactggatggagttcttagaccaacacacgccacaggcccatggccagcctacagatcggctccctgatgtcatgccatggccatggaaagactgaaccatcacagaaggggctgccagcactgggacaggcatgtaagtcatatgagaccatctaccttggtcaaccaggcagtgctaatcgggagagtaagaggacagcacggagattagcaacccaaagcaataccccagcaggtattagagttgaccattggagcttggcatgttttggttattaatactccaaactattcatgcttaaggcaatgtggaatttcaagtgaaagccagatggttcttgggcaagaggaggaaagaaaaacaaagcatcatgtgcttgggagaacgcctagtaaaacaagaggatcccagtctctcccagcagagtgtgggcatcgttcactccctttggtacaatccattccctttctcgtcgggattcacacagcatggt

SEQ ID NO: 11992 - DNA, 1576 bp, Artificial sequence
  DNA replication origin
gtgaaggctgagccgtctcttttcattacatttgtatttactttcaaactaaacaagaacagagtctggactggaccagaagttgtagggggctctgaagtgttttcatgcaacaaaccctagttcgttgctaggggggatgaatctgaccacatttttttaaaaaacttcctagtgattccagaggaaatggctgtgaaaccactaaatgatatcttatattctaggacttttaacagaggattcggtttagttcaaactagccaggcataaaggaagcacttaggataagtttgaactaaaccaaatcctcagttataagtcttggaaaataaggtatcatttagtggttttgcagctatttcctctggaatcactagaaaatttttaaaaataaagtggggtatgattcatccctttcagcaacaaactaggggctgtggtataaaaacacttctgagcaccccacaaattctgaggccaatggaagcgggtagggggccctgagcaattttagcaggtggtgagatgatcagataagcttgagggagggtaaccccgcggtaccttgaaagacaggttggggaagtggagaaagacagaaagaaaagagatccatacaagagcaggctggtgctccagtgaatgggtcccaaggatcagaaccagaggagtagcaataagaatggatacctagaggagagaaggtgaggatggagagtgagaccagagagagaagatgaggatggagactgggaccagagaagaggaggtgaggctggagaccaggaccagaggagaggaggtgaggatgaagaccaggaccagagaagaggaggtgaggatggaaacagggaccagaagagagatggtgaaaatggagactgggactggaagagagaagatgaaaataaagaccaggatgaaaagagagaaggtgaagatggaaaccaggaccagaggagaggaggtgaggatggagaccaggaccagaggagaggaggtgaggatggaaaccaggaccagaggagaggaggtaaggatggagaccaggaccaggggagaggaggtgaggatggagaccaggaccaggggagagaaggtgaggatggagaccaggaacagaggagaagaggtgaggatggagagtgagaccagaggagaggaggtgaggatggaggccaggaccagaagagaggaggtgaggatggaaaccaggactggagcagagagggtgaggatagagactgacactggaggagaggaggtgaggttggagagtgagaccagaggagaggaggtgaagatggagagtgaggccagaggagaggcagtgaggatggagactgggaccggagcagaggaggtgaggatggagaccaggaccagaggagtgttggtgaggatggagagggagacacaaattcaagagatactgcaaaaggaaaaccagatgatttggtaacatgaggaatgcgaaggaggagaaacaggctttgacctggagtgactgggaacaaggtttatctttactaaatatgaggaacatagggaagaaaaagaagttcagggagga

SEQ ID NO: 11993 - DNA, 918 bp, Artificial sequence
  DNA replication origin
tttttaaatctaccgggtggagacttgagcgaggagggcagacgggccagtgcgctggggaggatggaagggggagccggctggagcctcggggagagaggcctggggagggccggggcctgggaagcggccagcgcccgcgggaggcgtcccctccggaagctctgcaggagaaggagggagtgaggacacccgaccggcctggactgtgcagaaggggaggtgacagcgagggttcggtctgcgggaggtggcagggccggggcaggagcttcaaggaaggggaaggaagccagccacggccctgcagggcctggaaactgtttcctcctaacagagccagtcgacagtgacacaattccctccagcagggcctgactgttttcaacagacgtcagggacatttttccaccccccccccccccccccccgccatagatttttcacaaaaccctcattcacttccacgagaatactgtgcatggatcaccggtcagttgtgcagcagccagttatgggttggtaccaagtgtaagttaccagtggcgctggaatctctcattgcaattgcacagagcacgttcaggagagaggaaggtatttccagtgttgggagctgcttagggtctgtgtgctgtatgttctcgcatgctccatctcatgcagaaatggacacgcaaagttggaggcagatgggaaagagctggagaggagctagctactgtgcagagaaaagctgtgtcactgggaccgattttccatattctgagtgttatcctgcagtggaatactgggtatgccactacttgagtctgaagaggaatgtatggatgttgagatgccattgtcctgttctttcataaagcagtgtgttctcaagggaagggtggtgggcttccatgcagctctctggctaga

SEQ ID NO: 11994 - DNA, 1093 bp, Artificial sequence
  DNA replication origin
gaggtagaggccactccggcgtcaggaagaacatcgccggtttgcgggttgagggccagggagaggactagcaacaggaatcccagtgagaaaaccatcgaaagaaggattgaactaacgcacagctagacagtcccgcagggaaaattaaaaatggggaactttaaattgtgtgaactacggagagtggggagtcccagggcgggaggagtcccaggcatctctgagtttcctacagaaatggaaatgagaccgagtttcctttccgtaagccaacgggagcaacaggacccaggtaggaaacgcagggtgggaaggaggatctgcgctgctggcagggaggcctgcaccggggatccgatccgcagcagggactccaggctggcccggggtcgggggagacagcttctggagctcacaggtgttgggttggggctgcgggtctggagtgcgaaggataggagcgcccagagggcggaggctgtgcgggcagcacccgcagcccgggggagggaggagaaggggcctgcagggaggctcgcggggtcggggagtcggaagggaaagcgcccaggagtctggagacgcggttgctttagggagaagtttcagctcgcggtggatagaaaagcccatgcaaagcgaggagactggggtttgcttcatcacaaggccgtgttctccagggttcgcagggaaggagggcgaggccgcacatagacgtggccttggcttttcactttttaaatctaccgggtggagacttgagcgaggagggcagacgggccagtgcgctggggaggatggaagggggagccggctggagcctcggggagagaggcctggggagggccggggcctgggaagcggccagcgcccgcgggaggcgtcccctccggaagctctgcaggagaaggagggagtgaggacacccgaccggcctggactgtgcagaaggggaggtgacagcgagggttcggtctgcgggaggtggcagggccggggcaggagcttcaaggaaggggaaggaagccagccacggccctgcagggcctggaaactgtttcctcctaacagagccagtcgacagtga

SEQ ID NO: 11995 - DNA, 1730 bp, Artificial sequence
  DNA replication origin
agccctctcccagccaggtggttgaggaggaggggaccaaggaggtgggagtcaccccacagggcgtcaggcaaggcgaccattggaccccgtgacctcaccctgtactcacagactccaacactcaacaccaaaagcagctttaaatagtatagattttatggaagtcttcacgaggacgggagtacagagcttgtctcttaaacagccacactttccctaaatctttaaacaaaatttctgctttttcttaaattttctgtccccgtcacagctttcatattccatgggtttctttcttaatgcaccccccaatcgtcccttgcacgtccccccctcctcctcccagacatctctctccaaggccaggcgttagcatcccactcaccccacaggcccggcggaggcacaggtgcggccccggggagccaccaccgtctcggaagcagagctctgggaatagcatgtgcgcgagccagcgtcagttgtgtgtgtgagtgtgtgtgggggggtggaggtgtgagtgtgtgtgtatgtgtctgtagaagtaggggtgagggtgtgtgtatgtgtatgtgggcatgggggtgtgagtgtgtgtgtatgtgtatgtgacgatgggagtgtgagtgtgtggggggggtgggagtgtgagtgtgttatggatggaagtatgagcgtgtgacagtgtgagtgtgtgtcagagtgtgtgtatgtcggggtgggagtgtgagagtgtgtgtgtatgtgagtgtgtgtagaagtaggggtgggagtgggagtgtgaatgtgtgagtgtgtgtgtgtgtgggggtggaggtgtgagtgtgtgtgcatgtgggagtgtgagtgtgtgtgtatgtgggagtgtgcgtgtgtgtgtatgtgggagtgtgcgtgtgtgtgtaggggtggggggtgtgggtgtgtgtaggggttggggcagccgtgggagcaggaggggcaatgaacagccagctgtgcccacaccatcaggtgatgttaagaaggacaggggttgcacttggagagattgagttgtagcagggagaagcagcaaggtgtccacctagggactcctggacgaaattctgatggagctaattcttacagacatgattctgggcagaggtaaatgatcaagtgttgaagtgtagattgtggagtctcttatagaggtggtccttgaaaccaagacgccaggcaagcatcttaagaatattatgataaaagaagaagactcatttcagtgggcagtaagtattgaatgccaacagaatgcacagaaatatactacttggaaacttaaaaccgtgtgttgacagaatttcctccagttgaaggttagaaaaataatcatatcttacatggtacaaatctctcaatcattattttgcttgtcatgaaaacccagagagaagatatcattagcctcattttataaatgagaaaaatattcaaaaagaataagtgccttgttcagtaatttatcgaggtgatgggatttggaactaaactttgaaacgcttctttcacaagcttttaccacatgctaagtgctgaccactaggtcagtagttggggatatagacacagacaaatgccatctttgcttccaccaaactcacttccatcatcagagatagcaaaacaacatgggtgattacacgccaaaagtgaggttgaagcatgagatggattaactcaagtatgaaggacaaagaagaaag

SEQ ID NO: 11996 - DNA, 759 bp, Artificial sequence
  DNA replication origin
tcctggggcaccctcatcaggacatcaggaacacacaggcacacaccctcttccaactctgaaaccagcacatcatcagaggaccggaccttagcctgaagcagctcctcagagaatcctgttctccttcctccatcagctccactgcccgcccctcatccctcagcctctgggggtggagcggggcggatgggaggtctcctatagtcctagcgatcaaccctgagacccagcctggagaaggcaaggaaaggggccacagatggggcaacatgggaaagacctgggtgagggaacagctgggaaggcgtactgtagagagatgaaggctaagaccttatagtcagagtgaaggatgtcagagcttaatattttggggtgaggtcctcctgaggtccaaagtgaggctgaggctgtgggtctggatggctgaagtgatgcccaaatgaccagtggagccgaagaggtcaaggaagaattcggagctgtcttccgtatggacaccaggtcacctcggatgacagagatggaggcttctgggccagatgctagaatcagtatggttcagtggctgaagaggtcagcaggtgacacaagtgagagggacacaggacgataccactaactggcctgaatgttaaaggagcaatggggttctacacggtgaatggggataattgttaggaagtggcattggggagcatggggattccagaagaaccctttccaatctctccccatagcagttattagccagtc

SEQ ID NO: 11997 - DNA, 1374 bp, Artificial sequence
  DNA replication origin
acgacagaaccatgcaatagagcattttcctccaagttcaagacaaggagcctctgtcatgaagggatggagtcattcagtcccttccagcagcctagctgaacagtgaggctcctttcagagtctacagtcaaatcaaaccggtcgaggcggatggtgcacctactgtgggcaatgttctttgctagatgctgtcatctacctgagaggaatttatacagagccgcacatagtatatgcatccatgacagctctgctccttatgacacaggcatccgagctgctctgcctgtgcaggagctgtggttattattccttccccatcacggacggtgcattcttttccttggacttcatttctgctccagctctctgggctgggccattttcctaattgcttctctggcaaatatctccggggccctttggcttctcccgccatgatgtgaagcagagattaaagatgtcaggattgtgctaggaactgaggatacagtggttgacagaaaagatccggtctttgacctcatggggattcactctagcagggaagaggagctttaaataaatcatcactgctactgtgctgtgggagcttagacgggagatctagcctggactggggctggcggggtgggggtgctgcccgagtggggatgtgtcaggggaagcgggagggacgaacaaggaaggagacaggggcgtaaaggatcacaggcaaagagaagggtttgcgcaaaggccctgcggtaggggagagttggatctgttcagaagcagagatgagtccggtggagttgcaggtggggtggggagaggggtgtctgggggaggctggacaagcaggcaggagtcaggtgatgctggccctgaggtccctgggatgggtggtcaccttattctaagggccaaaaggaggccaaggaaggctcaagtggaccagtgcatgactgattttgagtcgaggctgctgtttggacaatatttgatgggtgtgaaggtcaatggctactgcactgccccaggcaatgtgatgatagtggcttggtttagggtggtagagaaatgaagacctattttggaaaattaaaaaacagctagaacatggtgttgaatttgataaagtgagagagagggatacctgtatttctcttgtgcaaagggatagatggcaacagctttagcaggggcaacaggggaggacaaaggcttgaggagatagaagggcaggaatttgcctttggacacatgaaggccgagtccctgagaggcatcagaagggaggcggggagcgggggttgggggcggctctggacatccagaactcaaataccatcaagatgctggaagagcacttatgtgatgtcatgtgtt

SEQ ID NO: 11998 - DNA, 1166 bp, Artificial sequence
  DNA replication origin
cttggagaaagcagccttgacagaggggccccagaacactgggagggggcgaggctggcacaggatgctctccacaagggccacactccagggtgactcattcccaggcccctgcggacaaccttgggccaagtcccatttcctccctgagaaacgctttagccaggggaggggggtgacctgcagcatctctgtggggcgatcccactccaggagtcagctccctcccctgtggagagtgccccagattggagtcgccttggctgtatttactcccctccaaaggcccacggaggcagatggtggtaaaatgctacgtgggagaagtagcacctgattctctagatcacggatcagagtcccaactccagtgcttgggggaaactttagagatcaagcctggccccaccattcattttacagacagagaaactggggcccacagagttgaagttacttggccaagacctcccagctgttcagtggcagcgcgtggctggaaactcttgtttcctagatcctaagtcagagttggaccctcacaccacctggaaggaaagggacacagagaaatgggaaccaggggacacttctgagccaggagggtgctgtcctgcttttctgggaataggggggaaggggagaaaggaaagtgccaaggagggattctggctgcagggggagtgggggagggattctggctgcagggggagttggggagggattctgactgcagggggagtgggggaaggatgctgagtgcagggggagtgggggagggattctggctgcagggggagttggggagggattctgactgcagggggagttggggagggatgctgtgtgcagggggagttggggagggattctgactgcagggggagttggggagggacgctgaatgcagggtgagtgggggaggttttctggctgcagggggagttggggagggatgctgactgcagggggagttggggaggatgcacactgcaggggagtggggatgggatgctgactgcagggtggagtaggggagggatgcagagtgctggatggcgtggagatgagatatgctgacttcagagggagtgggagctgaagatgtccttgcctccctttgcttcggcctttggataaactgctctttacagttttgctaactt

SEQ ID NO: 11999 - DNA, 940 bp, Artificial sequence
  DNA replication origin
cgcgagcgcgcggtgggggaggggagggccccggagcgcgcctgcgtggggcgggggcggcagccgactaggggctgggtctggccgtttagggccgggtcttggcccgtcgcccacggtgcggagggctggtgggctttccttggccgtcgggcccgccacggcgcgggtcttggctgcggggcggaggtggggcgggagagccgaggataagagtttgaggcttttcgaggcgcgtgccgcggcgtccgcctctgcgggactctgcgccgggcgccctcggccggcgcgcccggctcccgctttgtcgccgagggaagcacgcgcgacgcccctcccgtcgccgccgtggcttctttcggtgttcgtgatttgctgagaggctggaaagcagcacggcggagaggagccttgcactcgccaggcgggaagcctgcgcggacacgcgtgcgcacccacggggcggcgggcgggcgtggggggtccgggccacgcgggcgacgcgcctctagggaagcgatcttgttgcaccttcccgttattctgaaagcaaatcgtagccagacccgagcgcagcggcttagcaaataataaggggagcgtcagtcgtgctcgaaatgcttccttcgcgatggcgtcagtgttccgtgagggaatgaagccgcagtaggaaataaagaggctgtgcgcgtagtctgaaaagcagaagtcaacatttttacagatgaagaaagaatacggaggcaagaggtctttctctgcagtttggtggatttccaacatttagacttgtttggaagaatttcctcagctgcaccaatgaagtccttgatctatagaagtcggcagtccctaaatctacgtctgcattttgttgcaaatcctttataacattccattaaaataatgcagagttatttaatatccagttggccatcgt

SEQ ID NO: 12000 - DNA, 708 bp, Artificial sequence
  DNA replication origin
aggcgaactccgccgccaagtgagtgaggaggaggaggaggagaaggaggaggaggaagaggaggagcgcagtcggagcgcggcggcagcggcagaggcgccgcggcggggaccagcccagagagaccccccgagcccgcggcacaggcggcggcggcgctgagcgggctcgaccagccgagcgagcggcggccccggctcctcctcgtccggcgccagcagcccgcgccccgcgcccgcactcggccagccgagacccgcctcccgcccgcccgccggcctcgtgagggacgcgccgagccgggcggccgagagcggcggcggctgggagcgcgtcgggcccgggcggaaagtgcctgcggggggcgggcgagcgcgcggtgccggccgccccggggctcggcgcgggagccagagcgggagccggcgcggagcgggacgccgggtcccgagcggcccgcggccggggctcgcccccgcccctccctcctctccggcggcggcggcggcggcggcgggcggagtgagctgcggagcctggaatatggtcggggaaatggaaacgaaggagaagccgaagcccaccccagattacctgatgcagctgatgaacgacaagaagctcatgagcagcctgcccaacttctgcgggatcttcaaccacctcgagcggctgctggacgaaggtgagcgtctccagggccccgg

SEQ ID NO: 12001 - DNA, 1429 bp, Artificial sequence
  DNA replication origin
gacgaaggtgagcgtctccagggccccggccccggcccgacccccgccggggcggcccctttccccgcttgggatggtggggagggcgggaaggtcacggccgggcgggaccgagcgccggggggactgggaggccaggagggcgcacaaaggaggtgccgggccgggcttgcggcgggcgggcgggccggggtggacccgccggtgccggacgccccctgcccggccgggaccccgcgccgctggcgtccaagttggcgcgttgcggagggctgcggggtgagccctgcggcccctctagcttcggcggtcacatttccgagaggtcggcgggggctgcgcggactcggtggtcctcgccgagccctcccgagagcaggcccacgccgcgccgccggcctggaggacgcgtgtgcccggcgcgggccccgctcctccgctcggcctcccgagcctgctctgcgcggacccccaccgccccgcgttcgggagctctcccctcccgtgaggactaaagcggggtttcgtggttggggagttggtgcagctgttcaatactaagtggaagtcagtgtggggctcgttagtttaaagaaattccgtaggagaccgaaattatgctggcgtagccgacaaggaggactaagtgacggcgaaaagcacttttttcccttttgtttggggaagcgagaactgttagggagttgaacttcacttttcgggggtggggggggggggggtggagtgcgaaataacgcgatgacagatcggagcgcagcctgagttagaagaacttgggcggagggtttgctcccggggacgcagccgcctgagtttgtaggacagggtttcgagacgtttggaaagggcgaaataaaattgagccaaagtttccaaaaagctgtatggagcgctgtggggagtgaagaatgacaagaagattaatgttgaccaactttggaatttccttaagaagttctcatagcagtacctgaagtattaatttctagtagctgtgggtttctgtggacgcctagagaaaaaaaagaccacaaaaaaagtctgtttcgaaaatcgactggccaggagtttgtttgtttttttttcctgcttagaggcaccaccggaggactgtgtaaaggaaactgaaaactacaggttgaagagatgaacaatggagtttagatttttcgcaagaatttcgagattttaaaaatagagtcggggaacaggagtttgaagcttggggagttggaatgtcactagagaacaaaaggccggaaatgtttccatgataaaaaatggttaaagaaaaatcccaggagttctgttgtcttgaaagtcatagaaacaacttaaaagtagaaaatggttaggtgttacggctttctcgtcgttttgcttccgtatgttaaacatacagcactca

SEQ ID NO: 12002 - DNA, 1354 bp, Artificial sequence
  DNA replication origin
gctgggtgcccagggagaccctcgcaggcagccagacagcctgaagagaacagggtgaggggcagcgtggagggagaagaagggagggaagtgggaggtaagggggactaagagatgggaaaggaggggaaaggaaaggggagcaatgtggaaagacagggagcaccttctttaacattcaggtcactctgggataacctaagtcactctacagcctcaccaaagagatgggggtgagtggagaatgaggaggagagggttgggggcgaggagagggtgggtgagggagaggagaaggtgggggtagggaggagagggtggggggcaggagaagagggtggggtggggaggagagggtagggaatgggaaggagtggggggaggggaggagttggggggaggaggggagacggtagggggactgaaaatggacatgtccactttccaggcaccctctcctgcgtgggaggagcccacagaaacctgaggctggagggattccctggtgggaaaggcacgcagggcttcggggagacttgctgaagtctccaggggaagccctgagccagagctggggtcaggactcgctggagccagcaccaggtgaccatggccctggacagtgtgtggaggggaggaacagagaggtggagcttgcgcttgactgtgcctggctccctgcaggcccccaggttcccctttccaaccccagccatgccaccgtggccaagatggagcagccagagccgggcagaccaggaaaacactggcatttttatctgtccaaaattcagtttttaacaccaaatagctgtaggccctgcaagaaagagatgaggaagggggtcggggggcctataagctgaaaaataccgaacaagcctctcctgctatttgtcctcctgaataaaaaagcaaaaaagtggcttttcctctcctggtccacacccagcatgcattgctctgcctgtgcctctcacgctcacgctgtcccagttctgcgtttatcctcatgctggtgggtgtcctccaccagagggtaggctcctgcaggcaaagggtctgattcattgcttcctgcacaatatttcagctccgtgtacagtaagagctcagagagcaactgaatttgggtggctggaaaaccgagtggtcaggccactgccagcctcattttcccccagaagcagaccccgggaggctttcacccacagccaccctcagagcagccagcccactcccggaagagctggacgctggatcagcacgctcccctccaacactccctggggaacagaggccaacacatgggctggagcaccgtgctgtgatgccacaattcaagggcctatct

SEQ ID NO: 12003 - DNA, 1305 bp, Artificial sequence
  DNA replication origin
tggaggaggggagcctgcaggtggaggaggggagcctgcaggtggaggaggggagcctgcaggtggaggaggggagcctgcaggtggaggagggggacctgcaggtggaggaggggggcctgcaggtggaggaggggagcctgcaggtggaggaggggagcctgcatgtggaggagggggacctgcatgtggaggaggggggcctccaggtggaggaggggaccctgcatgtggaggaggggggcctgcaggtggaggagggggcctgcaggtggaggaggggggctgcagatggaggagggtggcctgcaggtggaggagggggtcctgcaggtggaggaggggggctgcagatggaggaggggggctgcagatggaggagggtggcctgcaggtggaggaggggggcctgcaggtagagaaggggggcctgcaggtggagaaggggggcctgcaggtggaggagagggacctgcaggtggaggaggggagcctacaggtggaggagaggagcctgcaggtggaggagagagtccagtccgcaggcctgggatgagccaaagttcagttgtaagtctgcggagggctctgttttgtcatatatttctggttttaaaaacacaattgatgctaaacatactcgaaggtatatcgaatggtaccacaagtaaccaagaggcattgccaagctcccacaatcaaccactcctgaacctcctctttcatccacatcccacccagtcctccccagcccacccagattttaatgcaaactccaaatatggtttcatttcacccataaataattctgcatgtatcacgcgggaacattgaagaatattttaagaacaacaaattaacatgatccaatattgtgtcagtgtttaaaggttgatgtgtgtataatttttgcttcagtttgcttgaatcaggatcttaataaagttcatatattacaactagtgggtatttggcataagtctcttttgatccgtaggtttcctttcattggaggtttaaagtaagggaatgtcatgatttgtgacatttttttaaacaccactgtagctgtgtgtggagaccagggagcagggggcacgtggactgagcaggagcccgtaggaggccattgcagtggtccaggctgggggtgaagggggtctgggaccacaggagaaggaaggaattggaatgaatataggacttgtttgttgaccatctcatgttctagttaaagcatactgggcttatttttcaggtctaccaaactgagttagagtatgaatgtatacatatgtaaataat

SEQ ID NO: 12004 - DNA, 1423 bp, Artificial sequence
  DNA replication origin
tgggtaataaaatgtattttgagaataagacggccttttgaccttttagggtctagggctgtaaagtgtctcagggttgctgccagaggagtcataaactgggctggatttttatatttgatgaaaaagagcctaaacgctatctgatttgggataaagaaaaaggaacattaaccttgactatgcctttagctccagccacctgtttaagaggaaattgctgggcaggtgggggagggctagtcagtgaatgaaactgtaagctggaccgggtgtgaggaggggaggtgataaaaggattatagggtggaagagcggaggctgaggaagaactgggacctagctcggccaggcgaggagcagcctggggaggaggggagaggtcagatgggtctgtagaaaaggaagattagaaagactcagcgatgcttggggttgggactgaggggacaggtgggagggaaagaaggaagatttgggacgagttgcactgggcacagagactaggaagggaccgatgtgtaaaagaatgcctgcacatcaggcacctcagaccatttgcctattttaccacaagaattatttagatcttgcaggatggaaaaattgaaagtgccattttctgtctatttggaactactgtcgagtttatattggggtcaagcggcattgcagaagaaaataagacgcttagattttaggtcaggtgagagttgaagaggttttaagttcttaagaacacaggctaaaggagaagaaggaggaatggagggtggaaggttgcccatagtgaaggaggcaagcccagagaaaagagagagtagagacatggagggaagggatttgggggttcttaccctccagaaaagcgggaaaggggtcggggcacagagatacgaggttggggcgtggaaataagggattgggatgcagagatataagaggttggggtgcggcaataagggatcggggcacagagatataagaggttggggcgcagaaataagggattggggcacagagataagaggtcggggcttggaaataagggattggggtacagagatacgaggttagggtacttgcctctcccccagaaaagcaggacttgccactaaggatgaaggagaaggggttgggggtttcttgtcctccagaaaggtggagaaggggtagagacatggagagaaggggttggggtacttgccccttccccagaaaagcgggacttgccgctaagggtgaaggagaaggggttgggggtttcttgtcccccagaaaggcggagaaggggtagagacacggagagaaggggttggggtacttggccctttcccagaaaagtgggacttgccgctaagggtgaaggaccaaggcaggcgtccctgcatggtctgacacctctgaaacctgggtgactaat

SEQ ID NO: 12005 - DNA, 1080 bp, Artificial sequence
  DNA replication origin
cggctccggagccaccgtccaccgcgtgtgcacccgagcctttgtctgcgcctcgctcaggagccgcgtttccgcggcgccttctctgggccgacgctcttccaggattgctgtttcggtttcccgctcccaactgcggctcattcccaggctttggccgacccgggtctccagggcacccgaggttgagcccctccctgcggccgaagctgctccgggctcaccgcccgctcaggcacctttggggtgcagcccccgggctggcgagcgtattcgcgccgggatcggccgctccttgcaaccccgcttcccgggcacgggcgagtccacggcggccgcgtggtcagcggcctctcgtacacccgtgcgggctccggctagcgagtcgctgcttgcgcttgattggctagcggggcgcgggcccaatgctcccgaagtcctctgacccctaagtcctcccccccggtgtctgcctcccacccccgctgcagtctaggtggggaaggggtgtggagatgggtgtgcatggacagagcatgtggccttctctgttggccagagatgtggtcagtagaagcacttttccctactgaagtgccctttggccatgcattgaaggtggtagaggatggggccccaccagctctcccggggtgttggcatcagcctataggcctggtctaggactggggttcctcctggtcccctatctggtgggcttgtgaattctttcttaagaaaataaacatctgcttttctcagttgacctttgatttggggaaggggttgaagaacgctctatcttgcagtgacaagctgctctgggggaaaggtggtgctactgaggcacgggatcgtaggcttctggaaaaagcccgcggtcctgaaatgatggggcttctgttggtgctgctgaaactgctgttggctcgtgtgttcagggccctgctggatgttgtggaggggaagaaagatcgcagctctggatagagggtggagtcctctcgggattcgtagcaggctctccctttaggaacacaatacctggagaggagaagggtctactctgcagaaaggccc

SEQ ID NO: 12006 - DNA, 1253 bp, Artificial sequence
  DNA replication origin
ccagcccgtgccggtccccggccgccgccgccgccccggctcccccttggccaggccgcccgccgcgcgggctcccccggcttccccggcgccggcccaggcggcggcggccaaactccgcggcgtccccagggcgccagcttcgccctcgccgccgcggccgcgctgctcttcggctccgacatggaagatggaccttctaataatgcgagctgcttccgaaggctgaccgagtgcttcctgagccccagtaagtggcctgctccccgttccccggaggtggggcggctcctcatcccctgggggcaggtggggggcttggactgctgggtgggaagcgggtgtcgagcgaggtgcccgtgcccgggcgtggagcgcccagggggcttctctggaggggcaggagccggtgcccctggcggagcgcgggagcgttcggccgcgcagggacgccggggtttcccaggctccgcgagcgctcgggggaagggcggctcgggagggcggcgggagcttggacgttgcgagcgggacctgccgcctccttctccgcccctcgtgccgtttctggccacacttgtccggcgcgtatttatactcaactttgtgaccacttaggttcctccctcttgagcctgtggccacttggctggagcagatgcgcttccttccacttgggggtccagcccaccgggtccctgtagccggggtgagggaggccagggcctcagaaccccgcgcttccaactgtgatggcaccgccgttctccaggactcggagtgggcgcccggcctcccaccccgcgcagtgaccggcatccagagcatggactggcggggtggaaacggttgcacctccacccaggggacgcacccccaccccgggccgcgtcctgttggtcccgggcttctctggggtccggggtggtagagaaaagggaaggacaataggtcgctagggtggaagagaaaggcgccgccgcctccgactcgcaggatgcgcccccgggcccactgtggcgtggccactcctcctcgccacccgcgggcgcggggccgagagcgcgctgaggcagaggtggcagaaaggcatgtcacgggggtgggggacaagattgagcagaaaagtcaaggcaggggttcgctagaaggaagcaggcaggcgggagacagtgaggaaagaggaggcgcccggtgcgcagaggaggggggcgtcgcggtcgcggatggagggggagcagggtgaggacggg

SEQ ID NO: 12007 - DNA, 922 bp, Artificial sequence
  DNA replication origin
cagaatctgcccggcaatcgcggagacgtctgtggactttactgggggaggggagccccagcatgtcctttgcatcccaactgctcagcttggtgcaaatacaaaagtgttattttccattggggggagtttggatgggagtcggggaaagcatcgactagtgaggaatctggagcacgcttcaaaataaacatgtgaaactggatagaaagaagaaaacgtggagggcgagaaatggccccgggacccggggcacaccgggagcccagggccctgggtcaacccagttgctgcactgtagcgcacgcctggcgcttgggtgaccgttttgcccttcgtgaaagctgagctttggcgcgtgtgctccactccggggaaggtgacctcgtccaggcagtccggacagcccgtgccaccgtggaacagcacagccaccgcccctcctcggacccagcgcgccatggtggccccgccgcgcgtgcctgcccgaacgcggacacctgtgcatctgtgtgcgctcttgcgctccaacttccccaaacttctggcggctcctagttctgagcgcccattgggcggctcatttcccttcagtggcaactgcctggattcatggctacggaagggggtgggggtgtccaagagagccgcatatggcaaggcggtctcagggtttggggcaatgatcgcacagtcttgctcatttttggccacagtttgccctttccgttctctaaccccaaccaaggcaaactgggcttgtgcacacgaagttcgttttaaagtgagtatgcgaaagggagtcctggggaggaaccgtatttcaaaccctagtttatgggaaacactgcgagttgatttaaactccaaccaaaggtccgagttggaactctctcccgggaactctgactgagcacagctg

SEQ ID NO: 12008 - DNA, 3169 bp, Artificial sequence
  DNA replication origin
tgacggtaacacccttactcacaagcaagggcacattcaatgagaaaataatttacattatttttatctgatgacttttattgctaaacttaagaaccccaccaaaagctcctgatttattcaaaaacgttatgaaatgggattattggaactttggaagcaaattttctaaaatacaaaacgaaaagtgcttttctctgtttctaaggtagagaaagtgacgaccctctttaaaagggatcagtttgcgtatttaggtgtgtctataacaggaaaacatcgtaacatcttagttgtctgtttttatatattcacaaaaactaaaaggactttgcacttggccagtggagggctccgtttaggtgagagcgctacgcaaggggtgaagtgggttcattcttctacaaatatgtttttgcccctgctatgtgtagctttgtcctagtaatgcaattaggaccaagatacagtccttgtgtccaggggttcatattctacttgaggaagaagcactcaggaagcaaacattcgctgtagcttcagagagtggtcagtgctgcgtgggcttagagcataagtggcatctctcagagtggcggcgctgttagaaataggagcctgcacgtgaagattcgagtgagcgtccagtggagagaagagcaggcgtcaaggcactgaggcaggtctgagttggtatgttcagggctgagcaaaactgtgagatggcctaaatgcagccagcaaggagaaagcagaggtgaggccgtcacagggattggaaggggcaagttcttacagtccttagaggtgataggtcttgatctttaagtagtgggaaagctctggaaaatttgaagcaaaagagtgaagcaatgcaacaggtagttttcaaagaccactcagtcttctgtgaaagggaccgcaggacagcgaggctggaagcagagatgccgggaaggaaagagccatggttgcggctcgcagagggagagcctggcagcatgggggtagagagtggggggacagtgccgcagcatgggggtggagagtggaggcgggggagagccgcagcattggggtggagagtggcgggggagagaggcagcatgggggtgtagagtggagggagcacagcagcatggaggtggagagtgtgggggatagcgcggctgcatggggatagagagtggaggggagggagagcgaagcagcatgggggtggagagttggggggagcgcgggagcatgggggtggagagtggagggagcccaaaagcatgggagtggggagtgggagggagcatgacaacatgggggtggagagtggagggagcgcggcagcatggtggtggagggtacggggagagcgcggcagcattggggttggggagagagcaccacagcatagcggtggagtggggggagagcgccgcagcatggtggggagagtgggaggacagcgtggcagcatggggatggagagtggggagagagcacgggagcatggggtagagggtgggggcagagcagggcagcatggggcaggagagtggtggggagagtgcaggagcatggaggtggagagtggggacagagcgtgggagcatggaggcggaaagtgtggggagagcacggcagcatgtgggtggagagtgggaggaagagcgcggaagcatggcggtggagagtggggggtgagcgtggcagcatgggggtggagagtggggggtgagcgtggcagcatgggggtggagagtggggggtgagcgtggcagcatgggggtggagagtggggcgtgagcgtggcagcatgggggtggagagtggggggtgagcgtggcagcatggcggtggagagtggggggtgagcgtggcagcatggcggtggagagtgggggtgagcgtggcagcatgggggtggagagtgtggggagagcgcggcagcatgtgggtggagagtggggggtgagcgtggcagcatggcggtggagagtgggggcagagcgccgcagcatgggggtagagagtggtgaggagagcgcaggagcatggagagggagagtgggtcggccgggtcgattggatgcaaggaggcattcctgggttggtttcattttgctttgtgtttttgccctgggcctatttgttctgatggggaggagcacggacgatgcaggcgtgggggtggaggcactgagaaccgtgtttggggatgtgctgagagtgcggagcctgataaatatccgtccagaagtccctgagcggacatgaaatgcagggttctggtgcagagggcactgacaggagatgaagatgcaaatgtgggtcctgggaagatgcatgaacgggtcctcctggaggagatcaccttgggagggcagcctcagcaaacagggcacagtgaggctgagagggatgggggaggcccggtgtgacggccagaaaccaagccaggaagcctctccaggagtcagtgagcagctgtgagaaatgctggacggacggcatgagttaagcaggtggagtccgtggtgacctgaccggggctctgcagtgtggccgccggaggtgcctgacagcccagctcccggggcttccaatgcgagggcaggagtggagccagcacgtgcagacagttcttccagaaagttctgttttaaagaacagagaaatggaaggatagctggcaaggaggcagaagtcaagagggttggtttgtgttgagtttttaaaaatctggggcggggcagatgggttgagtcctatgagacgcacatggcgatagtctaacagcacaggggaatcttctcttatctgcaggaggttaaagagcaaactctgcccctttgtgttcagccttgatcatagggaagggctgctgagctgtgtattcaagatcccctaaaggaaaagagcacccaggaagctgcagacacacacacataaacacaatctcacacacacatacactttcacacactcagtctcccacacacactcacacatacactcatacacacacgcacagtctcacacactcacacacatgctcacatacgcttacacacacacgctcacatatacccaaacatgcgcacacacacaacacatgctcacacatgcacacacactgtcacacactcacacacacacagtgcaagcatgtcca

SEQ ID NO: 12009 - DNA, 1105 bp, Artificial sequence
  DNA replication origin
agatgttgcaagtttccctccagaggtgatgcttgttctagtctcttcagagccacctccagaaaagtcagttcaggtccctgaagatgacaggagccattgccgggaagagtggggtaggtagatgcagaaaattcactcccttttttgacattaaagtgacagccctgttttgacagagccctgaaataagcccatgtcacataaggttttcttttataatagagtatctatataatttgaatatttttctataataggattgtgtgcagcacgaaacaataggcacattcatgtttattcatgaacagtcctgtgggtctttctcatcagtactgtaagttcctattcaagaaagttttacttacgcccaactattgataaaattaaacgataaagtcatcccttcacttaagacctgccttttaaagtatgattgtgtcagggagacatcaattctcagggaatctaattgtttcaaaactagtggtttttttgtgtgggtgaaatgagaaaatattcctgtcagtgtgtgagttattgagtgtgtgaatgtgtgtgagagtgtgggttgtgtgagatacatgtgtatgtgagtgtatgagtgtgtgagtgaatatgtgtgtgtaggaatgtgtgtgtaagtgaccttgtgagtgtgtaatgagtgtgtgtgagggtgtgcgagtgtatgagtgagcatgtgagtgtgtagtgtgtgtaatgagtgtgtgcgtgcatgcatgggcatgtgagtgtgtgagtacaagtgagtgtgtgagtgagtgtaggagtgtgtgatgagtgtgagcatgtgtgagtgtgggggattgtatgagtgtgtgtgagcatctgtgtgagtctgggtgtttatgagtgtgtgatgagtatgtgtgagcgtgtgtgagtgtgggagggagtgcataagtgtgtgatgagtgtgtatgtgagtgtgagcaggtgtgcgtgtgggagggagtgtatgattgtgtgatgagtgtgtgtgagcgtgagtgcgtgagtgtgggagggagtgtatgagtgtgcagtgagtgtgtgtgagtgagtgtgagcgtgtgtgtgtgtgtgtatgcctgcgtagaac

SEQ ID NO: 12010 - DNA, 1754 bp, Artificial sequence
  DNA replication origin
ggagccgctgcctccagggtaggcttcgtccagggcgcacagtgggtgccctgcgacccgaggcctctccaacttcgcgaggaagaaccgcgcgtcccacgccccgccgcccctccgcgcgccccacgtccctccatgctcccctccatgcgcccctctgctcgaccccaggccccgctgcccctccgtacgccccatgtccctccatgctcctctccgtgcgcccctgtgctcgccccacgcccagatgcccctccgtgcgcccctatgctcgctccaggccccgccgtccctccgtgcgcccccacgtctctccatgctccccacgtccctccatgctcccctccgtgcgcccctctgcttgccccacgccccactcccctccgcgcgctggcgcgtgactccacgctgggagcttcggagctgcagctgtcgccgcccacgcctgtcagtctccgcccgcggcccggccccggggccgtcgcccagtcccccgccgccgctccccgaccccgcgctcacccctcacccggacaccctcccacctgcagccgagccggtgcctctgctcttccccttcgcgaccacgcgctctgatcccaccagccccgcctgcaggccaaggcccccgggtttccagggccccaggtttccaaactccggcgctccttggctgctcggaggaaactaacctgcagccacttcaccacgacctcttcttcctggcctcgtttctgtggttcgcgccaaacatttgattcaccttctaattggtctctctccccaccgcacaatacaaggacgtgaacattcttgttttctcagccagcatagggccaaaaacaaaacaaaacaaaacaaacgaagcaaacgaatgctcgaaagtggaaaaattataatatcgcaatggaatttgaagcacattcctgtagcagctgtcaacattttaacgtggatttggaagaaaatactacaatttgaggatctttgaatataagatgagtcattgttttgataaaattttttccttgaatcttccctatcaatctgcccatcagcccaccccccaaatacacctatttccatgatgtcttagtatttaactttttaaaccgatgtgttgttcacttataaagtgaaattaaattgactagatcttggttaaggacgggttccttcccgtctttcattcatcagttccttcttcaaaagcatccaccttgcaatttgtgctgtcaaaaacggtggctcgctcattaagaaaaatagaggccaccagactggttccatggcaggcagattcagatgccctgagaaggcccagatgagctggggttggggagatggggagggaggcagatgatgagaccaacttaaagcacaccttgtccctcctacaccaagtagtttccaggtaggaagatggaagattctgtgagttctctaactgtgcctgcatgtatggaaaagtatacaaggagggttgggtacacatctcctccacagacatcttgtgaatgaaacatggcaaagtgtatggccaaagaagactttatgtgattgtcctaaataccatatttatttttagcaattcactataggaactgtctcagagacatcactcgttcacccagtcactcagacttactaaattcccaccttgttccaggctaggttacaagctgggcacagaaagatgaacaggactcattcctacctgcaaggagcctatcatttaatactgggatgtagac

SEQ ID NO: 12011 - DNA, 1074 bp, Artificial sequence
  DNA replication origin
cgtggagtcacgcgccagcgcgcggaggggagtggggcgtggggcaagcagaggggcgcacggaggggagcatggagggacgtggggagcatggagagacgtgggggcgcacggagggacggcggggcctggagcgagcataggggcgcacggaggggcatctgggcgtggggcgagcacaggggcgcacggagaggagcatggagggacatggggcgtacggaggggcagcggggcctggggtcgagcagaggggcgcatggaggggagcatggagggacgtggggcgcgcggaggggcggcggggcgtgggacgcgcggttcttcctcgcgaagttggagaggcctcgggtcgcagggcacccactgtgcgccctggacgaagcctaccctggaggcagcggctccgagggacgccggaaggaacggccgctttcctcagggtccccgcctgcacctgcgggctggcagatccggggcgtcacttctctcccagggccccggagggaggcggaagaaggcgcaggtgcgaaggatgaaaaaccaaaaccaaatccaaatgaaagtcagtgatgtttgaaagtgggaaagcccccagtggaggacaaaggggcctctcccagccgcgccacgggccagatgtccctttctccaccaagagcccctgtttccagacccaccccaccttcgacatcatttaccccagccacttccccgaccctcggcctccttcaactctatgtacaggtatatttaaaacgttttgcaaggcgagaggggagagaacgggccctcagtggcctgagatagacgctgagtcagggacccctctggatctccccagttcactggctggtctttagttcatcaagatgaactctcagaggtaaaagaactgctgcctttctatgattcataccgagttcggggccagaaagctggtggatgaggacatgctctaggaggagccgggctgatggatctgggtggttgctctggccccgttcctgggaaccccacagagtgcacacgacgccatctccccgagccagttccaacctgtaaggaagaatc

SEQ ID NO: 12012 - DNA, 1181 bp, Artificial sequence
  DNA replication origin
aggtaaccatttcgagtgctgtgtcctacagtatgctagaacggcaagtgtgcaccttgaagacacacagagcttctctgagtcttcccacattcatctcctgcagttttggtagcttgggaggtggtgtaatttgtgaggtgagccagcgccttcaagtgcccagtcatgtgcaactgctgttcttaaggggacatctgctttttcttatatggtaatgactacaagtgattgctgaggaaagggcaagtaagcaacattttagggaaaaatggatcagctctagaatggagcaaaaggaaattcttgctaagtaaaattaaaaatgcatgatctccaatgctcttgttgctaagaggtagtttctaagctcaagacaaggaaacccgctccagtttgcctggactgattgcaggtacctgtgtgagggagataaggatggagctggggatgaagacaggcatgtagataagggtggaggtggggatggggatgggataaagatgaggatggaaattgggatgaagattaagatggaaattgagatgagcatggggatagagagagatggggatgaaggtggagatgggaatggggatggggatgaaggtggggatggagatgaagatggagatggacatggagatggagatgggaatgggaatggatgcagatgaggatggagatgggatggagttggagatggggatggggatgaagacagagatgtagatggggatggaaatgaagataagaatggagatgaggttggggatggagttggagatgggaatggggatggagacagaggtgcagatgggaatggagacagggatggagatgataagaatggagacgagattggagatggggatggagctggagaaggggatggggatggagacagatgcagatggggatggagacagggatgaagatgataagaatgaagatgaggtttgagatggagatgaggatgaagatagagatggggatggagatggacacggacatcaggatggaaatggggatggcagtgatgaggatggagcaatttagagaaatagagagagcccttgaaccaggctgaggaagctatttcaattcccactgtggacttacgtagagagcactctcatctttcggaattgtttctccataggaattggggactggaactc

SEQ ID NO: 12013 - DNA, 1485 bp, Artificial sequence
  DNA replication origin
aagaggggaccgcgggtcccaggggatgcgggaaggtttgtgaggcggctgcgcccctgcctggagagggaggcccagtttaggcgcgggggaagaggaagaggaatgaatgaatgaatgaatgaatgaatgaatgaatgaatgaatgcatgaatgaatgaagagggaaggaggacgggccagccctggacacccagtaggtaatggccagggaggtaaatcaagtcctgggagaagctgaggactgaccgcagacccgcccagaccctttcccgcggggcccacagcagctaccccagggcagccaggttcaccgggcagccccagacccagaaggaatgaacagaggcggatgggtggagcaggtgctggtgagggcaccagccttcgaggggactcataggcggcgcgggaagtggcggggggggggggggactcaggggcgctgcctcctgtggatcacctggtagccttgggtgccagggtgaaggccgcccatggtcaggccgcggactgtggtctgcccagacatggccggggctgcagggtggacgtgagtctgcccggcctgagatcgcccctgccccctaacagtcattggccgcctcttctgcttgacagctgcacccccacgcagcccgggttcatgtggggagcatttggagcacagttccacccaaggttaacatccactttcctcatgaaagaggaacagaaaccaagaataaccacaatttctgaagacctcttggaaatcgggaattctagcttcccagttccaaggataaaagttggcaatgaatcccttaagtggtggccatgaacacacctaaaactttcaaacggacaccgaggagcccgcaacgggtgagcctttgcaatttgaaaacatgaataagagcacgtcaggcagttcttgtctgggcggctggtcaggtccaatgggcacagccactttgtgcatggaggaaacgtcggaagtgtcaggaagccccgctttctttctttctgccacattttctgtgtgaaatgtttctactgatttaatgccagcagacctttcaaatgggaagacgtattggtgtcttattccactaaattctatctaaaactttctttacttcatgactcatcagagattgatgaggggccaggactcagccttgaaaaatggctaggctggggcatcgaggagtccctggctaggaaggagcctcaaggcctctgatgcaggggctccctgagggctgggctgttgtggaaattgtgctggagaggaggactgatgcttagacccagtggatctaaatctctgaagaaagggcctggaaatccttgttttcaagctcccaggtatttctgtacacagctgggaccagggaaagaactcaagccctcatctagataatgccttcatcacagggccgcaccaccccctgcctgactctacggtgtcaccagcccttctggtagaaggtcctccct

SEQ ID NO: 12014 - DNA, 1441 bp, Artificial sequence
  DNA replication origin
agtgatttattgtttgtcatccttctctctcttgaccatctagctaacactttccatcttaaaaaagtaaatgctattgacagggtcaggccaccttcctgtcttcctccgcggtgtggtctttccagtgattgctgccatcaagtgggaaagagagaaacagcaggctccgcacgtggggaaagtctgggggtgactttttacttgcatgatgacaacacagagaccctggcttctgtctaaatgactctaaatgacattcagctaaagtcacacaggatgagggaggagtgagggagaagtcagtgaggagtgagggaggagtgaggagtgagtgaggagtgagggagggaggagtgaagagtgagggaggagtgagggagggaggagggagggagtgaggagtgagggagggaggagtgaggagtgagggatggaggagtgaggagtgagggagggaggagggagggaggagtgagggaggagtgaggagtgagggagggaggagggagggagggaggagtgagtgagggaggagtgaggagtgagtgagggaggagtgaggagtgagtggggcgagagggagggaggagtaggtgagtgaggaaatgattggtgcagtactcagcctcttgggtttcctgcaggaaatcttcctgtgccgtgttagtctagagggtccatagtttccgagtagagtcatagtcctgtcatggaggacacttgaggggaaacagaaggaggatttctgagattggtatttttttgctgccaagaacaggagaagcctaggaaagcaccagtttatgctcattttctaacgtgtgcctggatggagctagcagctctaacatatcccctcaatgacggcaactccatcagaaagcttgctgggttccctgagtgcagatgtaagcctggagatattcccccgtgaacccaatggtgtggcagagccaatggcttttcccctttggaagctggcacagttcaccaagaagactgagaacgtccttgcttagggaggtgttgcatatgagagtgcagattgggaaacaactagcaacagcgcattttgtagaagtaacaatgtgtgcaaataattcattatctaactaaggctttctctccttcctgctggcacctgtggtccatattcctccataggcagcatcacaccatgatttacaccatagagcctgcatgatatcaatcccaaggggcaaaaatgtggttctaggggtagcagcaaaaatattagttactaccatggtttgtggtcctctaaagctcaatgcttcccaacaaaatgttacttcttagtttttaagttctgtctttggattctctttggtaatccataggcagcattgatattcagttcataaaagatacacaaaaagtatgcaagatcaggaattttaaaaactaaggtaaatag

SEQ ID NO: 12015 - DNA, 851 bp, Artificial sequence
  DNA replication origin
tggggggaggggggacgggacagtgtttgcagtgtttggtgaggatgcgatttcaatgggttgcaaggaaaattgggtggcatgaagaaaataaaatgctgcagaatgcaatctagtgatgctttcaggtgctggggactccggaccccctcctcccctatgacatcacaggatcttttgcagaagagactggggaggtggggggagagaagagagtggcggcagaggcgaggatcaaaagagcagggggtcctgtccccactgagaactggagaagggcggctggctcgggaggaaggaagttgcggtgcacacaccatcccttctccaggccgcctcgggaggcacctgcgggtctggcgcggcagccgctgcggtttgcagctggcgcgcagccctcgctgggaacttggagctctcaaactcctcggatcaagcgttagccccgaggctgtcagttggcgctggggcgggctgcagtctctctcccctcctctgcaaacccttgagtcttcggctttatatactcccttttcttctttctcgagtccactcatcaccctttcccccaaacagtcacctccacaagcacaacacaccacacacgcgcacacgttttcttattgccaaaaagggtggagggaaaggacaggaagtttttttaagtacacgcacacacacacaaagattgggactaagtttttctggactctcaagggttaaataataggtaaaagaactgtcaacttacccgccaaagtatgctgacgcgcatatctgctttccgcttcatttcgagttcataaatttaaaaagagacagtgagagaaagaaaaagaaaaaaaaaggca

SEQ ID NO: 12016 - DNA, 874 bp, Artificial sequence
  DNA replication origin
gccaggagggaaggaaacacagcattctctctgcccggctgcccatttagcactaggtggattattaactctctaaacaatgaagaacacactggacttgaagagtgagtgccaacagggaagggaagggatggcagcggaacgtgagctcaggacaggctctaagctgggccttgggacccatctcttgcccagggaaagggggtctttggagaactgttagctccctcagaccaaatgcattcccaccacagccgaaaggcctcccaggaactagagcagtccacgagtgaggcccgggaagaggagtacaggacagtctgcagatacagggggtctcaggtgcagctcagaccttaggaatctgaatattcccccaaggcccattccaccccatccatgcctgacaaaaacactccgcttcttgatgaggaaggaatcattacccggggcccaactggactgcccccaggggtgtgtgtagggggtggggggtgagtgtggttgtgtgtgtgttgtgtgggggagtgtggttgtgtgcggggtgtgtggttgtgtgtggggttgtgtgtggagtgtttgtgttgtgtgtggtttgtgtgtgtgtgttgtatgtgatggtgtgggtgttgtgtgtgatggtgtgtggtggtgtatgggatgtgtgtgtggttgtgtgtgaggtgtgtgtgtggttgtgtgtgggtgtgtgtggttgtgtgtgtgggtgtgcgtggttgtgtgtgtgggtgtgcgtggttgtgtgtgtgtccgggaatggcaggagagggccgtcacagttaatgtatatgttacactcagagaagactcttaccaccaaagctcaattatttttcaaactctaaatgcagac

SEQ ID NO: 12017 - DNA, 1523 bp, Artificial sequence
  DNA replication origin
gcgggctggggcgggctggggcaggccggggcgtccagcttaccttcctccggggcttgccccgccgctttgatggaggtgcaaacatttggagaagggcgggggtgtaggggctgggccggggctcgcagggctggggccccggatttacatgaaacaggcgtgcgggagcccattgttggcccccggcctcccagacccgcccggctgggtctgatatggccgctctcggccaatgggaggctgcccggcacttcaaagcgtgcgcggcccaatccgccgagcaccccagcgctgccgccgcggctctatttatggggagggcactgaatttcggtccccagagacctacactagtagagccttggggagttcaagtggaataacttctccccacccctctgcccccgtcccctccccccaagtcttggtccgcgccctcctcccgggtctgtgccgggacccgggacccgggagccgtcgcaggtctcggtccaaggggccccttttctcggaagggcggcggccaagagcagggaaggtggatctcaggtagcgagtctgggcttcggggacggcggggaggggagccggacgggaggatgagctcccctggcaccgagagcgcgggaaagagcctgcagtaccgagtggaccacctgctgagcgccgtggagaatgagctgcaggcgggcagcgagaagggcgaccccacagagcgcgaactgcgcgtgggcctggaggagagcgagctgtggctgcgcttcaaggagctcaccaatgagatgatcgtgaccaagaacggcaggtgggtgcgcgtccggagcccgcgcgcgccgcgctctccagcgcctgggcagcctgggggacctggcaagttcccggaggtcgaaccctttttctcctggaggagggctttgtgtttgttcccgctctggttaactccctcgagtgcatttctacaagcccctcttctggggctttctccgcggaagcttggggaggaggaacgcgcacttcggtgtcccgacctcggaggcatcccgggacccgcgaggcgcgccctggtccccgcctgtccccgcgggatgtggcctcctgcactgaaacccttcgccaggtcctctcctcccctccctcccgaggccgtggagatggtgaggaggccacctggacctggcagggctcggggaagggggagcttgggagtcaccctcggacgttccccagggggctcctctgtgccccgaaataactgaggcctctgtgcccagcttctgcctccggcctacctggtcagtgtcggggtcctcctgcgcccgccccgtgttttccaggaggatgtttccggtgctgaaggtgaacgtgtctggcctggaccccaacgccatgtactccttcctgctggacttcgtggcggcggacaaccaccgctggaagtacgtgaacggggaatgggtgccggggggcaagccggagccgcaggcgcccagctgcgtctacatccaccccgactcgcccaa

SEQ ID NO: 12018 - DNA, 1386 bp, Artificial sequence
  DNA replication origin
cctccccataaatagagccgcggcggcagcgctggggtgctcggcggattgggccgcgcacgctttgaagtgccgggcagcctcccattggccgagagcggccatatcagacccagccgggcgggtctgggaggccgggggccaacaatgggctcccgcacgcctgtttcatgtaaatccggggccccagccctgcgagccccggcccagcccctacacccccgcccttctccaaatgtttgcacctccatcaaagcggcggggcaagccccggaggaaggtaagctggacgccccggcctgccccagcccgccccagcccgccccagcccgcacttccgcgaggggctgcccggcagcctgcgatgctccctgattcccgcgcggggtcctcctcgctttcccagcgcgcccggatcccgcagccgcgccaggctggaacgttcgcgcggcctcacctgtccccgctccaggcgcgcctccctcccctcccagggacgagcgcatttggccgggctttgggatgcgccgcgctcgtctcgccgcagtagtagtgctgttctcgcgcctccgatgcctcaactctccagtctggcagtttccggtgcacctgtccccacacgtccctcgcccacggagccccaggcggcgttacgcacacccaggatcgtggatcagcctgccccggcgtcgggtgtccccgcggctctcaccatctggaaaaggaaggtccgcgcgcagagagggaaatggacggaaataagcaaaagcaaaacaaccccttctgagaagtgtcctcctcgctctcttataaaaacaggacttgttgccgaggtcagcgcgcgcatcgagtgtgccaggcgtgtgcgtggtttctgctgtgtcattgctttcacggaaggtgggagaaggtcggggctggcggggtggtccggactagtgggactcggggcgctttccccgcccggcccagcgccaagcggtgtcggcagcggttgttttattacctttcggtgagaacttacgcgaggagagcgaaggagaggtgacaatgagcaggaaatagttcagtggggtctctttaaacagtaacattcctcctaaaacgggagcccaggaagggggaaggaggcagaagctcccccttccaaggcctggctttgcgcttctgcacacctcgcccattcgctggacgagggcctgcctcgggtagcagcctctgtttcccggtctcctgagcgggcaccccagccccaacccctctagagaaagcctgcgcatcgggtggggcagcgagttcagaggagtcttgcgccctagcaagggggctttcccgcggacatggtatctgcgccccgcgctaagtctcccctgccccctgccccct

SEQ ID NO: 12019 - DNA, 912 bp, Artificial sequence
  DNA replication origin
cgaaggagaggtgacaatgagcaggaaatagttcagtggggtctctttaaacagtaacattcctcctaaaacgggagcccaggaagggggaaggaggcagaagctcccccttccaaggcctggctttgcgcttctgcacacctcgcccattcgctggacgagggcctgcctcgggtagcagcctctgtttcccggtctcctgagcgggcaccccagccccaacccctctagagaaagcctgcgcatcgggtggggcagcgagttcagaggagtcttgcgccctagcaagggggctttcccgcggacatggtatctgcgccccgcgctaagtctcccctgccccctgccccctgcccctcgcccctcgcccagccgggctcgctccggggtcgggaattgctggggaagccgaaggagggatccccgcccgggactcgagggatcgacccgcctcgcggtatgcggagggctgccaggagccagtcccggggaagggtgcctgccgcccgtgggggacagggctccttctctcccttctccaacttacaccgacgagtcaggaagccggagcgtctagtccctgtccgcatttctcagtgtcttttgatgtctgggatgcatggatattcccagggggctgacccgaggtggggaagtttccttctagaaagaggcaccaaaaggacctcatttgctcctgacgccggaccctcctgacacgccttcactggctcatcgggtcctgggctttgggggagagcgtggtgcgtgttactctccttactccgggtattaaaatgtctaagaggtcatcgctttggcccaaggcctcccgaggataagataaaagggaaaagtggaggggaggtgaaggaggaacgagggtgggtcccaggcaattgagggcctcgg

SEQ ID NO: 12020 - DNA, 740 bp, Artificial sequence
  DNA replication origin
acacccacgcctccctggccaggctgctgccacttgcttggcaggggctgctcatgcctccagtgttctcacagaactggctggttctggccaccagccaggctgctgaccccgaaaatggaaaaagctttggggtgatcccaaactccctccaccgaacccatgagcctgcctgcacctcatctgtcctgttggctggggctggggaattgggggtggtcgtgaagggtgggaaagagggtcttccttccccagcgtcctgttggctgaggggggtgttgtgggatgtggaggaggggctcttcctcctccagggtcctgttggctgaggaggggtttgagggaggagagggtcttcctccccaaggatcctgttgtctggggtgggaggggggctcgcgagggggtgggggagagggtcttccttcccctgagggaatgggggatctggggggaggtatgaggggtgggggagagggttttcttccccaagggtcctgttggctggggagggtgggtattaaggggctgaggagagggtcttcctcccatggaatcctggcctcaaaagggtctttcttctctggatatcaagtttctcggttttaaaactcaaaggatgaatctaggggatcaccaaggatttacacagcctggggtatctctgttcgttcgtgctggttacccagggcaggcacctggggcccagcatatgttttgggggtaagcgcttcttgggt

SEQ ID NO: 12021 - DNA, 1097 bp, Artificial sequence
  DNA replication origin
cgtgcggcacgagccagccagtccgcgccaccatctctggccctgcgccctgtcattggccgagagccgggcggcgcggcgcggccgtaaggcgtggccgggtgtcgtgaggcgggccttcgggctggctcgccgtcggctgccggggggttggccggggtgtcattggctctgggaagcggcagcagaggcagggaccactcggggtctggtgtcggcacagccatggcgggcgcgttggtgcggaaagcggcggactatgtccgaagcaaggatttccgggactacctcatgaggtgacgagcgccgcaggccgaaccccgcaacccggaggggctcccgggaggctgcgacccgtgcagtccgcgacgagggcggccgcgaggacgcggtggccccgggcagcgggtgggccggggcccaggcgagagggtgcgcttgtcaggggggccccacccggatccctcccggaccgccacaccccgaagcggacggcgtagagagccggtgacagtgggcgcctttcagggcgggggtgacagtgggcgcccctcagggcgggggtgacagtgggtgtcctctcccggcagggtgacagtgggcgctcctcagggcgggggtgacagtgggtgtcctctcccggcagggtgacagtgggcgcccctcaaggcaggggtgacattgagtccccttcagggagtgggtgacggtgggcgtccctcctggccaaggtgacactggggacgcctctcctggtaggcataacagtggacgcccttcccggccagagtggcagtggggacctggagggacgaaagcgacggcgctcctcaggacagggtgaccatggggacgcctctcccggcaggggtgacagtgggcgcccctcagggcagggtgacccggcaggggtgacagaggctcgttcctctcccatggttggcagtgggcacgtccctccgggccagttgacagtggctcgctcctccgggcgggagtggtttcctggccggtttctaccagatcctcggagtgggtcgccggtcacctgcggccgtccaggtgtgccagaggcggcgacctgggtgtggggtggg

SEQ ID NO: 12022 - DNA, 1598 bp, Artificial sequence
  DNA replication origin
cccgccctcggtggcgcacgggggcggggcccgctgccgtaaaacggctggggctgggccggggctggcaggcggttgctaggctccagcggctcccggccagcggggacgtggaggtgacatttctctgacccacaggactgtgggcgccctgccgagcgtcgcgcggtcttggggcgacctgcagtggggcccctgcggcgcagcgcgcggtgggactggccgggttcccgcgccgcccagggcctgtgtctgcgccggttcctggcaagggcaccttggccgggcggcccgcgtcccctgcgcttcccacacccacgtgggcggacccggcccgcaagctgggccagcctgcggtttccgggcactggggagtgcgcagagccccgggccagcgaccgcagccggggcccctggcttctcccgagcactttcccccggaccggtccctccagggtggcgggcggcacccagggccggcgctcctcaccaacgcgctgcagctacgggctcaggagggagccgcagcgtcggaggaggaaagcatttaagaatagcacaaagccttaggctcgaggaagcgtgactgcttacgtgttgaaaataaaggttctgtaagtcccaccgcgggtgcatattgaaaagaaagggatcattagcacgcgaccctcgcctaggagtatataaaccgcagcacgactttcggatcacaaaggcagagaaaagaacacattgaaggcttttgctcacttttccaagttgtttcgtttcgttttgtttctaatgtggacgatcatttaaaatgcctctggtggccgggcgcggtgactgacgcctgtaatcacagcactttgggaggccgaggcgggcggatcacctgaggtcaggaattcgagaccagcctgggcaatacggttaaaccccctctctactaaaaataaaaaaattagctgggcgtggtggcatgtgcttgtagtcccagctacttgggaggctgagacagaagaatcgcttgaacccgggaggcggaagttgcaatgagccaagattgcgccattgcattccagcctgggcaacagagcaagaccctgtctccaaaaaaaacaaataaatataacaaaattcctctggtagccgggtgcggtggctcacgcctgtaatctcagcactttgggaggctgaggcaggtggatcacttgaagtcaagagtttgagaccagcctggccaatatagtgaaacctcatctctactgaaaatacaaaaattagccaggcgtggtgatgcgctcctgtgatcccagctactcgggaggctgaggcgtgagaatcggttgaacccgggaggtggaggttgtagtgatccgagattgtgccattgcactccagcctgggcaacagagggagatcctgtctctaaaataaaaaataaaagaaatgcctttggtgaacaggaattctcaacattagtgacccgcagtgtattagtgttaataatggacatcccctttgatccagcaagcccatctagagatttcctaggatagacaagccagtttgtgcaatttcatgtgtacagcattgtttttagtatggaaaga

SEQ ID NO: 12023 - DNA, 938 bp, Artificial sequence
  DNA replication origin
actccagacctcgtgatctgcccacctcagcctcccaaagtgctgggattacaggcatgagcccccacgcccagctggatccacagttttaacctgtgactgccgaagtgtatacatttttctactttcatgccctgccagtcctgtgtgtggaaattcaagttttccagtggttttttgaggtgggagaggtgggagcaagaggaggaggaagtttttcctaagaagtccagctcagctcagacctttcatgtggctcacacgcgtgtctgtgttttctcactcatggccaatcgcgccgcctttcatccagcccacagccctgccaagggcctgcccgttgcctgagtgtatctggagttcaagaaaacacaaacagataagccatctgcagtgctcacattccaactggagaaataggctaaaagagagggaggtgggtgggggaagaaagggagggagagagagagaattactgcatccaaaattatgctaatgacagaagggccagtggcagagagctgggagggagccgacctttgatggtgggtgaggtcgctcttgtggacaggataatcagggcacctctctgaggaggtgacatctaaatcaggagcagaggcagaggcatgggaaaggtgctccaggcagaggaggcagcagaacaaagggccccgcatgtcctagtagcctcagggagggaggctagtatgagggttcggctaaaacttgagcttggagcaactctgtcacctgcaaggacaaggaagcttgaagcgtctgcatggtggaggcaccagcatccacgaccagctccaatatgggaaccacatggtcagcctctgagattttggaaaatcatgccctttaggcaaacagctgttttctttttgagaaatgtatttctcctgggccctggaagactaaatgcctggtcc

SEQ ID NO: 12024 - DNA, 1180 bp, Artificial sequence
  DNA replication origin
gcccagccaacgagctgatgtacccagcaggggtccctcaggaggcagaagtggataggtgatatccagcaggggtccctcaggaggcggaagtggataggtgatatccagcaggggtccctcaggaggcagaagtggataggtgatatccagcaggggtccctcaggaggcagaagtggataggtgatatccagcaggggtccctcaggaggcggaagtggataggtgatatccagcaggggtccctcaggaggcggaagtggataggtgatatccagcaggggtccctcaggaggcggaagtggataggtgatatccagcaggtgtccctcaggaggcggaagtggataggtgatatccagtggctgggggcgggggtgggggcgggggtgggggtgaggggcaagcacaggtgtgtgctgtgtaagcaggtgcccaggcccctggagaacctcccactgcactttccctgtggcctcagcaaggaaggggccctcgctgactggatgagtaggagggtcccccaggcctggtctggtctggagagagctctgtacatgtgtggaccccagtatgtggaccacatgctgcttctgctccagtaacacctgtgggttaactcggtgcttctccacatggtaatcacacagtattgtttctgaccaggaacctcacagcaacgtgttatgtgctgagtatctgggtcctcccaaaattcatgtgctgaagacctggccccctgcgtgatggtgtctggaggtggggcctttttggggagggttaggtttagatgagatcatatgggtggggccccatgatgggactagtgcccttgtagaaaaggaagagaaacctcttcctacagccatctctctctgccataggaggacacagtgagaaggtggctcttcaagccaggaagatgtccctcaccaggacctacatttgctggcaccatgagcttggacttccagcctccaggatggcaaggagtccatgtgtgctgtttaagccaccccttatgtgctacttcgtcccaactgcccaaacctggagcaagggaatgaatgggctgatacttccaggattcatgggtctcaccatgttcaggaactgtgcctctttagaatgagatgcggcctactgaggggtcctcacagccctggtgggactggggtg

SEQ ID NO: 12025 - DNA, 2476 bp, Artificial sequence
  DNA replication origin
gtcttgaactcctgacctcaagtgatccacccacctcagcctcccaaattgctgggattacaggtatgagccaccacacctggccttatcctcggcatcttttaagcctttcatctaaaaacattattttcaaaaacatttttagcattttcacattttccactatcttggtatcttatgcagggttctccaaagaaacaaacagaacatgcgtgcgtgtgtgtgtgtgtgtgtgtgtgtgtgtgtgtatagagagagagatttatttgtaagaaattggctcacgtgattgtggggacggggaagtctgtgactgcagggcagccggcaggctggagccccaaggagaaatggatggggcagttgcccaccacaggctatctgccacagaattccctcttcctcaggggagcagtctttttcctaaggaggccttccactgattggatgaggctgacccacattgtgcagggtaactgctttactcaagtcgactgacttaagtgttaaccacatcctgaaaaacaccttcacagcaacctctagactgggtaacataacccagccatgatgacatataaaattaaccaccatgcttttagtgatattgcagaatgattgccctgcatgttcataaaccaaacaaacaagtagagctcttgtccagaggtatacttctgttcttgtaaaatactttgaatttggccttgtctgcagtccacacagtttatgaccggccttatttcgtttgcccatcagacgcttttttacttggcatcatcaaattcctctctaatccaatagtaaatcataatccagccactggtaagcagcaccaacagctgttcccgtgttcatgtaaaagggctgaaagagaaggagtcaggggctctgattccaattctgctgttgacatctcagtgcaacttcatgcagtgagcgtggaggtgatgattgtagagatgatggtggaggtaatggcgggaatgatgatggaggtgatggtgtagggatggcagaagtggtggcagaggtggcgacagcgatgatggaggtgatggtgaaggcatggtggagggaatgattgtggaaatgatggtggagataatggcaggagtgatgatggaggtgattgtggagggatggtggaggtgacgattgtggagatgatggtggaggtaatggtgggagcagggatggagctgatggtggaggtaatggtgggagcagggatggagctgatggtggagggatgacagaagtggtggcagaggtggcgggagtgatcgtggaggtgatcattttggaggtgatggtaggaaatgatggaggtgatgaagggatggcaaaagtggcagaggtggtggcagtgatcatggaggtgacggtgggagtggtgggagatgatagtgagagatgatggtagtgattgtggaggtaatggtggaggtgatggggatgatggtgaggctaatgagggtaatggcagagatgatagtggaggtgatggtgaagataatggaaggtaatggcagagatgatggtggagggtgatggtagaggtgatggaggagggatggcaagggtgacggcagaggtgacagagaaaaaatggtgagggtgatggtggaggtggtggtgaagatgatggcgagggtgatggtagggttgatggagaaaggatggcgagggtgatggtggaggtggtggtgaagatgatggtgagggtgatggtgggggtgatgaaggatggtgagggtggatggtggaggtgatggaggaaggatggtgagggtgatggtggagatggtgaggatgatggtggaggtggtgaagatgatggtgagcgtaatggtgggggtgatggaggaggatggtgaggatgatggtggagatggtgaagatgatggtgaaggtgattgtggtgagggtaatggtgggggtgatggaggaaggacggtgaggatgattgtggaggtgatggtgaagattatggtgggggtgatggaggaatgatggtaagggtgatggtggaggtggtggcagaggtgatggcagctggcatttagtgagcatatcccagatgtcagaccctgacagtccaaatgctcctgtccacaccctcactttgtcttaaatgagtgtagatgtcttagttctggttcccaaaatagagcctcagactaggacgtgggtgctggtggtgtgtctggaaggccatcttggaagctggcatgggagcagggagaaggtgttggaaaaggagcaaagtcaaggacaagggcacattgtcaagatcgctgctgcaggcagaggtctctgccgcctcacagggcctcaccaacccttcctgcccttcaccaccagtccctaccaccaccacatcccccgtctttcccctgtgcctcttcctttctcttacttagcacacaacagaacctccagtcctccaaacaccagcaaagctacaaattag

SEQ ID NO: 12026 - DNA, 1764 bp, Artificial sequence
  DNA replication origin
taccagagtggagttctgtaagaagaaggcacttccataggacggaaaggacatgtcctccaaacccaccagagccatcttcaggctgctcactaatgcattacgacaaaagccagcaacgataccagcttaaatattcacatctttctccccgtgtatctttcaattcctttgtgattaaaaaagggagggaggggagaggaaagaaagatgaaagaaatctcaaggccccctaacgacagtgagagaggggcagcgctcacagtgtcagaccccctctgccgggtgctgcccctctgagctggtcaccagccggggtcctgccgtttctcaagtgactcagcctcccggagtaagcagcaccgtgagcagggagaagccagagagcgatgttgccacaggacattcgacaagctgtcaaaatgcgggtctctgtcccccacagcctttcagacggaaggaaagctctacctgatcctggacttcctgcggggaggggacctcttcacccggctctccaaagaggtgagcagccgccacatcacacaggagggcgggcaggagcttctgtctgggactcgaggggaggaggggtggagagcattgagaggacgtgagcacgtgcgagagtgcgtgtgtgtgtgtgggggtgtgtgcatgtgtgagtgtgtgcaagagtgcgtgtgtgggagaggtgtacatgtgtgagtgtgtgcaagtgtgcatgatgtgtggtggggggttgcgagactgcatgtgcatgtgtggggtttgcatgggggctgtgtgagtgcatgtgcgtgatgtgtggggtgtgtatgtgtttgagtgcgtgtgtgggggggtgtgcgtggtgtttggggttgtgtgtgcatggtgtgtgggaatgtgagtgtgtgtgcatgtggggtgtgcatgtgtcatgtgataagtgtgtggtatgtgtgtgatgtgtgctgtgtgtatatgtcaggcgtgtgatttgtggtgtatgtgatgtgtgctgtgtgtgatggtgtgtgtgctatgtgtatatgtgggggtgtgtttggcatgctgtgtgcatgtgtggggttggtgtgcgtggtgtgtgctatgtgtggggtgtgtggtgtgctttgtgcatgtgtgcatatgcagggtgtgtgtatgtgtggggtgtgtttgtgtgtgggtgtgtgtgtgctatatgtggtatgtgtggtatgtgctttgtgtggtgtggggtgtctgtgtgtttgacatcctgtgtgcctatgtagggtgtgtgtatgtatgagttgtgtgtgtgtgctgtatgtggtatgtgtggtgtgtgctatgtgtgatgtggggtgggtgtgtgtgtgtgtgtgtgtgttgggtgtgctgtgtgcattgctgcctggttctaaggaagctgcacaagtggccctagcaatcgtcccaggtggccctggcagcgcccctgcagctctgggaccataagtcacgctgttgacctcccagctagcgcagatggaaggcgcaggtcggtgggtaggagcggctgggaaagactctcacagggtctcactttccatcctgggaagagggagggaagagggaggtactgctaagccggctgaacattggggctgttcgggagcatcgggtgtggtcttcgcacgccacctttgtctcacagccgctactgcacaccccagggcttctccttgacctccagtgccttaggtaggaaccctccaggatgcaacttcactgcaccctgagagccccgtggcc

SEQ ID NO: 12027 - DNA, 1277 bp, Artificial sequence
  DNA replication origin
atccactctgcttttgacagcatcagcctttctcatgacaaaaccttcccctcagggcctatgcggagaatgccgacagcacctgggctccagcgccttctggggcctaggcctctctacacccacctggatgcgcaggtcaaagtgctttgcttctcagggagggaactgacgccccgctcagcccttccttctcctacgctccactgtcctgagggacttgatgtccaagtgctcaggtgggttcggcattttccacaaacccaaggaccaggcatggcagcctgttgaggccaccgagaggccggcttcgagtatgcggggcagtgggtgggtatttcgctgtgtccattttccttatattcactttctatttgaatgacagagaattatacccagaaacagactagtttagatttgaaagcccttggaaatcaccacttcaaatgaagacccaccctgggcgagatggggagggaacacccgctgggcaggagggcacggggagagggccggatggggtggaatgcccactgggcaggtgggctgggcaggagggcacaggaagagggtgagatggggtgggacgcccactcggcaggtgggctgggcaggagggcacggggagagggcgggatggggtggaatgcccactgggcaggtgggctgggcaggagggcacagggagagggtgagatagggtgggacgcccactgggcaggtgggctgggcaggagggcacagggagaggtgagatggggtgggacgtccactgggcaggtgggctgggcaggagggcccagggagagatgagatggggtgggacgcccactgggcaggtgggctgggcaggagggcccagggagaggtgagatggggtgggacgcccactgggcaggtgggctgggcaggagggcacagggagaggtgagatggggtgagatgcccatgggcaggtggggtgagcaggagggcacagagagggtgagcacagtggccactgaaagccgctgagccgtccatggagatctgaactgttgagctggcttccggtggcatgcactttttgaaataaagccttttcatttgaccatgaatgtgttcaacaaaaccaaacttcttgggagagtgaacatgtgttaaatgaccatatactaacccatcacgctgactgttcacagctgctcaccaccatgacctcattagttgggcggagatgaatatgcagccattttacgatcacaaattacattccacaactgaaatgtagcatggag

SEQ ID NO: 12028 - DNA, 1203 bp, Artificial sequence
  DNA replication origin
gcgctggtactcgcaggggaggcggagaaggaggcggagggagcgattgtggccccggccgcggtggccggcgcggcctgccctttgtgaccgcagctcgcgccccacgccccgcgcccatggccgccgtgccgggctccctggccacgcgtgcccgcccgcggacctgagccccgcgcctgggatgccggggatgcgcgtcccccggccctgcggctgctccgggctgggcgcggggcgatggacctgagcatgaagaagttcgccgtgcgcaggttcttctctgtgtacctgcgcaggaagtcgcgctccaagagctccagcctgagccggctcgaggtaatgcggccgccctcggggcgcgcaggtgccgggcactgagcgggccgtggtcgcccgagcccgcctcgccacccctgggtggaccccgagacccgtcagggagttcaagttactggaaagctggtccggttccgaaaatcgaaccaaacggctccaaacgttatcgctgggactccgtagtaattgggcggtccgtgggtcctcgcgggggcaactccacccccactgcatttccagctggtttctccgccgctggctgcacggggtgtgggatggtcccctgtgggccacagggagccccgggtgaggaggggctttctctgcagctagaccgccgagtggcgcggagcgctccgcgggggtccctcaaagtcccgagtggagaagccccccagctccgccctccgaggcgctgatcaggtgctgtctgccgtgcccggccggcaggttccaccttatcttgtagctcattcgtgcacttgaagtcagtgtagaattcacagaacggggaagaacaggcagcagcacaatctgcttaggcgtctaaaacggcgttcaggagtaaagagcctgatgcaatatcctcgcagcgccgaggctgatacagattcgtcctgaaaacccagagtactcccaaagccctgtcctttctacctgtcccgcatcttggcatcttagagtttccttgtggacggttctctcgtggtgtgttttatttcaaccatcaaatcttattctcttattcccagtgtccaaatcacattgttgaatctatagatgacaaaacagtgaaacgtgtttaagtgaaaaagacatggtgatggggagactgaggctgggacccaaagatttcgcctgaca

SEQ ID NO: 12029 - DNA, 1241 bp, Artificial sequence
  DNA replication origin
ggcctgaggagatgggggcctgaggagatgggggcctgaggaggtgggggcctgaggagatgggggcctgaggaaatgggggcctgaggaggtgggggcctgaggaggtgggggcctgaggaaatgggggaccgaggagatgggggcctgaggaaatgggggcccgagaagatgggggcccgagaagatgggggcctgaggaggtgggggcctgaggagatgggggcctgaggaggtgggggcctgaggaggtgggggcctgaggaaatgggggaccgaggagatgggggcctgaggaggtgggggcctgaggaaatgggggcccaaggggatgggggcccgaggagatgggggcctgaggaggtgggggcctgaggaaatgggggaccgaggagatgggggcctgaggagatgggggcctgaggaaatgggggcccaaggggatgggggcccgaggagatgggggcctgaggaggtgggggcctgaggaaatgggggaccgaggagatgggggcctgagagatgggggcctgaggaaatgggggcccaaggggatgggggcccgaggagatgggggcctgaggagatgggggcctgaggagatgggggcctgaggaggtgggggcctgaggaaatgggggaccgaggagatgggggcctgaggaggtgggggcccaaggggatgggggcctgaggaggtgggggcccagggaaatgggggcctgaggaaatgggggcccgaggaggtgggggcctgaggaggtgggggcccaaggggatggggggcccgaggaggtggggcccccatggaggctgatctgccccctctgcccagcatcctccagccccgcaccggcatctttcccggcgcagttccccctcactagcctgtggccaggatcagatggagtcatttcgctgaggcactcggtggagtttctgccggtggaagacaccgcagaaacacccattacttgttagttttcaggatttagctgtttctcctgcctggggaggtggtggcgctggcagtgggagcatggagccggaagcctggcccgcactccctcccgggctgccctcatcccgccctcctgaagacagcacgtgccacactcctctgaccagcttcctctacggttgctgctaatttccatttttcagaagtaatctcttcgcatggttctaaagttacagagtctatacaaaagtgacaggataagtctcgttcaccctggtca

SEQ ID NO: 12030 - DNA, 1431 bp, Artificial sequence
  DNA replication origin
catcttctcgggcccccatttcctcaggcccccatctcctcggtcccccatttcctcaggcccccacctcctcaggcccccacctcctcaggcccccatttcctcaggcccccatctcctcaggcccccacctcctcaggcccccatctcctcaggcccccatctcctcaggcccccatcttctcgggcccccatcttctcgggcccccatttcctcaggcccccatcttctcgggcccccatttcctcaggcccccacctcctcaggcccccacctcctcaggcccccatctcctcaggcccccacctcctcaggcccccatcttctcgggcccccatcttctcgggcccccatttcctcaggcccccatcttctcgggcccccatttcctcaggcccccatctcctcgggcccccatttcctcaggcccccacctcctcaggcccccatctcctcgggcccccatttcctcagacccccacctcctcaggcccccatccccttgagcccccacctcctcaggcccccatctcctcggtcccccatttcctcaggcccccacctcctcaggccccccatccccttgggcccctcttcctcaggcccccatctcctcaggcccccatttcctcaggtccccatctccatcctccttaatgtctgcactgcctggctgggagctgcagcgggagcctggcctctcctcctcctcctcctcccaaagcttccttccccctttccaccacacagactaaggcaggaggctgggcaaggggaagggggatactgagtgaggaaaacagagagggcggtggaggtggccacacagtcagcatcggaagcagagctggcatgtcccttctgagtccagcccggcttgagtcagcggggaggggcagggaggagggggccttcctgggagaaggcaggggccgcaccaagtgcccctgaggtgcccatgccggagagaagttggcttcctggagccccactctgtgctactgtgaagggcggttccatccgcctaggttttgttagttctgtgagccatacaggattagcgtgccctgcagtgctgcagagacatcgggcgtgctcccctcctgtgtcctcagcttctcccctgggggggtgctcaccagcccagggccccaccccaaccctagaggtccctgggattccctgagttctcaccagccttggaggccccgagtcaccccacgcagtgcacgcacatctgtgacacactcctcccacacagtctccctcagcccctcttgaccctcctcctcctcagacacacgcctttccggggcctgtacttgtcaatccccagacatccctggctgcttcctacatgcccaggctctgcgcttgctggcccaggaactgccctccgtgcctcttctgactctgtcacaacgggggtt

SEQ ID NO: 12031 - DNA, 997 bp, Artificial sequence
  DNA replication origin
tcttgtggtacagagcccttagccagtgggagggggaaggccctgcttcggggaagaggtgggagctctgagagggtccggagtgacccctgctccacagtgagcctgagctgagaaaactgcagtgtggcctctggcccagggaagggctgctgaggccaggggtcagggagcggccgagccttccaccccggggaagggctgggagagcctagagaaggctgctccgtgggggtgggcagggcgccctcccaccccagacccttgaggcctgggtccttgggctgcctctgagacaggctggacaggaggcctcggagccccctggcctcaccacgcacctcccagcaagaatggacagcgtcggtcttcctcgggcggggcacgcagtgaagagccggctgtggccaggtgagcggcacctgctcagcgctgagggtgcagcgggtactggaaatcccgctgtgctgggccaggtcccaggtcccaagagaagctcagctgcaggtgcccgagcgggactgaagacggggcacactgaaggcaaagaccaagcagcgaggcctggtcagctcctgacaagacaaatcccggctcagggaccgaggtgggccagcttgggtgcaggtgtaatttaaagtcatctcggcctttgctgttcctctactcaccatacccagtatttgattaacaattcgaagacacataccaaaacaaacaaacaaaagccaacctgtcctcgagactggcccagacgctagaaccaacagacgagacttgaaagtaactataataaatatgatgagagatctaccagaaagagtggacagtgtgtgtgaggagacactgagttttagcacagaggggaaagcgatgaagataagtcacatggctgtgtttagaaaccttcagaagtgataccagaggtgaagtattctgtaatgagctgattaatacattgggcacagaagtggaaaaaaatcagaaaacttggagg

SEQ ID NO: 12032 - DNA, 1754 bp, Artificial sequence
  DNA replication origin
atgccacgtgaacacacacgggggagaatgcctcgtgaacgcacacgggggagaatgcctcgtgaacgcacagggtggaaaaccccgggtgaaagcacaggaggcagaacgccacgtgaacgctccctgggaagaacttctggtgaacgcaggggaggaagaacgccgggtgaatgcacagtggggagaacaccgcgctaacacacacgggtaataactccacatgaacacacatgggggagaacgccgggtgcgcgcacaggggaaagaacgccagctgaacgcacatcgagcatggagtcccaaagtgattatgacctaagcagccagccagggctttaccctgatatggaatcaacattttgtcccttgtccccccaattcctgtgttgaaattctaatcccaaggtgctggtattaacaccttgggattagaatttcaacacaggagagaacctccagtgagcgcacagaaagaagaacgccacaggaacgcacagtggagagaatgccatgtgaaggcacaaagaacggagaacgctgcgtgaacgcacacacgtgggggagaaagccaggggaacgcacagagtaaatagaacgcaatgggaacgcacaggaaagagaacgccacgggaacacaccgggggagaacgccaggagaacacactgaggagagaactccgcgtgaacacaatgcgggagaactccaggtcaacgcacggagaggagaacgcctgctgaatgcacggggttggagaacgccggtgaacgccggtgaacgcacggggaagagaacgccacgtgaacacacgggggagacgccgcacgaacacacagaagggagaatgccgggtgaacacacacgggggagaacgcccacgcgaacgcacagggtagagaattccgggtgaaggcacaggagggaaacggcgcgcgaacgctcagcggggagaacgcctggtgaatgcacgggagggagaaggccaggtgaacgcacagggggaaaatgccgcgctaaagcacacgggaaataacgccgagcaaacacacaggtgggagaacgtcgcacgaacgcacagcgtggagaacgcgacgtgaacgcacacggggaagaacactgcgcgaacgcacagcagggagaacgccacttgaaagcaaagtgaggggagaatgccgcgttgaacgcacagtggggagaacaacccgcgaactcataaaggggagaacgcagcgtgaaagcacacagcggggagaacgcctggggaacgcaaagagtaaagagaatgccttgggaacgcacaggagagagaacgcaacctgaacacacggtgggggctggaggaagaacgtcgggagatcacacagggaggagaacgccaggtgaacgcacaagagaaaacgcctggtgaacgcgcaaagaaaggagaaagccaggtgaacgcacagggagaacgccgcacaaccgcacaggtaggagaaagccatgtgaacgcacaaagaaaggagaacgctgagtgaacgcacacagggccgagaacgccaggggaacgcacacagtaaagagaacaccgagaacgccgtgggaacgcacaggagagagaacgccacgtgaacacacgagggagaacgccgcgggaacacacagaagggcgaatgcccggcgaacgcacagaggggagaacgccaggggaacacgcacgggggagaacgctgcgcgatcacacagcggggagaacaccgggtaaacacacact

SEQ ID NO: 12033 - DNA, 1250 bp, Artificial sequence
  DNA replication origin
aatactcagtccattgctgatgagccgttgaggaagctgcttacctagtgtccgacagctgagaaagccattgaggagtggggagaaaggaactggtgtcttgccctggagtgtgggttaggggacagagtgggggtcctcagcggagaggaacattcagaaaattcctgaataaaagtggcttttattctacatgttttagcttaagaaagatatccaccttgattcggaggttgactatgaggaaccattggcaaaatgcaagatggattaaattaagatatactcagaaagcccatgtgttaggattcactagccagtaataaagacatccaggcagattttcatccaatccaggtggtaagagatcaagagaagcacgaacagggcccctttcatgaattcaccactgcgtggaagccagccctgtgtctgctgaaggctgctgctcagggagctaagctggcaggaggaattggtggggagagcggggccgggcagggaggtgagctggcattgaggagttggtggggagagcggggccgggcagggaggtgagctggcatcaggagttggtggggagagcgggttgggccttcagggtgggtggacggtggcagcaatgacatcagcaggtaatgaacagggcatgcagcagcggtgggtggagatggtggggtggcagtgcaacttgggaacaggagtgggcagcataggaaaggggttcaaggcctcaaggaacatgcgaaggtgcaggaagtggagaaggaagaagcgttggcaaaacctgcagcaatagcttagaggcagggaactggtggtcagaggagagagtgtggggaaagaagccagaggactcaggcctgaaagcatgcgaggcacggaaaggcaaacacagcccggtgctggcgggaacaaaggcctgctgcagaaatttacaatttgtccctcatgctgctgagtgggaggacagagcgtgactgcaggctgcggggctgcaggaccacgggtgttctgctggggatgatgggaaggcagtgggaaaggcctgaagagaccctgggagtcctagctggttcctggatggaaattctttgaccagcgtcctatatggcctaaagggaaaagtacaggagctctggaggggtgagtgctccacacacggagctgtgttccggaggggtgtgtattcccacacacagagttgtgttctggaggggtgagtgcagagctgtgttccagaggggtgt

SEQ ID NO: 12034 - DNA, 1111 bp, Artificial sequence
  DNA replication origin
tgctggacgctggcaccgtgtttgtgccactctccgtaaccaaccatggctctctgctcccagatcacacctccccagtatggcggctcagggacattccctcaatccctcctgccctgttggcagtgcctccacccactccccacagcccatgagggctctgcttagcacttccttgtgcctggattctccgcgcagtttgggtggcctggagtgctcttctgctcacctagtttagcaagttccatgggatatcaacacccagttccatggttggccgttaagagttcttttgcagtcctgggtggctctgcgcctccacgcccagggaccagggcctcttctcttccagctcttgttgtgttacatagaagatgccagctggatggcacaggggagggccgtacagtgtagatgcggacaatgtggcataggtgaggactggacagcagagacagtggctgcatgatggaggtgagggctggacgggggaggcaagggctggaccggggaggtgagggctggacaggggaggtgagggctgggcagtatagatgaggcctgggtggcagaggtgagggctgtgcagtgtaggtgaggacgggctggacaggggaggtgagggctaggcagtgtagatgaggcctgggtggcaggaatgatgcctggatggaggaagtgagagctgggtggcttgagtgagggctagatggcatgggtgagggctaagtggcatagatgaggcctgggcagcggagacatggactgcgcatcgtaggtgtcggctggacagcaagggtgatgcctggacagcagaggtgagggctgggcggcaggagtgagggctgggcggcaggagtgagggctggatggcgtagatgaggcctgggcagcagaggtgagggctgtgctgttccggttttgggctagacggcagggagaatgcctagatgactgggtagaggcctgggtgggagaagtgaggtctggacactgtgggtgagggctggatggcgtagatgaggcctgcgcggtggaggtgaggcctgtacttctcctgccactaaatcaagagctgtttattgattcattccacacttttttcaaccct

SEQ ID NO: 12035 - DNA, 1623 bp, Artificial sequence
  DNA replication origin
actccccctcaaccccaaccccaggaagccgtaagatgatcgcttgcagggccctcaccgtcctcacctggactcatgtgcgaatagatgagggacatgtgcctgccatgtttgcccagagctcggtgttcagggaactgattacaggggtggcaaaagccacaggggccacacatttgctgagctgcttccaggtgcgaacggcgcttgtttgggcatcagaaacagcacggtggatactcggagtcctgtcctttgaaaggagtttgatttatcatcaggagaaatttgttgcttttgcatccagcatccagccacgtatccactcatctgttttatggggaaatcagggctgcgggagcacccaggagagctgccgacccagacatttcctgggaaatgcgttgctgagatggaggcctgcagcctgcccaggccctgaggggagtggttcagtggagcagagctgggggctgggggctgggagatatgggaccagttgcttcttgagggggctcaggggcagagcaggagggttgggaaggggccgggtgggagccatagacatgaggacctcatcctccagcagcgctgagctctgagtaggccggggtgtttgcttgttgctgtccccgtggtactggggagaggctaggcacagagaccctccgagtaggtcacatgctgggggaatctgggcctatggctatgcagctggagaggaagggatagtgtggggagcttggacttggccgtttgggacagggggatgggagaggcagaggtcctgcctcaggcctccataggagtgacatttgctggtgtcagaagcttggcaagaggggaggatgatcagaccctgcatggacagttcgaattggagctctctgcagagtccaggaagagaggtctggatgggagggaagccatggggtggaaaagatagcttccaatggaaggcagtgaaaactcgccataagtgaaggagaagaaggaggccaaggagatggggcaggaatggcagccggcagccaggcggtcagtggagcaggtgctcaggaggcccacaggagagcttcgtggaaggagtggacagtgtctgaggcaaggggcaaaaggcatctgctggagctggtgaccccagcttggtgccccccaaagccagagtacgaggctgagaggatgcaggtgtcctcctaggaggtttgagtcagaaggcacgaggcagaagcagtgggggaggactccctcagtagagcgaggaggaggcccctcatccaagaggaggttggagcacaggggggtctaggtttgcagtttcgggaccggtagctgaggggtcccagggcctttcttctgtgaaggagaatgtgtccaccgtggggagggggtcgggagagagagatacttcagagtggacagggctgagaaagctttatgggccgcgaaaggcagagtagttgttggtggatgagggtggctgtggcaggtggcgtttcaggtgagacagctcggggcccagaaagacactgggaggaggagagctctgctctccagagaaacaggagcagagaggaaaacagagccgcagcgagcggcttgtggtctggggatgaagcccag

SEQ ID NO: 12036 - DNA, 1609 bp, Artificial sequence
  DNA replication origin
cagcctcctgagtagctgggattacaggcatgcgccaccatgcccggcttattttgtatttttagtagacatggggtttccccatgttggtcagactggtctcgaactcctgacctcaggtgatccacctgcctcggcctcccaaagtgctgggattacaggtgggagccaccgcgcccagcccacaagttctaatccatatggaattgttttctttttcctccccgtgaagaccttcagtgggatgagccaagaggctggggactgccgtgagacttagaagggacaccccagagcctggtgctgtctctagctcctcacacagactctcctcctctcctccgggactcactgcagggaatggtttctggggaggcgtgatgaagaggccacttcaggatacattgagtttgaagtgcccttgagacctccagggggtgacatagaggatcttcagggtcagaggaaaggtggctttaggcatagttagcatgaggatggtgaatcaaaatgacaggtgtggggatggacatgggtctgtggacatggatgggtgaggagtcagggccgacaggtgtggacgtgggtggatgagggggcagggctgacaggtgtggacgtggatgggtgagggcagggctgacaggtgtggacgtgggtgggtgagggcagggctgacagatgtggacgtgggtgggtgagggcagggctgacaggtgtggacgtgggtgggtgagggcagggctgacaggtgtggacgtgggtgggtgagggcagggctgacaggtgtggacgtgggtgggtgagggggcagggctgacggatgtgggtgggctaaggggacagcgctgacaggtgtgggcctggtgggcagaggggacagtgctggtggagccccgtgttaacagccaggtggaaaggggcatgtgtgcctgcagctgggaaaggcggaaacccaggagtggagagatttgagaagaggcaccgtaggactgcatatccccggggggtccaggacaggaaagctgaaatgctttttgagtgggggcgtgggtgggtcgtgggtctgtggtggtgtgagccgctgctcctcagagtagtcctggcttccttgttgtgtagcagtaggaacacctttgcattgtcccaaacggaagtagcccaatttgcacactcaatcatatcgtgccctaggacatctcggagagctgatggggctgaagccagcatggtggggcaggagaggtggggtggggggctggaggggaagaggagggggacagagctgcgcccacacaggcaggggctgtggggtaggggctgagttacaaatgggctgagaaaaggaccctcatatagggtgctggaaaacaggagaaagggaaggaaagtgaagttatccgaagtttgttaagcacctttttactgacctttttggggtttttttggtgtagagggtgtgtagaaatagaaaagtaaactccagttctgttggatttagcgcgactggtgcccaggctgcccagctcacacaagctcttctctgggaaaaggagagcttgtcctttgtttgtttgtttgttttaactgatggtttcgttttgttttt

SEQ ID NO: 12037 - DNA, 1201 bp, Artificial sequence
  DNA replication origin
gcggagggagcgcggcggcgcgggggctcggagacagcgtttctcccggaagtcttcctcgggcagcaggtgggaagtgggagccggagcggcagctggcagcgttctctccgcaggtcggcaccatgcgccctgcagccctgcgcggggccctgctgggctgcctctgcctggcgttgctttgcctgggcggtgcggacaagcgcctgcggtgagttaccttgcgaggtaaagtggggagcgtgggagccgggccctagagctttccactgggtgaaggctgcagctctcggggtcggcggtcgctgagccccgggcagcgactggggagggcggggggagccgagcacgctccggggtgacccctgggaagaagttgggaagttgagcacgcctcggggtgacccctggagggagtgggttggggggagcccttagcacactcagaagtgacctctgggaaggagtgcgatgaggggagtcctgagcacgccccggggtgacctctgggaaggagtgggttggggggagccctgggcacgctctggggtgactcctgggaagaagtgggttggggagccctgaacactccccggggtgacccctgggaaggagtagggggtagggtgaggtcctgggtacactccagcctggagctggactggaaactcatcccacagactgctcccagcctaggacgcgacaaagcaggtggcaggcttggtggagcactgttcctgcactcgaagttctctcagaggtcgaagaagtcgtggaggggacacttaatttcagctttcactgcggcgggtggtgaaacgacggttcttcctctttttgagtatcctgttctgaatcccttcccttggctcgccctccgcgtgtgtgtgtgtgtgcgcgtgtgtgtgtgcgcgtgtgtgtgtgtgcgtgtgcgtttgtgtgtgcgtgtgtgtgtgcgtgcgtgtgcgtgtgcgtgcgtgcgtgtgtgtgcgtgtgtgtcgtgtgtgcgcgtctgtgcgtgtgtgtcgtgtgtgcgcgtgtgtgtgtgtgcgtgtgtgcgtgtgtgtgcgtgcgtgcgtgtgtgcgcgtgtgtgcgtgcgtgtgtgcgtgcgtgtgtgcgtgtgtgtgtgtggcagccgcccaaattaattaggggtaaacaggcggtgctgcaaagaactccaactttaattctgtggaa

SEQ ID NO: 12038 - DNA, 1305 bp, Artificial sequence
  DNA replication origin
gggcgttgggtgggctccgcgctgcccgaactggggccgcagtctccactccctcctgccccgcggccctccgccgacagccaggcgccggcggggagtcctggacccctcccgggccctggaagccccgtcccgccggagctgacgcgccctcttggtatccatccggccgcctgggctgcccctcgcccctcgccttggcaaaaccagcccccggaccgagccctgccttggagagtgtgggtgcgcaaggccagccgagctgtcggttccggggtttcggggtgcgccactgtatggcggcgtaagccgagaagtgtccgaggccgggctccagcagttgagaggctgatttggccacggtgaaggacgcgcccggaggaaggaaacgggaatccgaaacgggcggtggccgcgcctttcccgaggccggcgtcgagggcttcagcgcctcagggtgggcgggaggggaaggtcgtgcgacccgcgtggccggcggaaaggagcagcgggagccgcggccgtagggaagccacgggaagacgggcggctgcgctgcgatgcgcggccctctccctgaagccctcggctcaggcgccacaggaaaggctccttcgggcaggcctcagctttcagcttaagtttttttcctttggccgagtcaactgcggtgccgagttgtattttcctttcagaggtgtgtccgagaaccattcttaggagacgcctgccggccgctttgggatagggcctgtctgcccatgctggcttccaaaggcctctgtgtgttcctgtatgtgggcgtgcacgtacctgtcacatgtgtacgcgcagaccacaggatgtccacactggcttccaaacacatctctgtgtttctgtctgtgagtgtgtacgcaggtgtcaaatgtgtacgcacagatcacagggtgtccacactggcttccaaacacgtctctgggttcctttatgtgcgtgtgtatgcacttgtcatgtgtacacacagatcacagggcatccacactggcttccaaacatgtctctgtgtttctgtctgtgggtatgtacacacatatcacatgtggaagaggtaggaagaggctggaacaggtaagggtcatgaaggtgcagtgcactattgtactgtttgcgctttatatgtgtttggttagttttgcaagaacatgctggtgaaggagagagaaccccaaacaattgattagcagtgctactgaaactcagatatacacaggaatggcaaagaaacatctatgaaaaaaagcagattctggaactccatctccc

SEQ ID NO: 12039 - DNA, 959 bp, Artificial sequence
  DNA replication origin
tgggagcccgagtgtgtggtcagggcaggtgcatgtcagctgtccaaattggagggggcctcacttggaggtgcccagtgagcaaagagctagaggaggtaagggagttgccgtgggttgatggagctttggggagaggaaacagacagcagggaggcgagttgggggtagcagagagagcaagatggggatcggatgaggtggactcagagatgaggagctggacggcttttctttgagactggaagccctgaggatcttgatctggcgtacattacagaaggatcctgaggttgctggggaaggttggtcttagagtttccagttaggaggccgttaatgatggaaaaggatttgccagtaagtgctagagaaaagtaatatacagagtggcatcatggtttttagcctgcaaaactagaaggttggaaacacgttagatgaagagtggcaagagcaagagtggattacacagacaggtggcatgacagcctggaggcccctgttgctgtgctaagttagagaagattgctagtggaaatccaaagtaggctattgagtgtatgcgttgggattgatggagaggtctgagctggagatgtaaattaggagtcatcagtttgtagataatgtggggtgtgggagactacagaggatcaccaaggaagcaggtcctgcgcaccttgaggccagagcagggagctagaagcagcagaggagatggaaccaggagagtggtgtctgtggaggtggcggtagggaggagtagctgtatgatgccgttggatttagccatctggaggtcagtgatgaccttgacacagttttgttggaatgggggtgcgaggcaggttagagaattagagtgcattcaagacagacaggaaaggattgtagatgaaaaatagttttctgatgagttgtaaaagtgtgcagaggagcagggtggtggctggagg

SEQ ID NO: 12040 - DNA, 1175 bp, Artificial sequence
  DNA replication origin
tttgcttccagccccctgttgaaagtggaaccttttccctgtttcaatagcccaactcaaaacacttcaccccaccccactcgctggcatgagcccacctggtttcagggacagacactgggagatgctctgatcatggctggggtctgtggactgtccaggtgactccttcagaaaggggaggttttctgatgtctttgaacaagttctactgggcagaaatggtgaactaatgttgccatttaaatataactctctgctacttttggataaacgttcgatggaacactaaatcattcttctcatgtcatttgaagcaaaaaaaggaaggaaggaaagaaggaaaggggagggagggagagaggatggaaggaaggaaggaaggaaagggggagggagggagagaggaaggaaggaagtgagggagggagggagagaggaaggaagggagtaaggaaggaaggaaggagggagggaggaagggaggatggaaggaaagaaggaaggaaggaaggaaggaaggaagacagggagacaggtagatcccttttctctaacagaaaaaaatacctagcaagtatgtttctaaaaacatgagatggtcgggtgcagtggctcatgcctgtaatctcagcactttgggaggccaagacgggcggatcacctgaggtcaggagttcgagaccagcctggccaagatggggaaactccgtcctcacaaaaaaataaaaataagctgggcgtggtgacttgtgcttgtaatcccagctactcaggaggctaaggcaggagaatcactcaaacctgggaggtggaggttgcagtgagctgagatcacgccactgcactccagcctaggcatcaagcaagactccatctcaaaaaggaaaaaaaaaaaccaaaaaccatgaactgattgaactgattaaataggtatgatttcccatttttagataatgaaactgagagattaaataactgtctcagagtttaaccagagaagcaaaaccagtagaaaatctattcggaaggtaagtttgttttctctccatttgatgctggtgcttcaggttggcagggcaggcagtcaggaacgaaaatggatgtcgagtgggaaagaagggagcaaactggatgtaaagcatgagaaccagctggaccctgagtcagctcta

SEQ ID NO: 12041 - DNA, 1193 bp, Artificial sequence
  DNA replication origin
aaaaaagtatgttaaagcttatatctgataataggttatatccagaatatacaaataatttttacaactccctatcaaaaacataaacaataagaaacagggggaaatgtgaacaggcaattcaccaaggaaaatacatggatggcaaatacacacacaaaaaagacgctcaatgccattaatcatgaggaaaatgcaaattaaaaccacaatgaaggctgggaacagtggctcaggcctgtaatcccagcaatttgggaggccgaggcagacggaccacttaagtccaggagttcgagaccatcctggccaacatggtgaaaccccatctttactaaaaatacaaaaattagccaggcgtgatggcgtgctcctgtaatcccagctacttggggggctgaggcaggagaatcagttgaacccgggaggcggaggttgcaatgagctgagattacgccactgcagtccagcctgggtgacagagagagactccgtccaaaacacacacacacatacacacacacacacagacacacacacagagatcccactggaaggactaagattaaacagggggctggaagctgggagaggacatggtgcatctggggctctcacactttgttggtgggactgcaagatcacacagccactccaaggagacagtggggtcctttcttgcacagctgaacatgcatccaccatgggaacctgcaaccgactcctacatgtctacccaagagacatgggaggattaacactggaacattcccagcaggtttattcttaaccgtcccaaactgaaaaagacccaaatgtctgtgaactggtgagcagatacccgagttgaagtgtatccatgcaacagcatatactactcaaccatgaaaaggaacgggcgactaatgcatgctccaacgggggtgactcaaaaccttcgctcggtaagaaatccaggcagaagagaccatgcactgcaccattccacccctaacatttctagaaaaggcaaaataacagtggcaggaatgaaatcagggattgtcatcaggacgggaagaagggattggctggggttgggcgacacaaggggcttttgtggtggcagaaatgtcctctatcctgattgtgggggtggcacatggctgggtgcccttgtcaagacctgttgaattgtacccttcaatcggtga

SEQ ID NO: 12042 - DNA, 833 bp, Artificial sequence
  DNA replication origin
gaaggagaaaaggccagggccgggtggcatttgctccccctcccatggtcagaggtggccagtggcctaatgaattagggtgagtgaaggaagcatttggaatttcatggagaggcccatttccttccacacatatgaagcacctgctagtgctgtgtaatagacgctagaaagctgaagttccaggaggaggagatgcttgtagaaacaataaatgaacaacatgcaggtgggagagccacagacaagacctagaaggtttagaggaagcctcagtgtgaaccaaagaggaaggggaggaagaggaaggggaaggggaaggggaaggaagcagcttaaggttaaaggaacaaaagagaaacaaagctccaggcacacatgctggggagggccggggaggccaaggagaggcaagggagaggccagggagggctgcagagttgggggagggtaggagaggggcagggaggtggctgagggtgccagggggagggcccgggagggaggtgtgggtggaggactgaagggggccagtgaggaggggtgctggaaagggtgctggggagggaggggtctgggaagggctggtgagggtcagaggacccgagcatattggacaaggaagaagccttggagatcagcggccagcagcgctgctaggaagaacaagggagagaggagaccaggtgccaagggacaagacgatgactgtgagatgggcaaatatcactcaacccatgcccggcaccattttccatgttaacagacacgtgtagcatcttcacctgaaatgctctcgaaggtctgcgaaggccacagcacactaaagcact

SEQ ID NO: 12043 - DNA, 1712 bp, Artificial sequence
  DNA replication origin
tgtccctgcagttctttagtcaatctgggagaaggaaccaccgcctggcccattgcaagcgtggtgatgagtgttgctggttggatggatggattcaccattacactcagaaaaatgagcaatatcagtgcatttcctagcttggactgatttgcaaaagtgaaattgaagccagtgaggctccttgtatcggatgcgattgcaaacaacaaggtgaggagcacgagggaggcgaggagcacgaggaaggcgaggagcacgagggaggcgaggagcacgaggcaggcgaggagcacgaggcaggcgaggatcacgagggaggcgaggagcacgaggcaggcgaggagcacgagggaggcgaggagcacgagggaggcgaggagcacgaggcaggcgaggatcacgagggaggcgaggagcacgagggaggcgaggagcacgaggcaggcgaggagcacgaggcaggcgaggatcacgagggaggcgaggttcacgagggaggcgaggagcacgagggaggcgaggagcacgagggaggccgaggatcacgagggaggcgaggagcacgagggaggcgaggagcacgagggaggccgagggacagccccggttaaaaagacctagtgaccggctcgggcctcagcggcggcatgccatgtaagactctgcagctaccgggaagaaggacttgcagccatcatcagcagcatgtcctggcacaaccagggtccctggaagagatgctccatggctgtgttcccggggcctggggtgcaggccaaagccctcagagctcagtctctgtggtccatctcaccagggagcagggtggcctcccatccctgtgacctgccctggccatacccacctcctaatggtgggcgaggtgcagctttcggtccattggtgacatctgcctaggtgcccacgagactcaccatctgcattgcagttagagtcccctgtgttactggaaccctcgcccagccaggggagctgaggaccaggacggatcccagggagaggccagcatcggggatcgggaggaggagacagaagcagtggggggcacagaggagccttggtgggaaaacaggaaggaagcccagcaccgtctgtcaccaaagcgaggcgggggtgcaggggcaggagagctcattttaaaatgcctgcagtgaacagtaatcaggtgcaaatgcaactcatgtgcagagtgaacgtccctagcgtggggaacggccggggtggggtgggcagggggtggtggctgcgtaccagctggcgaagaagttgcccacggagaaggccacgtagccacacatggagaggatgatggtccccttgcagcccagcctctcgatgaggagcggtgggaggaacatggaggacaggagcatgcctccatagagggtgctgagcgctgtgacacccaggccctcctcgctgtacaggctgctctgtgggaacaaagccagccctgtcagagcacaggatggacacagcgggatgaggcaccagcaggtcctcagtgtcccccaggctggaggccgccacagctcccaggaaccgccagccacaggcttgctgccctgggagcctcctctgaagctggtgggagaaaagtgcaggtgaattcggaataaagcagttagtgtgtctaaacatcagggagtgaaggcccggcacccctgtgagtgcttgcgccggggctg

SEQ ID NO: 12044 - DNA, 1475 bp, Artificial sequence
  DNA replication origin
ggagaagcacacgacgccctccaaatccctccagccccagattctgtgtcctgtgctgacttggagaactaactcacctgcagaaaggtcttcgaaagaaatgcctgttcctccacttcactggccgtgatatgcagactgagctgtaaccccagtttctgtttcattgttgctgacaccaacagcaataatgagtaaaaattgctatgcatcaccttcacggcttcccttcttcaaatgcacttagcaggcatgacatcgcatgagaaaaagggagaggggttttggctacagagtttaccaagcgtgggatttttatgggatagcaagatggagaaccttgatgaagtgatagaaatagttgtgatactagtcaggagggctggattggtttttaccccgttgggaaagttttcctgtaagcatgaaagagatgtatgtcctctgccctgtgcttaaagcctcaacgtgggcactaaggtcatgggcacaaatgagatatgcactttatatttataccagggcaaggtcgggtagagacagaggagccagggcatcagcccatccaatgtccacatctgtcatgggataaggggcctgtcataaaacatttgaaaatctggtcattgtatcaagtcacagggaaaagaaatcaggcaaccccatccttagtctaaaaaggacagttgtgcagttgagactccatgaacacaaattctactggcgtggccctcagtttcccatggcgccctctcccaagggctcccctgcccctgcggaggcacctgtggaagacgcagatcttcttcagtcccacccgactgtccagaagacagcaggtaacaggcaactctgaagcacaggcaggttgagaatctcacctgtggggcctgactcacctgctcaagttacagaatcaaggcaggtgtgcaactgaaatcaggaaccctctcccccatcactgaaacccctgctccacttggagacaattgcttgccccttttccttttaccttggctgggagtctggccaaataccagcgatgagatcaagttgccccacacaccggatgactggaatatgaggaagaagatgccaaaatactggttcaccatgtctttgccacgctttcccgccttctctgcatgtgtgtttcccgtgatcgtgaggtatgtgcactgtgcagaccacagcggggcggccccgagtcccagcagtatggaggtggggatcaaagtgtacctgtgggtaaaatgcagacccatagcctgtaacaggagacgcaagcccattgcacccatgtccctgcagttctttagtcaatctgggagaaggaaccaccgcctggcccattgcaagcgtggtgatgagtgttgctggttggatggatggattcaccattacactcagaaaaatgagcaatatcagtgcatttcctagcttggactgatttgcaaaagtgaaattgaagccag

SEQ ID NO: 12045 - DNA, 1597 bp, Artificial sequence
  DNA replication origin
ctgtggggctcattagatgccaatgggccagagccaagagagatgagttgggagagacgggagggccaagagggctttgatgtcgcctctgagtctgatgtattttctctgagcatttattcagattcatgatgcaaaactggaaaaccacccaaggttccttctgggcaccattccctcaggatgatgtggttttgcttaagtcaagtcgcccattcgagctggggtgcaagactctctacccctaggacagcagtctcttcatgactgaaaacctttattcagatgtgcttgtgagcagaggcacactcccgtgtacctgggcctggggtgtaaacatgcagagccttccaaggagcccacgggacgatgggaggtggcagtgtgagccacaagccacacacatcacaggtcactagggtcagtgtctgtggacggggctctggggcatcctgggcagtggtgggttttctgggagcagcaggtgggggccctgtggatgtgggggagcaggggaggccagggtgggcttcctcctagaggctacatctgcatcacgtatgggctgaccactgtccaggtggggtggggtgcaggaggaaccagggcaggaggtggcagggatgctccaaggccttgctggggctggggcccctaagaaggcggcctggggggagtgcagaggagtggggtggagtggcaagtcgggtccccaagtgtggggccagcatgtgggggagggtcagatgcacctaggtcactggaagcagcagaaagcgctgacacccaggagtgactgggagctatgtggagtcggccccgtgtcacaacaatcaattccaaaaggcaggtgacaaggtccaaggtgcggccctgtggggagccgggagggctggttgtcggatagaaggtgacatcccatgatgatggcaggagccaaatgccaaagtcctcacagaatagggtggcctggccaggaggtcaggcagggcagtgaggacacggatgggagatgagcgggagccaaggagccaagcaggagccagggaggaaggggccccaggctcaggcagctgcactagagaggcctgagggcaagagagctggaaggggacatggccgttgcacctgtaatcccagctactcgggaggctgaggcaggagaatcacttgaactccggaggcagaggtcatagttagccgagatcgcaccactgcactcatgccaggctctgctgagctccgaggtgctttgtgcgggctggctgtgttttccacaaggagatgcgtgagagcgttttggaggaaggtcactaggaagagaaggaagctggggcagtgtgtgtggccgcttgccggagggtgtgcgtactgggtggtgttgaaaatgacacagatgaggacttagggtaggaaccctgaatttcccaaaaaaccccatctaaggccccgaggggtgtcagaggcccaaagaggcaagactgcgtgtctaagagatgctgatgaggtgagatgaagtgtcctctcggaggtgagcatggctcacatgagaccctcttcccttcaggagagacttcaccattctgcctttatctgg

SEQ ID NO: 12046 - DNA, 922 bp, Artificial sequence
  DNA replication origin
agcacctgctagtgctgtgtactagacactggaaagctgaatttccaggaggaggagatgctcgtagaaacaataaacgaacaacatgcagcgggagagccacagacaggacacataaggtctagaagaagcctcagtgtgaaccaaaggggaaggggagggggaggaagaggaagggaaggggaaggaagcagcttagggttaaaggacaaaagagatcccaagctccaggcccacaggccagggaggtcccaggagtgagggggtgggggggggggtccagggtgggcggggcaggtccaggaagcgagggtggtgggggggggcagggaaggcggttggcgggggtggggagggcacgggagtgggggaagggtgggggggtgccaaggagggtaggaaaggggccaggaaggggtctggggaggggtggggggggcaggggtagggccggggagggtgggttgtgggagaggatgagcgggaggcgggaaggggctgggcaaggtggtgctagtaatgggggagggctggggagggcctggggacctgagtgcagtggacaaggaagaagccttggagatgggcaggcggcagtgctgctaggaagaacaagggagagaggagaccaggtgccaagggacaagacgatgactgtgagatgggcaaatatcacccaacccgtgcccggcaccattttccatgttaacagacacatgtagcatcttcacctgaaatgctctcgaaggtctgcgaaggccacagcacactaaagcactgatgtgatgaagcgtgtgtgtgtgtctatgtgagtacttagcacaacagtacttgggcaggaggtaagtccattaaataaccgtctttatttagaaacgcagaccccacacgtttcaggaatcctgagccccagtctggcttt

SEQ ID NO: 12047 - DNA, 1362 bp, Artificial sequence
  DNA replication origin
aaatgctctgagcagactgagaaaccaaagaccagttccaaataagacttatcctgaggagcaccaggagtgcccatcatcaattcacaaaatcctaaacctccaaatggaggggacatgacatgtcaccttaccctcgatgaacgccctctacacaaataccctagccagtcttgactccttttgacatgaccctgttgtgggagctgcaaagaccatcatggatcccacaaacaggcatggcgctgggcaagacggccatggatcccacagacagggatggcaccaggcagcccgtggtgcaaggcaggaaaggggaggacaaagcagggcagggattagagagtgcagaggcccagctttaggaagatggttgaagcctgcaaagagttaacggcattccactgggtctgggaggataaacgtggtttggatagagacacagggacagcatgagcgaagggcccataagggaaggacctcggtatttaacagaagcattggacagagaagtctggtgaaacggacggaaggctagagaggcagctgggattaactcacggaggcctggactgtcccggccagtgggtaagactgtgctctttagatgggcgctggaggtgaagtgtcctgtgtttagtgaaatccctctctcaatagcccggatggaggataagaggagccctgcagggaggacaatgaaccaggaagcagccgacagggaatggaatggaggcagaggatcgacagggaatggaatggaggcagaggatcggcagcctgggggaggaatggcagggcctcctccctgatcagccaggccagggacagagtggcacataaagggcacatgagcctgggtaacaagaagaaggctgctggtggtcagagacactgggctatcaggggaattctaacagttgggagaaaatgcccagctcgtcgtggggaagcttgagaggtaacatttgagaggccaggaagcattagctcgtggcagctgcacttttctctgcctttgatcatcgcccgtctgggcacctggctgacactgactagaaggagaaagggccagggccaggaggcatttgctccccctcccatggccagaggcagccagcatcctaatgaatgagggtgagtgaaggaagtatttggaatttcacagagaggcccatttccttctgcacatatgaagcacctgctagtgctgtgtactagacactggaaagctgaatttccaggaggaggagatgctcgtagaaacaataaacgaacaacatgcagcgggagagccacagacaggacacataaggtctagaagaagcctcagtgtgaaccaaaggggaaggggagggggag

SEQ ID NO: 12048 - DNA, 1274 bp, Artificial sequence
  DNA replication origin
gctttcattgtcacatcgtctgactctgaccctctagcctccctcatgtaaagatcctagtgatgacattgagcctgcccagatcatccaggataacttctccatctcgagatccttgacttcatcaccccacagtcccttttgtgaggtaacatatttccaagttccagggattaggatgtggacatctctgggggccattattctgcctatcacacattttatggactcagtatgtaaacttggtagcttagaccttcttcccacatgactgggttactaaatggtttcctaactgggcctggcttgtctctcttcctcctctaatttatttgtatgcttctgccagaatcatcttttataatctacagatttcatcacagtaaacttaaaaccattcccactgatgatcatgttaagtccaaggttgagtgtctgaattttgaaaggaccatcatccgacccacactatacctccaggtttatgtcctgaagaaaagttcctctcccatcagaacagtctttgcacagctccttgcaggtgaggaggcgcaggtgagggggcacaggtgagggggcacaggtgagggggcgcaggtgaggaagtcaggtgaggaggcgcaggtgagggggtgcaggtgaggaagtcaggtgaggaggcgcaggtgagggggtgcaggtgagggggcgcaggtgagggggcgcaggtgagggggcacaggtgaggaagtcaggtgaggaggcacaggtgagggggcgcaggtgaggaggcacaggtgaggaagtgcaggtgagggggcacaggtgagggggcgcaggtgaggaagtcaggtgaggaggcgcaggtgagggggtgcaggtgaggaagtcaggtgaggaggcacaggtgagggggcataggtaagggggcgcaggtgagggggcgcaggtgaggaggcacaggtgaggggtgcaggtgagggggtgcaggtttggtaccaggtgagggggcccaggtgagggggcgcaggtgaggaggtgcaggtgacgaggcacaggtgaggaagcgcaggtgcagaaacacaggtgaggaggcacccactgcttcctcctgggctttggttgaccaccttcctttggaaatatcccttctctctctctgatcctacagaaagctgcctcagcttgacctggaaaggtgttccctcttgtgtgaaacactctgctcagcaccatgctattaatatctaggtgctaattgtcctagtacagtctcttcatctctctcactatgc

SEQ ID NO: 12049 - DNA, 1606 bp, Artificial sequence
  DNA replication origin
gaaagtacaggaggaccctgggagtttggggaacaaaaggaggccgggagggcctggtggacccaatgacccctcagggctcgggaccgctaggcccgaggggtggggtcaccctacctttctttatggctgtggtgctcctccatggaaaccccagctctgaccacagggtgaatgcctctctccggaagtctttagtagacaagaagccgcctggcctcggggcttaggtgacgcgtaggtgaccagggcaggaggcctctaggggtaggggatggggaggaggcagtgagggcaggcccagggccagggccggggtgggagaccccggctgagaagccgtgtgagaatggctggaaacgcccaaccctcccagcagggcttcaaccactcacggaactcctggctccccagcgggtgaggaggagccacggccctccccaggagccccagccaagctccgagagtactggagcctcccagctctgtgtgggggagccgccgggtgtgtgtgtggggggagggccgtgtgtggggggagctgctgtgtgagggggagtcaccgtgtggtggggggagccgccgggtgtgtgtgtggggggagggccgtgtgtggggggagctgctgtgtgagggggagtcaccgtgtggtggggggagccgccgggtgtgtgtgtgtggggagggccgtgtgtggggggagctgctgtgtgagggggagtcaccgtgtggtggggggagccgccaggtgtgtgtgtgtggggagggccgtgtgtggggggagctgctgtgtgagggggagtcaccgtgtggtggggggagccgccgggtgtgtgtgtgtggggagggccgtgtgtggggggagctgctgtgtgagggggagtcaccgtgtggtggggggagccgccgggtgtgtgtgtgtggggagggccgtgtgtggggggagctgctgtgtgagggggagtcaccgtgtggtggggggagccgccaggtgtgtgtggggggagggccgtgtgtggggggagctgctgtgtgagggggagtcaccgtgtggtggggggagccgccgggtgtgtgtgtgtggggggagggccgtgtgtggggggagctgctgtgtgagggggagtcaccgtgtggtggggggagccgccgggtgtgtgtgtgtggggagggccgtgtgtggggggagctgctgcttacgtgtggggagccaccgtgtcgggggagccgccgtgtagcgggggagctgctgtgtgagggggagccaccgtgtggggggaaccatggtgtgtggggggggagctgtcgtgtgcagggaagccacagtatggggggagccgtcgtgtgtgtgggagctgccctgggggggaaccccagtgtggtggggggaagccaccatgtgcgggggagccgcagtgtgtgtgtgggaactgctgtgtgtgggggagccgccgtgggagggggagccgccgtatttgtggaggagccgccgtgtggagggttggagacgggagccgtgtagagggggagccgccagatgtgggtgagccgtcatgtgttgggggggaagccgcagtgtatgagggagccgccgtgtgtggggggg

SEQ ID NO: 12050 - DNA, 2639 bp, Artificial sequence
  DNA replication origin
ggaaccctgaggtatctatgcctgggtgtctggcttctttggcagctcctgcctgtggaattcattcacatggttgcacgcagccaagcacttccatcctcattgctggttagggttgcactgtgtgaagaatacagctgattgccccagatgcagctttgtgcttagtgatcacccgccagatgcagctttgaaatttgtgatcaccaaccagatgcagctttgtgcttagtgatcaccgaccagatgcagctttgtacttagtgatcaccaattttcatctcgggggctcttctctgatctgtcatcctctcttcatgttaacctgctctggtttcacggacagactatccctttataaaactgaaaacctgaaaacctcccttctctttatttggttttaattttgattcctaaaggtattttttgtttaaaataaaaagaacccttcagctgttgggtggcattttcaggtagttcatctttccaggaacgagcgtctgtgcagagtatgggtggaagtggtggtggcagagtggaagaggccatggggtggcagagtgtggatggtggtggtggtggtaaagtgtggatggtggtggtggtagagtgtggatggaggtggtggtggtagagtgtggatgaaggtggtggtggcagtgtgtggatggtggtggtggtggagtgtggatggtggtggtggtggtagagtgtggatggtggtggtggtggtagagtgtggatggtggtggtggtggtagagtgggggtggtggtggtggtagagtgtggatggtggtggtggtagagtgtggatggtggtggtggcagagtgtggatggaggtggtggtggtagatagtggatggaggtggtggtggtagagtgtggatggaggtggtggtggtagagtgtggatggaggtggtggtggcagtgtgtggatggtggtggtggcggagtgtggatggaggtggtggtggtagatagtggatggaggtggtggtggtagagtgtggatggtggtggtggtggtggcagagtgtggatggtggtggtggtggcagagtggcagagaccgtggggtggcagagtgtggatggaggtggtggtggcaaagtggggatggtggtggtggtagagtgtcggtggaggtggtggtagagtgtggatggtggtggtggcagagtgtggatggacgtggtggtggtagagtgtgtgtggatggtggtggtggtggtagagtgtggatggaagtggtggtggcagagtgtggatggaggtggtggtggcagaatgtggatggaggtggtggcggcagagtgtggatggaggtggtggtagtgtggatggtggtgaaggtggcggtagtgtggatggtggtcgtggtggcagagtgtggatggaggtggtggtggtagagtgtggatggaggtggtggtggcagagtgtgggtggtggtgttggtggtagagtgtgggtggtggtggtggtggtacagtgtggatggaggtggtggtggtagagtgtggatggaggtggtggtggcagagtgtgggtggtggtgttggtggtagagtgtggatggtggtggtggtggtacagtgtggatggaggtggtggttgtagagtgtggatggaggtggtggtggtagagtgtggatggaggtggtggtggcagagtgtgcgtggtggtgttggtggtagagtgtgggtggtggtggtggtagagtgtggatggaggtggtggtggcagagtgtgggtgttggtgttggtggtagagtgtggatggaggtggtggcagagtgtgggtggtggtgttggtggtagagtgtggatggtggtggtggtggtacagtgtggatggagatggtggttgtagagtgtggatggaggtggtggtggcagaatgtggatggaggtggtggcggcagagtgtggatggaggtggtggtagtgtggatggtggtgaaggtggcggtagtgtggatggtggtcgtggtggcagagtgtggatggaggtggtggtggtagagtgtggatggaggtggtggtggcagagtgtgggtggtggtgttggtggtagagtgtgggtggtggtggtggtacagtgtggatggaggtggtggtggtagagtgtggatggaggtggtggtggcagagtgtgggtggtggtgttggtggtagagtgtggatggtggtggtggtggtacagtgtggatggaggtggtggttgtagagtgtggatggaggtggtggtggtagagtgtggatggtggtggtggtggtacagtgtggatggagatggtggttgtagagtgtggatggaggtggtggtggtagagtgtggatggaggtggtggtggcagagtgtgggtggtggtgttggtggtagagtgtgggtggtggtggtggtagagtgtggatggaggtggtggtcgcagagtgtgggtgttggtgttggtggtagagtgtggatggaggtggtggtggtagagtgtggatggtggtggtggtggtagagtgtgaatggaggtggtggtagtgtggagagtggcggagaccatggggtggggttatctggggtattattcaggatgggaaatgctgcaaccggcaatgcacaaacgcatcgtatgca

SEQ ID NO: 12051 - DNA, 1008 bp, Artificial sequence
  DNA replication origin
ccttctcccgccttccccgcccctgttacgctcatgtcccattcactccagagaacacaagcggttctggtcaggcggggtgacctctgccttggagggagccacagccatctgctctgtgagaggcggacgggccgcacccaaggcctagtgcggggggtgtggaggggcgtgttccctctgagctggcttgcaggggcagcattcaaagggacttgcatggaacatgttgtcttttccaaaatatcaaagatgagtaaaaatgcatatatctaaagcagtaggggaggttagctggggacccccgagctcttggtcacagaagagggtaagtataggctgcacaactgacccccagccttcctgttgcccttttaaaggagagcaccctaaggaactggtcacgtttctaaaatgtgtgtgcatgggagggtgtgtgcgaggatgtttgtgtgcatggatgtttgtgtgcatgagagtgtgtgcatgggagtgtgtgcatgggactgtgtgtgcatgggactgtgtgcatgtgagtgtgtgtgcatgggactgtgtgtgcatgggagtgtgtgcatgggactgtgtgcataggagtgtgtgtgcatgggagtgtgtgtgcgtgggagtgtgtgcatgggactgtgtgcatggagtgtgtgtgcatgtgagtgtgtgcatggagtgtgtgtgcatgggagtgtgtgtgcatgggagtgtgtgcatggagtgtgtgtgcatgggagtgcgtgcatgggactgtgtgcatgggaatgtgtgtgcatgggactgtgtgcatggagtgtgtgtgcatggagtgtgtgtgcatgggagtgcatgcatgggactttgtgcatggagtgtgtgtgcatgggactgtgtgcatggagtgtgtgtgcatgggactgtgtgcatggagtgtgtgcatgggactgtgtgcatggagtgtgtgcatgggagtgtgtgtgcatgggagtgcgtgcatgggagtgtgtgcatgggagtgtg

SEQ ID NO: 12052 - DNA, 897 bp, Artificial sequence
  DNA replication origin
tcccctactgctttagatatatgcatttttactcatctttgatattttggaaaagacaacatgttccatgcaagtccctttgaatgctgcccctgcaagccagctcagagggaacacgcccctccacaccccccgcactaggccttgggtgcggcccgtccgcctctcacagagcagatggctgtggctccctccaaggcagaggtcaccccgcctgaccagaaccgcttgtgttctctggagtgaatgggacatgagcgtaacaggggcggggaaggcgggagaagggttgaggggaatgtgtgggatctgcctccatcgagctgcaggcgcgggtctgagccctgatagcaagtgtgagggctggtgctgacgcagggctcccccgagacccagtcgggtgtggagctgcctgggaggaggcctgagggggtgggggaggctaagaacaggagaagaagcagctttttctcatgatggagcgggagctaagaacaggagaagcagcttttcacatggtggagtggcggggcgaagaacagaagaagcggctttttcacatgatggggggagctaagaacagtagaagcagcttttcacatgatggagtaggggtggcgaagaacagaagcagcagctttttcacgtgatgggccgcggtgctggattttgtgccaacctgactgggctgcgggtgaaacattatcccgggtgtgtccagagggtgttttgggcgagatcagcatttgactcgctgcactaagtaaagtgggtgtcctccctgatgtgtgtgtgtgtgagggctcatccagcagcagaaacctcaacagaacacgcaccaggaaccccctgacccccggaggagaggggagttcttcctgcctcatagccttcgaa

SEQ ID NO: 12053 - DNA, 1070 bp, Artificial sequence
  DNA replication origin
ggaggggacagggcaggagaggggacaggggaagggaggggaaggggaggagaggggacaggaaggagaggggatggggaggagaggggatgggaggagggggatggggaggagggggatggggaggagaggggacaggaggagaggggacgggaaaagggaggggacggggaagagacgggagagggaggagaggtggcaggggaagggaggggtggggagaagaggggacaggggaagggaggggatggggaggggaggggacagggaggagaggggaaggggacggggaggggatggggaggagaggggatcgggagaagagctgacaggggaagggaggggatgggaaggagaggggacagggaaagggaggggacagggcaggagaggggacgggggaagggaggggaaggggaggagaggggatggggaggagaggtgatagaggaagggaggggtgggtagaagagggaacaggggaagggagggaatggggagggaaggggacggagaggggaggttggggctccacacgcttggtcattcatctcgtcagggtttctttggtttggtgtggctccctggcagctgttgtttctttgggatgctaagaggaggggagaccgctttcttcagatgtgtgcattccgctatgttgaggaagctggcttctcagaggacgcaggtgcaactccaggatcaccggaggccgagtgtaaggcctggcccttggtgacatggctccagtgcttcctggcagaggccccaccctccacagcccaaggagaaggctcagtcctaaagtgaccaccaactcggggtgggatctgatgtcacgggggtgcaggggggtcagacagaggacggcctaaggaaccaagcatagtcacgcacctttcacgctgttgcctccaactttgagattgggccggatctgacaagaaatgctttcaactccatgggaccaagtccttggatcaaaagcaaaggacgcagacttatatgtgtttacgcagagtaattcactttgaggaagcacctttgtttacccttcatttaaagagtgc

SEQ ID NO: 12054 - DNA, 1918 bp, Artificial sequence
  DNA replication origin
agggacttggaacctgctcgcacctcatttcgtaaaattccaatcacaggccccttagacagccattctacctttgctaaacatcagaccacagaaagcgtggggcgtctttgccaggctcatgttgggggccctgtgtccctgtgagatggggtggacgttgtgcgtgtccaagtctcttgcacccaacctctttcttcaaaggccttttcatttggtggctctcctgcgtactcaggggtcttccagctcgcaaaacaatgtgtgtgtgttgggggcctgggctcaggaaagagggggcatgcagcgtctccctcctgacttcttctgtggctgccaagggtgtgttgctgctgtgacccacggcagggcacctgcaggccactgtccgcaacccagcacctgagtcctgctggctgcgcctctgccaggcctgacccagtggtgagaactgggccaggctgcgcctccccgcacctcacttgggacctgagaagaggcatggagccgagcgcaccgttccccagaaatgttcccggagacagacgtgctcggaggctctcttcccaatccagcaccagaacccccatctgcagcttcctctccacagagcagcccttctcctctccgcgtggaactgacagtcacctccaagcaggggacagctccacactgtacaggacgtctggtcacacctgtggacagaaaagccccacacgtctctgaacatgaatggagtcgctgcatcagtgggttcccatgatagacgtggggtggcagctggacgtgtgtgcgcatgtgtgtgagtgtgagtgcgtgtgcaggcggcgggatgtgtctgcagagtgctgtgatgggtgagtgcctggctgtgggtgagttggtgggtgtgtgagtgcctgtggctgtgggagagttggtgtgtgtgtgagcacctgactgtgggatagtcgatgagcgagtaggtgggagtgcgtgagtgtgtgaaggaggtgagggggagggaggtgacaggaaggagaggtgatgggggaggtgaggtgacagggaggagaggcaatggagagggaggtgacagggggatggaggtgacagggaggagaggtgatggggaagagaggcgacgggtgggggaggagaggcgacgagaaggtaggtgatgtgacggggaggagaggtgacagggtaaaagaggtgataggaaggagagaggatgaggaggagagttgacaggggaagggagaggatggggaggagatgggatgggaagggaggggacagagaggagaggtgacaggggaagggaggggatgtggaggagatgggatgggaagggaggggacggagaggagaggtgatggggaagggaggggacaggaaggagacgggatggggaggagagagtatggggaggagaggtgacagggagaagagaagatggggaggagaggggatggggaggaaaggagggacagggaggagaggggatggggaggagaggggacaggggaaggaagggaacagggaggagaggggacggggaagggaggggacagggaggagaagggacaggggaagggaggggacagggcaggagaggggacaggggaagggaaggggcgaggaggagagggaatggggaggagaagggatggggaggagagctgacaggggaagggaggagatgggaaggagaggggacagggaaagggaggggacaggggaggagaggggacggggaggagaggggatgggaagaggaggtgacaggggaagaggggacagggaggagaggggatgaggaagagaggggatggggaggagagctgacaggggaagggagggaacagggaggagaggggacagggaagggaggggacagggaggagaagggacaggggaagggaggggacagggc

SEQ ID NO: 12055 - DNA, 960 bp, Artificial sequence
  DNA replication origin
gacgcgacagggctgtgcttcattgtacttcagtaaaacagcagaaaagcgtgttattcagctattccgcataaaattattaagagtatgcagagacagggagcaggaaacgctttgcatgtttcaattatttattgccccgtaactaaccgccccaaagctcagcggtgaagcaacagtggatcatttcccaccactctggttggctggacagcttccactatctcacctggctcctcagtgtgactggggggtggggggtggtggggctgggggactcgggggctgggagctggcagggctgggggaatggaggcctggcggagatggggggctggtggggctggggtgctagcagggctggggtctcaggggcctgggagctgacaggcctggggactggcaggacttggggacggggggtgctgggggagctgggggctggcagggctgggggcctgggggcctggagggctgggagctggcagggctgggggactgggggcctgggggctgggggctggcagagctgggatactgggggctgacagggctgggggactgggggcctggagggctgggagctggcagggctgggggactgggggtctgggggctagcagacaaggctgcacctctgtcccaagtcctttcttttcaggcttcttcacagcacagaagactcaggggtccaagagagtaagaacaaagctcaaagctctgcaaccccagctccaagacacacatgacatccttttgctacattctatgatggaagaaactccaaggcgaagcgagcccgcctgtcagtcgaggggtagcaaagctctggggtcatggatcatgtttgtcatccaccacgtgagaccatgtgagggtggtgagctagaattaggtgaacattttaaaaattaaaataggctgtctaatactgattttctcctcttcacatttccttca

SEQ ID NO: 12056 - DNA, 1041 bp, Artificial sequence
  DNA replication origin
tctacagctgcaggcaactttaaggcattttcgtttggaccagagcattctgtctgttgggaacctgtttcagtgaaatttgttcagattgtaattttttaaactgaaaaacagaacaaaaacataacaaaacagaactgcataactcagatctcatgagccatggacttgtcctttggttaagaaccaggtacaaggagtgacaaggtgaggagggaagagggaggagaagggagggaggagaaatgggatgaggagtaaggaaggaggagggatggggtgaagaaggaggagagatggggtgaagaaggaggagggatggggtgaagagggaggagggagagagacaaggtgagaagggaggacaggtagtagggagggatgaaaggagagaggaaggaggagagaggaggaagagtgatggggtgaggagggaggagggactgattgaggagggaggaggggtggggttgggagggagggaggaggaagagggatggggtaaggagggaggagacaggcaggaggagggaggagagaggtcgcatcgctccactgcgctgctcatgtccaccgactcggggactccagccagccaggcagctgctgggaaagccagtgtgtctgccctttcacatgactcagaacacatctgaaaaccagccagccggtctctgacagggcatcagaaagtgccacctatggaatcccaggtcgccagctgcagtttgtccctccgctgccagcgctttgcagtgtccgttttcccgctctcagacgaggacatggtcgggtctgccccgcaggctgggcgaatcctcgccgcccggcacacaacgcgtcctgagggctgtgggttcttcttgcggcttgctttggtgcacctggctaaatattaactgggctggcatagcggagaagggcttgcggtgtttaatgaagtggacatttattcctaaattgtcaaccggctgcctcccgtccttctgttcctggcatgcttgggagctgaaaaggagagcagctcttgaggtcgctcca

SEQ ID NO: 12057 - DNA, 1598 bp, Artificial sequence
  DNA replication origin
gtgggtgagggaatgagggaatgcatgggtgagggaatgagggaatccgtgggtgagggaatgagggaatccgtgggtgagggaatgagggaatccgtgggtgagggaatgagggaatccatggttgagggaatgagggatccatggatgagggaatgaaggaatccatgggtgagggaatgagggaatgcatgggtgagggaatgagggaattcgtggatgagggaatgagggaatccgtgggtgagggaatgagggaatccatggatgaggaaatgagggaatgtatgggtgagggaatgagggaatccatggatgagggaatgagggaatccatggatgagggaatgagggaatgtatgggtgagggaatgagggaatccgtggatgagggaatgagggaatccatggatgagggaatgagggaatccgtggatgaggaatgagggaatccgtggatgagggaatgagggaatccgtggatgagggaatgagggaatctgtgggtgagggaatgagggaacgcatgggtgagggaatgagggaacgcatgggtgagggaatgagggaacgcatgggtgagggaatgagggaacgcatgggtgagggaatgagggaacgcatgggtgagggaatgagggaacgtatgggtgagggaatgagggaacgcatgggtgagggaatgagggaacgcatgggtgagggaatgagggaacgcatgggtgagggaatgagggaacgcatgggtgagggaatgagggaacgcatgggtgagggaatgagggaacgcatgggtgagggaatgagggaatccatgggtgagggaatgagggaaggcatgggtgaggaaatgagggaactcatgggtgagggaatgagggaacgcatgggtgagggaatgagggaacgcatgggtgagggaatgagggaatccatgggtgagggaatgagggaatgcatgggtgagggaatgagggaatgcatgggtgagggaatgagggaatccatgggtgaggaaaggagggaatgcacgggtgagggaatgagggaatccatgagtgagggaatgagggaatgcatgggtgagggaatgagggaacgcatgggtgagggaatgagggaacgcatgggtgaggtaatgagggaatgtatgggtgagggaatatatgggtgagggaatgagcgattccatgggtgagggaatgagggaatccatggatgagggaatgagggaatccatggatgagggaatgagggaatccatggatgagggaatgggatccagagtgcagagggatgtggagcagggcaggagggcagaagtgagattgtacgcatgcagttttagagtggcagctgccgccatccacagtcgcggtctaccaggcccctgcatgcggatggtgctcagagcacgcgaaatctccccttcatttccacacttccttcacagccttagaaatcctgctgctgcctcgatgcctccctgctacggactcttcttgtgggttttttccatcaggtgattagtgggttgttttctgggttgaattgtattttgccgctactgccttatatttgcagcctctccagagcgt

SEQ ID NO: 12058 - DNA, 1590 bp, Artificial sequence
  DNA replication origin
gttctggaagccggaagtctgagacgaaggcgtcagcagggctctcatccattcgccatgctgggtctgtcacggcctgaatgctttcgtccccaacgttcatagggtaggaaccttcatcccacagtggcggtttaggaggcgactaatcaccgttgggaggtggcaaagtcatgagggtggagcccttgtgaaggggatgggtgccctcccttacagaagaggcccctgagactccatcaccccttccgccacgtgagggcacagcgagaaggcgccatctgtgagccaggagctgttctccccagacgtctaacctgccttcgccttggcctcccagcctccagaactgtgtgtgtggcgcttctgtcacgcaactaggatgcactgagacggggcctggggaaagcgccgttttatgcgtcaggagagggtggggccaaggtgggagagggtggggccaaggtgggagagggtggggctaaggtgggagagggtggggccaaggtgggagagggtggggccaaggtgggagagggtggggccaaggtaggagagggtggggccaaggtgggagagggtgaggccaaggtgggagagggtgaggccaaggtgggagagggtggggccaaggtgggagagggtggggccaaggtgggagagggtgaggccaaggtggggagagggctttgtgcacaactctcccccggggttttgctgtgtctgctccatcctcgaaaagccaaacgcacactcctagatcttctttcgggggatgcttaggaaaaaagactggaatggaatagtgtcaggggttgttaatgagaagagccagagaaatgcctgagatacaggaaaagcccccagatgctcccttcagcagggccctgggcatcctctggcctcccagtggctggggctgagctaagaggaggctcatttgttgcaagaatggcgcagaggggtcttggatgcagggaaggtgccaaaagaacttgtgtctagggctcgggggaagcaggagtgtggagtccagggtccggagccgtggctcctaggtcacccattgacgagggcaggattcaagcttatggtgtaggagggccgagtgggcgccagcgctaggggcgtcgagggccgcgtgagtgccagcgttaggagcatgggagggcagcgtgggtgccaaggctagaggcgtcagaggaccatgtgggtgccagtgctagggatattggagggccgtgtgggtgccagctctaggggtgtcagagggctgcgtgggttccagcactaggcgtattggagggctgcatgggtgccagtgctagggacccctcccagttcagaaggactttcaactcccgcctcgctgccaaacccactgcctggggaggggtctggaaaccgtccttgaatttgcctcccgtctccccatccttagcatcatcctgactcttcctctgccctcctcaccccaaagtcccagaatgccaggctgctgcacagacgccccctcacagcccagaaccccggccctgcccatgcagggacactacccgcgcaaagaaaacacgggcgatgagaaatgtc

SEQ ID NO: 12059 - DNA, 2115 bp, Artificial sequence
  DNA replication origin
  misc_feature (1)..(542): n is a, c, g, or t
nnnnnnnnnnnnnnnnnnnnnnnnnnnnnnnnnnnnnnnnnnnnnnnnnnnnnnnnnnnnnnnnnnnnnnnnnnnnnnnnnnnnnnnnnnnnnnnnnnnnnnnnnnnnnnnnnnnnnnnnnnnnnnnnnnnnnnnnnnnnnnnnnnnnnnnnnnnnnnnnnnnnnnnnnnnnnnnnnnnnnnnnnnnnnnnnnnnnnnnnnnnnnnnnnnnnnnnnnnnnnnnnnnnnnnnnnnnnnnnnnnnnnnnnnnnnnnnnnnnnnnnnnnnnnnnnnnnnnnnnnnnnnnnnnnnnnnnnnnnnnnnnnnnnnnnnnnnnnnnnnnnnnnnnnnnnnnnnnnnnnnnnnnnnnnnnnnnnnnnnnnnnnnnnnnnnnnnnnnnnnnnnnnnnnnnnnnnnnnnnnnnnnnnnnnnnnnnnnnnnnnnnnnnnnnnnnnnnnnnnnnnnnnnnnnnnnnnnnnnnnnnnnnnnnnnnnnnnnnnnnnnnnnnnnnnnnnnnnnnnnnnnnnnnnnnnnnnnnnnnnnnnnnnnnnnnnnnnnnnnnngtggtggtggtagaggtggtggtagaggtggtggtggtagtgaaggtagtggtcatgatggatggtggtggaggtaatggtgatggcagtggtgatggaggtaatggtggtgatagtgatgatgacagtgtggtggtgttggtgttggtagaggtgatgatggtgatggtggtgatggtggtattaatgattgagactgtgattgtggtggtggtggtggagggtataatgatagtggtaatggctgtggaggtggtggtggtagtgagaatgatggtggtggtgatgattgaggcaatggttgtggtggtgatgatatgtatgtgtttgttttttccgtgcatagggttctgatggtggtggtgtggtgttgtgtgtctgtttctgttctgtatgtggggtggtggaagtggtggtggtgatggtgccatacgtgtgtatgtgtcttctttttgtggggagggggaagtgatattgatagtggtgacagtggtggtggaggtggtggtagagatagtgtgtgtgtgtgtgtgtcccgtgtagtgcagtgatggtgtggtgtgattctgtgtgtgtttgcgttctgtatgtaggaaagtgttggtggtggaggtggtggtgataatggtgaaaatggtggtggtggtggagatggaggtgataatggtggtggtgatggtaatggtgtgtgtgtgttctctgcgtagggaggtgatggtgtggtgtgctgtgtgcatgtttgtgtttgtgtgtagggaggaggtgatggacgtggaggtgatggttgtgttggtaatggtgtgtgtatgttctctgcatagggaggtgatgatgtggcatagtgctgtgagcatgtttgtgtttgtgtgtagggaggaggtggtggtggaggtggaggtgttaatggtggtggaggtggtgatggtaatggtgtgtgtgtgtgttccctgcataggaggtgatggtggggtgctgtgagcatgtttgtgtttgtatgtaggcaggaggtggcggtggaggtggaggtgatgcttgtgatggtaatggtgtgtgtgtgcgttctccgcatagggaggtgatggtgtgtggtgctgtgtgcatgtttgtgtttgtatatagggaggaggtggtggtggaggtggaggtgataatggtggtggaggtggtgatggtaatgctgtgtgtgtgccttctctgcatagggaggtgatggtgtggtgtggtgccgtgcgcacatttgtgtctgtatgtctgtgttctggcttaagaacccagagggttaaggttgtggtggtgatgtgcctcatacaaggcttcgagactgtttgcagcttagaagtctgggaatttctgtcatgcctctgcagagcctcctgagatgtgatgtgccagttggtagtttgttttctgacactgtccttggcgttgctgtgcctcagtctcctgcagacatcctttatagctctatggttcagaaattggccaaacccatcggagagcatttatatttttgcctggactccttcaagagcagtattgagttccataaacttccgaccgcctttgtgagagt

SEQ ID NO: 12060 - DNA, 1719 bp, Artificial sequence
  DNA replication origin
tgtgggctggagggacattcactgtaatgggattccatcaccagggatcaaggtcttcagtactggaggctgccgtcaaagcatgccatcacacctagggaactgctagccagactctcctacgaatgtaatggttaattttcaataattgattattcactgattaacaagtcttaattagattcctctctggtttaccttggaccctgacctcccgaagtagggtagtgtcaggtacatgtcactgttgaacagcaaccatggaacagtcttctatttagatcctaagtgctctgagctctcagccagggaagttggtgattttgtttagtgagactgtttttctttgtttctcttgaagtagagatgcagtgtgaaaacttcattcatgcaagaacgaggcatgtgaaggaaggaaaatgtgaagtgtggtgggagagcactgggtggccttgcagtccctccccacgtgataacgatggcagtgcagctgtaggtggcagcgcggctgtagatggtagtgtgactgtagatggccgcgtgaatgtagatgttagcgccactgtagatggcagtgcggctgtaagtggcagtgcgactgtagatggcagtgtggctgtagatggctgttcgactgtaggtggtagtgcgactatagatggcagtgcggctgtagacagcagtgcggctgtagacagcagtgcggccgtagacggcagtgtggctgtgggtggcagtgcaaccgtaggtggcagtgtggctgtaggtggcagcgtggctgtagatggcagcgtggccgtagatggcagtgtggctgtagatggcagtgtggctgtagatggcagtgtggccgtgggtggcagtgtggccgtgggtggcagtacaaccgtaggtggcagtgtgaccgtagatggcagtgtggctgtagatggcagtgtggccgtgggtggcagtgtggccgtgggtggcagtgcgactgtaggtggcagtgcgactgtagatggcagtgcggctgtagacagcagtgtggccgtgggtggcagtgtggccgtgggtggcaatgtggctgtagatggcagtgtggccgtagacggcagtgtggctgtgggtggcagtgcaaccataggtggcagtgtggctgtagatggcagtgagactgaagatggtagtgtagctgtagatggtaatgtgacttaggtggcagtgggtgtaaatgacagtgtggctgtagatggcagtgtggctgtagatggcagtgtggctgcagatggcagttggctgtaggtggcagtgtggctgtagatggcagtgcgactgtagatggtagtgagactgaagatggcagtgtagctgtagatggtagtgtgacttaggtggcagtgggtgtaaatgacagtgtggccgtagatggcagtgtggctgtaggtggcagtgtggctgtagatggcagtgcagctgtagatggcagtgtggctgtaggtggcagtgtggctgtagatggcagtgtggctgtagatggcagtgagactgaagatggcagtgtagctgtagatggtagtgtgacttaggtggcagtgggtgtaaatgacagtgtggttgtaggtggcagtgtggctgtagatggcagtgcgactgtagatggtagtgtgactgaagatgatagtatgactgtagattgtagtgtgactgtagtgcctcaggtctgagcacctaacattt

SEQ ID NO: 12061 - DNA, 3101 bp, Artificial sequence
  DNA replication origin
tggagatgcagggtggctctcatcccggactgggcacctgcttgactaggggtgctgggcagactctgcagcctgccggggctccgcactggggctgatggtgaaagctcaactttagcattagcagtccaaggctgaagcttgagatggaagctctgtctgagtgggctctgtccctgttgcctggcatgcagcgtgcgccggtggcagcaggtgcagtgttgggaatgctgcaggatggaagggtctccaccgctgtcccctgcagtggccaggcttgggagaaggtgcagcagccacgctccgagccaccctgggtctctgctgcagcccccactgtcccagcagctcatcgttactcagcccaggccaggcggcgccctggccctgcaaccccacggtgggcccgtgggccatgcccctcgcactccgtcagcctctctgaatgggggtcacgaagcagccacatcacacaaagtccgctagtcctctggctatgcgggcagcagaactgggtgtgctgggctgggtcgcagcatcagatcccagcccagcaggcagagggcaaggcccaggcaggtgctggcaccagaccaagagcggggcaccctcagaacacggtcggcactgtccattccctggagtcggggtgcacatggcagtcaggagggagcagcctccccacctgcttcccgggagactgtgacctaattcttatttccagccacctcgcttggtgcttggcacacctgggaccagctccacttccactcaagagagatttctggctcagcttcagtagagggattccagagaactctagaagatgccgtgacagggaaggaaggcacaggctgtggaatcagtctgggttctgccctgatctcatgcgagaaggagctgagtttgccttggcagtcatctggtttcttagattcttagtggtttaatctcaaaagagctgcaatagcagtgtttgcctcggtcagtgtgaagctgcaagggagcgtacacccgccccaggccgcatctggagcactgtgggtgctggcagctatcaccctccatttcctctcttttgctgaatagaaagtggcttcacctggagaccatggcgtccacttgacgagtccacgttgctgtcatcttttattggaagtgtaagtgatatccacacatttgtatttttttggcattgcaaaagctttaaaaagtcattttcctcaggaggaatatcctggtgaaggttttttttttcttcctttttgccatcaataagctcttctagaaatgcctgttctttggctggaaaaggttaagattcaggtcattctacaaaacccaccaagcagccatgggaaatacgaaatggatcttcaaattacagaccctactgaagggggtaaggagtagaaggctgaaagaaagactgttcgttcactttcaagcatgcatcttccactgctgtgagacgccgatgcccaagtgtaagtggtgactggcacacatgacagccaccagcttctattctctggagccaacaaaggcccattccaggtgttgccctattccaggattccggccggcagggcagcttccagtgacacctgttttcctgtgattctaacagcacattcagtgcaaggcactttattatgagtggaatctttcaggcaaggataatatgtttccagagtgtcttagggactagaaacggagttaaggaatatgaataatatccacgagaaagactgaggagagaaaagtaaacaaaaacacataagaaagcagacacgaagccaggtgggggtgcaggcctctctagctggggaaggagctcactttgtccatggggttgacggagagggggtggcctcagggttgcagggtctcttgagcagctggagctggacaaatagagggagcagagttcagcaggggaggtcagtggcagaggtcagtggtagaggccagcgggggagatcaatggcagaggtcagtgggggaggtcagcgggggaggtcagcagcagaggtcagcggcagaggtcagtggcagaagtcagcagcagaggtcagcaggggaggtcagcagcagaggtcagtggcagaggtcagtgggggaggtcagtggggaaggtcagcgggggagggcagcagcagaggtcagcagcagaggtcagtgggggaggtcagcgggggaggtcagcgggggagggcagcggcagaggtcagcggcagaggccagtgggggaggtcagcagtggagttcagtggcagaggtcagtggcggaggtcagcgggggaggtcagcgggggatgtcagctgcggaggtcagtggcggaggtcagagggggaggtcagtgggggacgtcagcggcagaggtcagcgggggaggtctgcggtggaggtcagcagggaaggtcaatggcggaggtcagagggggaggtcagcggcagaggtcggcggaaggtcagcgggggaggtcagcggtggaggtcagcggcagaggtcagagggggaggtcagtggcagaggtcagcaggggaagtcagcggcggaggtcagtgggggaggtcggtgggggaagccctggggtttcaaagtgctctgtgatgacccctttggaactggagacagaggaaggaactggtggtcaaggacgggctgggggccatgcccattccatcctccttttgaccctcctcgctctgttgcaaccctgggaaagtcgtggaagctctctgggctccactttcctcatctgtgaaatggggacacatcctatttgccagcttggtgagggtgtgtatctgacagaggaccctggagatgtcctgggaccagggtgtcacttcctcgccccaaaccaggaggatcttcgtcctgcccattctgtggggtccggggtggcaggtgtctgggtgaggatttgtaggtcagcacccacagcatcacactgaagggggcttggctgttgctgagtgtgaacagggggattttctgagttttattcctacagtggccccttgtgccctactgaggagtcaggtgtcccatcccaacatccaaaggacacttacaagctcaggccccagg

SEQ ID NO: 12062 - DNA, 1459 bp, Artificial sequence
  DNA replication origin
agtagagtagggttgtatatagtgttatctcaatctagtataagttaagaaattatctgtggttgattgaagttcaggtggacccaggtgccctgtatttgcctgctgcatgctagggtactgcctagcacactatgctgggccaatgtgtgtgtgtcttaagggaagggcagcttttcatcgttcaactccctgaaatttttttaagggagaggggaccaaaaaaacccttcattccctcaagtgaaatgtctcacccactgcaatggcgataactcggagggtgagtggaatggatggaaacccttgaagagcagataagaatttaggtggagggtcctttgctctctcaggcaggttggtggatgcatgggctttgggcagatgcctgaagcggggtggatgtcctgagtaagagagagtagggtgggtggtggggggtaggggcagatggtgaggggtaggtgtggattatggggggtaggggaggatggtggggggtaggggaggatggtgaggggtagtattgggtgattgagatggggtggatggtgaggggtatgggtggatggtgaggggtatgggtggatggtgaggggtatgggtggatggtggggagatggatgatgaggggtaggattggatggtggggttggggaggatggtgaggggtagtattgggtggctgaggatggggtggatggtgaggggtggggtggatggtggggagcaggggtggatggttgagtgcaggggtggatgacggggtatggggtggacggtgaggggtaagggtggatggttgagtgcaggggtggatggctgagtgcggtggtgatggtggcatgcaagggtgaatggcaggaatggatggtgtattgtggggatggatgatgggggtgggggtaggggtggggggtggtgtaagggtggctggtttagtgcagaggtagatagtggatagtgtgcaggggtggatgggggcatgggggtggatggtggcatgcaggggtggatggggagggtgaggcttgcatctctggtgagccttgagtgagactggagcctgtgggttggagctgcttcatctacaaggagacaggagagttttgtgtggtgttgacattgctattgtattattctgcctgggttgctgtctgtggactgggtagtttcagcttaaaccacatacattgattcctcacagttctggaggccggaagtccgagatccagggggcagcaggcagattgcattttgaggcttccagacttgcccagcagcccctgtccctctatgcttgtgtgccgagacagcaagctctctggtggctcctcttatacggacagcaatcctattggctcagggacccacccttatgaccccgtctaaccttaacgacctccttacaggcccctgctccatgctgaggggtggggcttcccctgggaatttgcag

SEQ ID NO: 12063 - DNA, 1732 bp, Artificial sequence
  DNA replication origin
tcgtcacggccgcccgccgacatggtcctggccgcgcctcctcagccgcgcggggccggggccggaggacgggccgaggacgacaggtccgcgggggcccggcgcccctcgccaccccccgccggccgcctccgcctccgcggctgcctccgcctccgcggccgcgccgcgtcctccgacttggcctccgcctggggctcagtccgcgccgcgccgcgccgcctcagccccgccggccggtgtgcgcccggcgcccgccgcccgccgcccgcacccgcccgcgccccgcccgccgccgtgcgcgccgccgcccgccgtgcgcgccgccgccccgcgcggcgccgccgcacctccgggccgctccactaggtgctgctgccgcggccgccagggagggaggtgtcggagggcgggccccgcgcggtgctagggttccgtctggactggcggtggtgggtcccaaccggcggtaccgggttccttcccgaccagcggtgctaggttcggttcggacgcgcgctgctggatctaaatgggcagtgctgggtccgatgggtggtgctgtgttgggtccggacgcgcggtgcagagtccggacgggcggtgctggatccaaatgggcggtgctggatctggacgggcggtgatgggtccgatgggcggtgctatgttcggttcggacgggcggtgctaggtctaaatgggcgctgctgggtccgatgggcggtgctgcgttcggtccggacgggcggggacgggcggtgctgggtccaaatgggtggtgatggatctgtggacgggcggtgctggttccagacgggcggtgctgggtccagacgggcggtgggtccgatgggcggtgctaggttcggttcggatgggtggtgctaggtctaaatgggcggcgccggatccgatgggcggtgctgggttcggtccggactggcgggtccgggtctggacgggcggtgctggatccaaatgggggtgcagtgctggatctggacgggcggtgctgggtccgaacgggcgatgggtcccatgggcggtgctaggttcggttcggactggcggtgctgggtctaaatgggcggcgctgggtccgatgggtggtactgggtccggacgggcggttctgggtctggacgggcggtgcagtatccaaatgggcgctgctgggtccggacgggcggtgctaggttcggtccggacgggtggtgctgggtctaaatgggcggtgctaggctcagcaggggaccggtgggcgtggcggcacaggtacggagcgcagggccggtggagcgccctctccgaagggccctgcgctccccgcgctcgctgctcctcctgcccgcgcattgccccggggctgctgcgtgtttcttccagggtgattcctttccgctgggtcacttcaaagccgaccttttcaagctgttttcttccgcggaggacacgttgttaggctttgtgtgcatttcaagggtcatgttttctgaaccgcgctctgccgctcttggggtgttcgagcccccacactgctgtgcggtgttcctctcacagagtgaggttggagggtcccactccctttgtgtgtctccttagaaaacgcctcttctctcagacacatcgttatctgccaattcttcgcagacgtagagaacggactgcagagttaataaacgtcgaggggaagctttgatgcgccccatttggccctgagagatgccac

SEQ ID NO: 12064 - DNA, 1244 bp, Artificial sequence
  DNA replication origin
aaacaaagtgatacggacctgatgtattacaaacacgctgcagcaggagacgaggcctccgtccagcactgccaccgactctcctggaacctttggccacattctgtgacacgggacaggctcagagcagctcagtcccctcgagacctgacaccagccccttcagagaccatccattttctaggagtcacatgaaaaaagtagaaagaggtgtaataaattgtgatatattttattttgcctaatatatcccaacagcatcatttcaacatgcaatctatacataaaatgcattcagattctctacattctttttcatgcagcgccttcaaaatccaggccgtctcatacccacagcatttccccgactgctgcgtgctagtgctggaccgtgagtgaccagagaaaccactgcattaaaatatgggggtcactccccctgcagtgtgtgtgtggggagcaggaggcagtgggggtcattccccctgcagtgttgggggaggagaaggcagtgggggtcattccccctgcagtgtgtggggaaggaggaggcagtgggggtcattacccctgcagtgtgttgggaggaggaggcagtgggggtcattccccctgcagtgtgtggggaggagaagacagtgggggtcattccccctgcagtgtggggggaggagaagacagtgggggtcattccccctgcagtgtggggggaggagaagacagtgggggtcattccccctgcagtgtgttgggaggaggaggcagtgggggtcattccccctgcagtgtgttgggaggagaagacagtgggggtcattccccctgcagtgtgttgggaggagaagacagtgggggtcattccccctgcagtgtgttgggaggaggaggcagtgggggtcattccccctgcagtgttgggggaggagaagaaggcagtgggggtcattcccccagcactgtgcggggaggaggaggcaggactgtgctcgcccctccccttcctggttcaggtcctgctcctgggactcagcgctgcgcctctgggaagggccggtccaggagctccgcaagttgcgggagaacctggcgggtccgtggtccagcgaggcctgggattcagaagggatgaaacgttcctcgacgcttgaacaccggcctcctgcccctgggtcttcctgctatttcttcctgcccctcgctcccgcctcgagccaccccctcgtgctccccaacgcccgctcctg

SEQ ID NO: 12065 - DNA, 737 bp, Artificial sequence
  DNA replication origin
cggatgggaggggagaggaggccccggatgggaggggagaagaggtcccgggtgggaggggacagcaggccccggatgggaggggagaagaggtcccgggtgggaggggagaggaggccccggatgggaggggagaagaggtcccgggtgggaggggagaggaggccccggatgggaggggagaagaggtcccgggtgggaggggagaggaggccccggatgggaggggagaagaggtcccgggtgggaggggagaggaggccccggatgggaggggagaagaggtcccgggtgggaggggagaggaggccccggatgggaggggagaagaggtcccgggtgggaggggacagcaggccccggatgggggggagaagaggtcccgggtgggaggggagaggaggccccgggtgggaggggagaagaggtcccgggtgggaggggagagaaggctccggtgtgggaggggggagggggaagggggtaggaggtccctggtgggaggggagaggagatcaccagggaagtccaggggtgggaggacagagcaggtccaccacccctaggtcctggaagcctagacgagaggggacaggtcacgtgggacgtttgcgtccaaagctggctaccatccagtgaaagcctccagcccacccgattctcccaggcctccgcgtggagcctctgaggggggtccctcctccctccccccactcagccgcactgggctctgcagc

SEQ ID NO: 12066 - DNA, 1242 bp, Artificial sequence
  DNA replication origin
atatttggctccgaataaatctcttcaaatattttacagagtttgactcttcgttgacagctgttcgcacaatttccattaaaacctgggtggttttccccattttgcgcgttttgctcaggtttccggggctccggtccctgccaccccgggtgtccccgggcggtgttctccctccatggccattactgcgcttgaaccaccgccctccacagtgtgacattttcagaataggaatgtaatctcagcttcccacccttctcacaggccctccgacggtggctccgtgccctcaaaagaaggatgatcccttcctggtcccgcctgacccgggggagctcggcccctgctgtgctgtcagcctcgccccggccgcccgcgctgacccccgcccggctcacagcaccgctggccgcagcctctcaccgagagctcctgccctcagcctccagccggagaaggactccccatcccagcagagctcagctcagcgggcacgcgcacgacgcagaaatccttgatttctcaggttaggcgacggctgaattataaacacgggtaagaccacgcacctccacttcccagcgttctgtattttacaaccattctgtgtttatttcattgatctacttcccggattcaacggtatactccaagagggcagtgactagaagaactttatctgtcccggcttcgctactgtgctcccagcacgtgcacagcacacagcagacagttttaaaagccgcggaggccccgggtgggaggggagaggaggccccggatgggaggggagaagaggtcccgggtgggaggggagaggaggccccggatgggaggggagaagaggttccggatgggaggggagaggaggccccggatgggaggggagaagaggtcccgggtgggaggggacagcaggccccggatgggaggggagaagaggtcccgggtgggaggggagaggaggccccggatgggaggggagaagaggtcccgggtgggaggggagaggaggccccggatgggaggggagaagaggtcccgggtgggaggggagaggaggccccggatgggaggggagaagaggtcccgggtgggaggggagaggaggccccggatgggaggggagaagaggtcccgggtgggaggggagaggaggccccggatgggaggggagaagaggtcccgggtgggaggggacagcaggccccggatgggggggagaagaggtcccgggtg

SEQ ID NO: 12067 - DNA, 2126 bp, Artificial sequence
  DNA replication origin
gggcacggagccacaggagccgtcggggaggcatccccagggctgagcctgagggtcccggccaggtgcggggaggcagaacgtcctggaagaggggctgcgtgtgaggcccgggatgcccacgtgtgactcggcgatgcccgcgtgtgagctcggggtcgcgcgctgcctgcggtgcctccggggagctaagcccaggcccgagtcctggcacagagacggccaagctcagggcctcaggagcagagggacgggggcgagccgggcgcagcggggcagggaggctgcaaagtcaccgaaactaactgtggagcaaagacggccgcggagggggtgcgattaggtcagaaaatcgccgtattctccgtgtgaagctcctcagaagcggaaaggtgttaacagagaactgcagaggagcgaggctccccagagccccggggggtgaagaggccgccaagggcaccggcggatccgtggggcctgagcgggggcccgggaagcctctcccaccctcatgggactgaagaagaggctgcagccaaattcagtccccggcccccaaaggctcagatcgtctctggggaagaaagaaataccacgcacgtgagtgttagaaatcatcagcctgcgcgttagaaaccgtgttccggagcctccgggactcaccgggcgtggaacggcaattccgagaaaatccacggttccagagccccggggactcaccgggcgtggaacggcaaatcccagaaaatccacggttccagagccccggggactcacccggcgtggaacggcaaatcccagaaaatccacggttccagagccccggggactcacccggcgtggaacggcagttctaagaaaatccatggcgccaggatggtctgcgctcaacgtggggctgccctgggctttgggggatttggccgtgggcaacagaaagacgggggagcgggcctgcgtgggtacagggaggccggattgcgctgggggtgctgagggatggagttggatggaaataaagtcaccacctgttgggcaaaggacatgggacttatcttaggtgggggcgacgtgggaagcaggagcatgagtcacgggcaggaagctccactctggggagggcgagaggccgggagggccaggaggacctggaggcctgtgcagccgccagatctgcaaggtgcatgtggtggatggtgctccgcctgcgtcccggcccaggagtcccagtggaaaagccgtttcattgcagggcccttgacgccaagcacatcacacaccaaggccgcggtctgcgtggcagtggaacatgctggcctccgggaggcagcaggcagggccaccacgtggagatcggccttccagtgaccggaaccaccacgaggagctcacagtgcagacgccagggctccacggcttcctttcacactgtgtgcccagtgatcttacatgttaaaaaagatcctttaaaaagctcatctacatgatgctggaaaagtcggcgggctggggcagcaccctcaccaacagtgcgtggtggacagcaccaggctctggaccggacccaaatgggaagcctgggcctgcactttggcgtcagcggccaccccgacagccactgcttgactggctgctggtgccacagaggctgtgacgtcctggagagccactcatcctgagggaccctgagcgggggccgtccacgttctgctggagaaggctttggtggaatgtgatggcgaggggttacctctgcaagctcaggcactcacgggcaggggtctgaggtccctcctccacagaaggacctgtgtccctggccaaagatggagactggagtgtgattgtagagcagcgacacctcaggttccttgagaccttgttgaccaagagtcttgacccttctaataaagccacgaaatgctgtgaggccctcaggctggacggggttactatttccaactgttttcattactgtagaatgacactgtgaactcccagggaacaatgtggcttggaattgggtgacgagatttgatgctcagtcccacagctttttgtcattgtgaatgtgggaatgtttttcacctctctgggcctcggtgttgccgcctgtgtcttca

SEQ ID NO: 12068 - DNA, 1030 bp, Artificial sequence
  DNA replication origin
agcaaaggggatggctgcagtgtcacgggggctggtggcctgggccacattggtggcgatgcaggaagtgggaccggctgctgtgaggcacaaggaaagagctgtagcgggcagttgggggcgggggaatctgcagagatgggggcgggggaatctgcagagatgggggcgggggaatctgcagagatggggggcgggggaatctgcagagatggggggtcgggggaatctgcagagatggggggcgggggaatctgcagagatggggggtcgggggaatctgcagaggtgggggcgggggaatctgcagagatgggggcgggggaatctgcagagatgggggcgggggaatctgcagagatggggggcgggggaatctgcagagatggggggcgggggaatctgcagagatggggggcgggggaatctgcagagatggggggtcgggggaatctgcagagatggggggcgggggaatctgcagagatggggggcgggggaatctgcagagatggggacttgcgcgggaaaagcaaggattttgctgtaactggagatgccggtggagactgcccctgcccctgcccctgccccttcctcaccagcaccttccacccacgtctctcactgcccattaacaagacccagaggctctcgtgctttcttggtcgaaggtatgagacctgagatcccatgaaatttaatgtaaagtctcagggtttgattttgcaacacgaggatgccaaggtggatgattgagtgggtgaccctcgcttctgtgaggtttgattttgatggttgcactttggccagtttctccgaattccacctgcccgaggcccacgaagccagtgttcctgcgaagcttctcttccctggccatgccgagaggttctccagctgttagatgtgtcaaagaataattctcattttaagcatctacttatgtagttcagtgctccaaacattgatataagagaacatttattgagtgcttcctgtgtaccaagtacttttgaaaccatttggt

SEQ ID NO: 12069 - DNA, 2037 bp, Artificial sequence
  DNA replication origin
atatgaaacaattcaacatcggaaacacttcttctggtcccacacattttgaatgagggccacttggcctgtcccgcgccacactgacgtatccgacaggcccaatttccagtcctttgacaagtgacaagtggccaccagtcaaaaaagtgcagaaagtactagagccagcacaatcatgtctaaacactttgaaaagaaaaagtttcaatgactatcaaaagatccgaatttcttgtttcacactgtagaaccggccaagtgctttctaaagaccttctcaagtcaggtgctaaactgcaggatgcaaacactgtgaggctcaagccaggccctccagggaaagctcatttggacagattaagtggaggaaaccaagaccagaaaaacagcctgagcaaagcaaagtcaggagtgggacccagtgcccctagcaaactggtgcatacggccaaccccatatggcgttgggacagccgggaagcgcagcaccttggagtggcgggagggtcagcaatgggagtggggagggccaggtgtggtcaggatgggagtggggagggccaggtgtggtcaggatgggagtggggaggggcaggtttatggagggagggtgagaaggtcagatgtggtcggcaatgggagtggggagggtcaggtgtggtcaggatgggagtggggaggggcaggtatagacaggatgggagtggggagggtcaagtgtggtcaggatgggagtggggagggtcaggtgtagacaggatgggagtggggagggtcaggtgtagacaggatgggagtggggaagggcagctttatggagggagggtgagaaggtcaggcgtggtcgggatgggagtggggagggccaggtgtggtcaggatgggagtggggaggggcaggtgtggtcaggatgggagtggggaggggcaggtttatggagggagggcgagaaggtcaggcgtggtcgggatgggagtggggaggggcaggtgtggtcaggatgggagtggggagtgtcaggtgtggtcaggatgggagtggggagggtcaggtgtagacaggatgggagtggggagggtcaggtgtagacaggatgggagtggggagggtcaggtgtggtcaggatgggagtgggagggtcaggtgtggtcaggatgggagtggggagggtcaggtgtagacaggatggaagtggggagggtcaggtgtggtcaggatgggagtggggagggtcaggtgtggtcaggatgggagtggggagggtcaggtgtggtcaggatgggagtggggagggtcaggtgtggtcaggatgggagtggggatttccagggggtttgtttcatggggaaggaagtaagtcatattgagtatggttttcaagtaagcatttgagtaaatgaacttcagataattttgctgtatccatgaataccatcaaaactttctctaagtcaaaagtatcagttgagtcaatactcactgactgcctgcatggcggagtgggtggtctttggggttcataaaggcagggtgctccctttttgatatagtgacataaagggaaaagtccattcaaagcctgtccctgttcggtcggaccccgcagaggcaaaccacgaaaagacggacgccctctcaggtgcagaaccactaccacgcacgagaggcctgctcaggcagtttggccttttgcaggccgtattacagagggctgcagagtgtccactgtcagcaagacagcgccatccttaaacagagcccccacccacaactcgagaatgtcctgctttgggaccggggacaggacagtagacggcatttaaaattgtgccactcctctgtcttttccctgagcacacagacatacacacaccgtgcaaacacaggttacctgctctgcaaaactggatcgtcggattcactatcaaaaggcaacaaaggacgaatccgacagtgaactctgatatttcgtttcagctcctgcaatgatcaagaggtctgcgtgtcaacccgggcgcgagcctgcactgcgg

SEQ ID NO: 12070 - DNA, 1488 bp, Artificial sequence
  DNA replication origin
gtacaatgtttgtgttatggcgtatggacagacgggcagcggaaagagctataccatgctgggacgccattcggacgacggccctgttctgccgcttgacccacagagtgacttaggaattatccctagagtggctgaggagctcttcaggtactgccgatggtgatgagtggggcagagaaatatggcagggaagccaggcggtcagcaccttggttatcacgtgggaaaaattattaccatttgaagaaggtgatcaaaccccataatctcatcagatacattcaacactatgaagtgctttcatacttctgggcattattgctaccaatcctgtgatgaaattatgttgcaattccatcattaagactaaactttatttttaaatttttttagagacaaggtcttgctttgtcgcccaggctggagtgcaatagtgtgatctcagctcactacaacctccacctcctgggttcaagcgattctccctcctcagcctcccgagtatctggtatcacaggagtgtgccaccacacccagctaatttttgtatttttagtagagacggagtttcgctgtgttggccaggctggtctcaaactcctgaccttaggtgatccactcgcctcggcctcccaaagtgctgggattataggcatgagtctccctgcctggctaagacaaaacttcttgaaagagatcccgagttacagggttccttaggcaggggtggaggtgggggatggtgagggatggaggttttctgtcctggaatgggaagcacagagggaaaactcccgtccttccgtcgcccttcctcctgccgccatcaggagtgtatgcattcgcttctcttcaggggtccagccaacatggcctgcgaagatgctcccgacccgttagcacattctcgaaagagacccactgcccgtgtcatgatttcaccaacatagttagttctagggaaaaataaaatagtaaaaagtcgtctcagtggccgggcgcggtggttcaaacacctgtaatcctagcactttgggaggtcgaggcgggcggatcacaaggtcaggagttcgagcttgcatggatggtgcatgtcattaaatattcaaccagtcatttttccttctgctaagcaaactctttaagttccagaaacaaaggctcaggcaagagccctggggaactgaggtagaaaaaacaaaggctcaggcaagagccctggggaactgaggtagaaagcgggagagaatggtgggagtttcaagaccccccgccgcgtctcttctcgtctgtgagagcggggacaccacggtggaagggggcgatgtggtgtggcagcacgtcccggacgtcggcttcgcagtgttcccagtgtgagctgcgtgcgtgcttccgaggccgtttccccctcagctgggcttagagatgcacgatgcacagccagtgagagcaggcgtcgtacattccacggctgcgtttccgttt

SEQ ID NO: 12071 - DNA, 1806 bp, Artificial sequence
  DNA replication origin
gtcatttttccttctgctaagcaaactctttaagttccagaaacaaaggctcaggcaagagccctggggaactgaggtagaaaaaacaaaggctcaggcaagagccctggggaactgaggtagaaagcgggagagaatggtgggagtttcaagaccccccgccgcgtctcttctcgtctgtgagagcggggacaccacggtggaagggggcgatgtggtgtggcagcacgtcccggacgtcggcttcgcagtgttcccagtgtgagctgcgtgcgtgcttccgaggccgtttccccctcagctgggcttagagatgcacgatgcacagccagtgagagcaggcgtcgtacattccacggctgcgtttccgtttggctctggaatttgccgacggaagcatatccagggcggcaaagggatgccggggctggaacggcgcggcggaggaggcgggaacggcgctgcggggggggcgggaacggtgctgaggtggtggcgggaactgccctgcggaggaggcgggaactgagctgaggcagcactgggaagagctgttagctgcctaaaagtgttagggaagatccatcaggaagatggccaggcggctgcgcctctccagaaaccggataatcagcgttaccaatgggcccatcgcattactggcaagcgtttcagtcgcctcgtttctaaaatggtttttccgttttgctgttctgagtctcgggtgctgtgcgtctccctccagggcacagtgatttgcggcactggaatccctcagtcagagtctcagaatctctgctcttccaagtgagtggccccgggcaaggccgtactctccctacacctcaccttcgtcgtttgcagaaacgagaatcggagcagacacggaccgtgtcctccctcatcacatccacacacgacctggagaggggtgcactgggccagggctgggggtgagcttgggtgttcgtgactcaagttgcaaacggccctctgcccaaaatgatacaaaaccacaatgacatcagtgctgatatcagagatagtttacaggaaccctttaccctgaaaaggactactcttagattgctgaagtcaccagataagccatttcctgtcgttttaaagtaaataaaatgctactgcctggattccttggctctgcacgcctctctcctttcttctaaacctggttgttgacaccgcctccttcccgactgctctccgctgtcatccttatcaacaggagtgtgtgatgtttctccacctgctacacactgtcagaggcacaagggatccaaaagtgcatgtgatcagttttctgcttttaaaaagtctagagtggaaacgggtaattatgacccagtagaaaatgggcaggaacagatggcagagacaaagcctggccccgcccctccccgccccagagagtcaggggagctgcgtgcattggaatcacactgttcattgcaggacctggagtcctttgcgtgtgtgcctcgccttctcaacactttgcttcttaaaggctaagactgcagcctgtggttttcaccattgtccctagaatctagtcaacagcccaatgattacttgtgggaaatctctcaaattaactcctcggtattatgtaattgagaaatctctaacttaggttttgtgacactcaaagagacaaactgacacataaatgatgggcccaagtgtggaggttaagtttctggatatgtggtgcattttgcctaaggtgtggagaggaggagaatgtaaaaactctagtttaggctgggcatggtggctcacacc

SEQ ID NO: 12072 - DNA, 994 bp, Artificial sequence
  DNA replication origin
tcaccgtgtggaggaagccaatttgccatgagagggggaaataccccacaatgagagacagggagagtgtctggaacattccagcctccccgagtcccgagcaccagcggcccctccaccacctcccagggtggccctcccaggaaggaggagccccccgactgtggtggccatgtgcccctgccgtcctgcagtggccgtttctcaggacacggcctacagggcccagggccacctctgggggactctgcctgcaccctgagtcaggaagagccgcaatgcttcctcgggtcctccctttcaaccagtctggagtctgagtcgggggagggggcactaactgagctccccaaaaaccgcaaagcccagatccagccacagctggatgactccacacaggggccgcctgtgccccacctggcactggtgcttaatctgttgcgtccaggcttctggcacctgcccccaaaagacccaaggaacttggggcctaagcaggtctacacagccggagggacccaggccacacatgcagcagcagcctagagagccctcagctgctctggcggacccctggtgaagagaaaggccagggctgccacccttgagaaactgagccccaaccaggaggcaagtcacacacagaccgaacaagcacacaatcaggccaaggtgagacggcgcaggagaatgaccaccgtgccgtgggagtgccagctagccacagcgaggacacaggaggtgcagggggtgcatgggtggccctcgaggacgtgcaggccagaagtgtgtgcacatgtcctggggtacgtggtcccccatcctggggcattttggggaaaacggttaccgaggcagtcctgaaggaggtgggtgagcctgctgttccggtacggggcatggccacggtgctccaacaaagcccccaggacgcctgccagggccgcaaggctgcggctgatgcacgccatctccctcagggccaacccggtca

SEQ ID NO: 12073 - DNA, 1261 bp, Artificial sequence
  DNA replication origin
agtgggcgggaaggagcgtctgcccctcagtcgtggtccggctccttctctcacagacgtggacctttggagggcagtcccagcgccacggagaaatgcatctccagaaacactcgtggcttcctcaaactgagcacaaccagacctccccagcgctgacctacggcacaattgttcatgcacgagagccgccttatggggtgagtgcgtgactctggtgcgaggtttatgttcccagggctgacatgtctgggagcttcacagctggacgaggcatatttggaggggcgccttgaacctggacagcaccccctccttgcctccctcaggccgtttggccacagaacctgtgacatgggcaggctcaggagaggagaggaggaagggaaggagcccaggccccgaggagggaagattgccgggggccagggtgggggtggggtggggtgggggcccagggcccagggctggggcagctctgggtgccaaatgcggtttcgtccagaggacactgcaaggctggaatgaaacaccctgtcctcttcagcttgtagcgggtcagaggccgctggttttgaagagatttgccagtgatctgtgggaggaaacactcagcagaggtttaggtggcacgtggagactgtgcggggaatacagcccaaatggggaggacagaagacaccacagccacccagggtgtgagagctgcgacaggcgcctgttagagcggaaccacaggggcccggccccatctcggggtccggggtggcttccctgcgggggcggcctctgtgcagaggcctgaagggtccacagtggcaaagggggaatgacaaagtgtctgcctgtgccggaccgagtgatctgtactataattaccctgtgaggggcgcacgctgccgtcctagagcgtcacagacaccagcccccgggcctgttggtactcgccggaggtccctgcgtgcccagagtcccgccctggccatcgtttagtgtgaggcaggagggggccagatatgggggggacgcctggctcccccagatctctcttgcctgctctttcctccgcaggctgcctgtgcccctcccccgtagccaggaacaggccctggggagtggtgggaggccgtgcagtgaggcttgcggccctggatgctccctcaggactgtctgggaccaggctcgtctcacaatccgaattaactgcagacctcacttcgagaacagcctggcccagccctgatactcggggaaagagcag

SEQ ID NO: 12074 - DNA, 766 bp, Artificial sequence
  DNA replication origin
caaggtgctgcgtcctgggccaggtggacacatggtcctagaacactctgaatggctctgtcttctcactcctactcaactgagtataaaaagacatgagtctaacccaggctttctgatgggagggaagctggtaggacagggcttcctaggagtagggggcttcctaggagtggggggcttcctaggagtcagaaggcttccaaagagttgggggagttcctaggagtccacggggcttcttaggagtgtggggggggcttcctaagagttgggggggtctctaggagtccagggggcttcctaggagtgaggggacttcttaggaatggggggcttcctggaagtggggggcttcctaggagtggggggtttcctaggagtgggggtcttcctatgtgtggggatgggattcctgggagagggaggggctccctggaaggggagcttcctaggagttttgttggggggcttcccgggatggggagcattccttgggaggggggttcttcctaggagttgggggggtgcttcctaggggccaggggcttcctaggagtgggaggggctcctgagatgggcttccgagaaagctaaaggacctggactcatctgcaaccccaagaggatcccacctctcctgtctctgatcccagcctgcagctgccccttggcaggaacaggagactcgggcacagcaggctgcaggcagctcctccctgccatctctgttcttccggcatgttctggcacatttcctgggact

SEQ ID NO: 12075 - DNA, 973 bp, Artificial sequence
  DNA replication origin
gggtggctgcggctggtcctggggctggaggacggctccttctcatggagcccgtggacctccaagggcacgtccacagacatctctctggattccctgagccaggagttggccttgatgcctgacgtgtaggaactgccgtggctgtcggcggagtggcgtgagaggcagtgggggcagtgctggctgctgaccccactgcccgggaagctcctgctggccaggtccagctccagctcatcgctgatataggactcccggtagtgctgcttctctgtggggagtggggagcacagtgagggcgagctggagagggaccagccctgctgatgcaggaggaagagcccgggagacagaaatgcacacccacagcccagatgaggacgtggaacaggcagggagaccaggcctgcgggtaaacgctgaggccaggccttgtgctcaggtgaggacgtggaacaggcagggagaccaggcctgtggtaaacgctgaggcgaggccttgtgctcaaggtgaggacgtggaacagggagggagaccaggcctgtgggtaaacgctgaggccaggtcttgtgctcaggtgaggatgtggaacagggagggaggccaggcctgtgggtaaacactaaggccaggccttgtgctcaggtgaggatgtggaacaggaagggagaccaggcctgtgggtaaacactgaggccttgtcggaacctgcatttcttgctctttgtgggcacatgatgggaggagaagtggaaaacagaccaggaaactgagaagtggaaacctcaggtggctcctcaagctcccagcttcccccagtcccatctatagaattccactccaggcagagctgggggccaccacttcgcccttcgacctcagcatctgggggacgtgggagtcaggaggccacaacaataagagacagaaggcatagtccggccagagcccagtgtgcccagcctagcc

SEQ ID NO: 12076 - DNA, 1143 bp, Artificial sequence
  DNA replication origin
gtagctgggattacaggcacccgtcttgggcaatgtttttattcctcttgggcctcggtttactccaactgtgaaatgggggtaatgtaaaccctttgctcgatgtgactctgtgtgtgaacacatctggaaaaggtgtaagcaccttcaccccgttccccagctgttctgctttggctgagagttggggacagtggaaccactctgaatggctggcaccgagagtaagccctggtgtcaccatggactctgggtgacggtggcgagtcagcacaggctcattgattgtaacccatacaccactaagtgggggaggccatgtgtgggtgggggaggccatgtgtgggtggggggagactgtgtgtgggtggggggaggccatgtgtgggtggggggaccatgtgtgggtgggggaggccgtacgcaggtggggggaggcggtatgtgggtggggagaggccgtgcgtgggtgggggagaccgtgtgcgggtgggggcagggagcacatgggagctctctgcaccttcctctcaatcttgctatgaacctaaaactattctaaaatataaaatctatttttaaaaacacacagcttgcctgggaagaggggcagttggacagaacagagtgggccaagccttgctgagcagggagggtttcccgagtcggccaacctagagaggggtggctcccgggtcatctgctagggagagtctggagaagcacaggggtcagccgagggcgagggtcccttacaagcatcccacactgaacacgaagccttgagggccgctgtttagaatcactactccaaaccaaccacagagcaaagaaacaaaagaaacctaggtctcatttcacctcgaacaaaagaagctgctccctgctggagtccaccggtgccagaacccaccttgtttcctaaggaagaggcagaaggtgctgatcacttctgaggagccgctgtccctcagctgctcagagggtctaatcataaaggtcatgtttatcctgctctggacatgtgctcagtggacagtctccgaatagttccagaggctttctggcctctaatccccatagtctgcctacgcaaaaatctgagaacctcatcagaggttccttacaaagactgagtttgcc

SEQ ID NO: 12077 - DNA, 917 bp, Artificial sequence
  DNA replication origin
ggaaacttctccatgggtctggaccccctgctcacctccggggtatgtgttcccaactgtggagctcatacaagcccaccaggccattctagccatgcccagagactggaaggggccctgtaatgcaccctgagtctcaagaggcctccccattgtgtgaccaagcccggggtgcctggtgacctcttgtgctgcaatcctgggcaccagagaaaccttctaaagcccacgggggataaaggagacacaaatgatgctgagtgggggacgactaacagagccccctgtgcccccggccaaccaggctgcactccccgccccacctggagtggctggtgctggggacggctcctccccagctcccgttctgtctgcctctttctgcagaaagacagactacacctgccctggcccgcgggagcacatagggtaggtgaaggcacagcccactttggttttcagtcgtcttttccttaatacttaatggggcagggggtgggggaggtggggctggggcggggaggtcccacagaggagggctgaagttctgaagaggcatgggtggggagaggcggcatgggtcgggggagacgagatttagggccacccagcgacggcgccccttccccaccacccctgctcagtctactcaggaaacatcaccacctaggctcttccagacccttccggacccttccagacccttctggaggtcctgctcccacgttcgctcacctcctacgccagccttactttcaaagacgggagaaagggggagctttggacgacctcatggaacaaaggtgaggatgtcttcactttggtaattaaatgcttagatgtcattttgtgacctgatgtctgttcctgcccctgcagcacacaaatcactcaaacctgcaccctggccagggtct

SEQ ID NO: 12078 - DNA, 1492 bp, Artificial sequence
  DNA replication origin
ggggccgaggtccggctcgtcgtccggctcaaggctccgggccgtggtcccgccggcggtgtagaagcggccgccgctcttgtgccctccgggtgggaccacgtggggaggcagcggtgaccccggagggtgacgcggcccggggtccggattggccggcgccgcccgccccctccccgcccagccgaccctccccggcaggagcgcgggccgtgcagggtctcgggggtcgaaccgtcctggaggtcacacggccccagagttgcctgtcccaggggtcgcccagtccggagggtcgctccatccccgggtcacacgtcccccgattgcccggcccagggctgcagcatcccagccttgcagaggcgatcgcgccacccaccccagacgggccgctccctgcgcggacgcaccgggttcggcgccttgcaggctgctggcgaccccgctgccgggtttctccccggacctcacggcctggacagcacactcggaacggcggcatgcatttgaagccatcgctgcctgcgttgtcggtggatgcggtggacccggggcgggcagtgcggagcgcggaggggagacctgccctggggcacagtggcggggaggggatggtcctggggtttgcatgggtgatgggacagttccagccccgagagcgggaagacgacgcggcggtggagctctaggaagggatggatgttatcaccgtgcaaaaccagaccaccgcccaggagggcagttgaagcttcactggcccagggcgatttgccccgtctgagggtgacatttgggcagacacctttaggaacgagggaggaggcctcttggatatttagggggaagtcgggggtcccaaattgaggaccagcaagtgcagaggccccaggcacgctgggggctgagagagagcaaagagagggagagagggcgtcattcctgacccctgaggctgagctcccagaacccagccttggctgtgttctgagactctggggaaccaggttccaggccgcccagcatcagggctcggggcgtttctctaccgtcctggtttggatttctccttccccttcctccccctgccccaggcctcatatgttcccagttttccttcagtgctgatcttccagcatataatactatttagccattcattttgacagcctcccccagttagaatttaagtgccagcagggcagatattttttatctgttttgtttactgctgaaacccaagcacctccaagagctgctggcactggagagttcttggcggaatgaataattcatgtatcagggcccagatcaaatacagcagctcaggtagagtcctcccactccattcagtcatgtcagcgcacctggcaccttgccttaggggaagtagctcctacgtggatttaattcccttctcctcctcttccttctgcactccagcaggaacagagcaatgcaccatttaaatgaaggtggttcatgccatcca

SEQ ID NO: 12079 - DNA, 1343 bp, Artificial sequence
  DNA replication origin
ggtggcatatgatagacagatggtatacgatagacagatggtatataatagatggtatatgatagacagatggcatatgatagacagatggtatatgatagacagatagattttaaaaacagtgtatgatagacaggtggcatatgattgatagatagataaatggcatattatagatggttagacagacagatgacatataagagatagatgataaatgacatatgatatagatgaaaaaatggcataggatacataattgcatagatacatgacatatgatagatggataggtgactagatgaatagatgatatatgatagatgaataggtaggtgagataatagaagacacatgatagattgatgcatagattatatatgataggtagatagatgacatataatagatggatggatggatggatggatggatggatggatggatggatggatgaataggtggatgggtggatagatggatgggtggatgcatggatgggtgggtgggtggatggatggatggatggatggatggatggatggatggatgaataggtggatgggtcggtgggtgggtagacagatgggtggatggatgggtgggtgggtggatggatggatggatggatggatggatggatggatggatgaataggtggatgggtcggtgggtgggtagacagatgggtggatggaagggtgggtggatagatgggtgcctagatgggtagatgagtgaataggtgggtgggtggatggatggatggatgggtggatggatggatggatgggtggatggatggtaggtgggtggacgggtggatacatggatgggtagattagtggatagatgagtgggtagatgggtggatgggccctgcaggctgcccatcagtctttgtctctcgctctcttttcctgacctggtctcctggatcacaaggtggcaaacaggaagacaaacacaacacttccagagaacagttattcccagtatcatcaccaggttagacgtcttgaaatgattccccatcccattctccgggagcgcagcggtacctgtccttccccagaatgcagtgtctgccagccatcttccttcactggagacatggactctctcataccaagggcaattcttcccattttggagatgatatgaaattgacatgaaattgtccaaatggcaccgagacacttgctgctggggcattgtgaccacgcgctgtatgtttctctcatctggtttttgcaccgatgttatgaggtcttggtttagggctggttcttgttgttattttactctgtttcatctttaacagatcttctctgtatcttcta

SEQ ID NO: 12080 - DNA, 994 bp, Artificial sequence
  DNA replication origin
actggagctgattgaacacctacaatgtgcctcccaacactggctgccaaacgtgcaaagttgaacagatcgcaggacgcacgtggaggcagaccctcgcaggcgggacgtcaggtgcacagcgcaggacacgtgaggcggccgaccctcgcaggcgggacgtcaggtgcacagcgcaggacacgtgaggcggccgaccctcgcaggcgggacgtcaggtgcacagcgcaggacacgtgaggcggccgaccctcgcaggcgggacgtcaggtgcacagcgcaggacacgtgaggtggccgaccctcgcaggcgggacgtcaggtgcacagcgcaggacacgtgaggtggccgacctttgcaggcgggacgtcaggtgcacagcgcaggacacgtgaggtggccgacccttgcaggcagggacgtcaggtgcacagcacaagacacgtgaggcggctgacccttgcaggcagggacgtcaggtgcacagcgcaggacacgtgaggtggccgacctttgcaggcgggatttcaggtgcacagcgcaggacacgtgaggtggctgaccttcgcaggtgggacgttaggtgcacagtgcaggatgtgtgtgggggcagagcctcgccggagggacgtcaggtgcacagcacagaagtatgacaaccaggagggagtgagggctgaacgaggttccggagccagctatgcagtgtaaccacagcctcggggcctcagggagaaggtctagaaaagccagtgtgaagtctgggcagaaccccaacccacagcacccttacaaagcttctatcacaccccggtccatgggaaggggcttctgcctgggtttcatgaagtgtgtccagctccatcctgagcccctaatgccaggacaaatgcacctgccggggttcctgcctcccaccttcccagcaagtagctggattccacgcccatccagacagccgtgaagcaccgcacacatactcatcatgggtcc

SEQ ID NO: 12081 - DNA, 1039 bp, Artificial sequence
  DNA replication origin
cacagccctatgctataacctgtaacaaagcaaggccgtcatgagcacaaattcagggcagggctcagctctgaggggagggcagtggtgggacccccgccttgggtccagagttgtttttcttaagctgggtggcggggcaaggatattcgttactgcctcgttgtactgtgtaagcgttttgttggtgcctatcccatcgagaatacagaacaacagacagaggacactggtgctcactggctagccaggggggcagcggggcagcaggcagggccggaaggcgtgagaggggcagaggcgctgcaggatccccagtctggagacgtagtttggaacgtctggagatccccagtttggaacgtagcacagcgtgcgtggggggcagggggcagggagcaggagggtccacacttgcgtggggcaggggcggggtctacacttgtgtggggcgggggcggggtctacgcttgcgtggggcaggggcggcgtctacacttgtgtggtgtctacacttgcgtggggcaggggcggggtctacacttgtgtggggtgggggcggggtctacacttgcgtgggcatctggagggtcagggaggcttctccggacttcatcctgaaggtgtaaatgccaccctcctgctggggttctggaggtttccttgtggttctggggtggccggggacctgatgtgggtcctcatgcccagggggaccgaggatcagcctggggctgggtgagggcccggatcttggaggctgcagcttaaacagagaaaaatgagcggatttgagaaattttcagtttcagagatgaaattgacaggccaatgtggtgagttggagcaggaggctgagatagggtggagcttccgaaaaaagaaacaacatttagctgagatacagcagtacgcacaatgccgagcgcctactgagtgttcatgttccggcaatttcaccagtcattttgtctctcaacctccatggcgagggggttctctctgcagtcagcccctccccagacagagccaccgcctg

SEQ ID NO: 12082 - DNA, 5380 bp, Artificial sequence
  DNA replication origin
gtgcagtgacaatcctcgctacgaatttcctcgcggctccatacctgaaataagtatcactgtattatcacagctctgtggaaatccccacctttcaaggctcctcttgaaacacaggttattgtaagcggagaaacaactgcttttcaagatgttaatatctgttgggataaaggtatttctcactgaggattcaccctcaccaagcttcccggcatgtaaaaaacatcactgtcactgcaggcagatgtaaggaataagaaaacacccacacgagctcactgtggaaaccagttcggtcctcagttccaatgacaggcgtctctctaagcgggctgaggtcttcttggggcaggacccttgggaagaagtgccttcttgcatgggacagacctggggaccctggggggctaccctgggggaattacagcatggacacccacccccttagttgtctccaattgtaccctaaggaagaataggtcagttcctcctctttcgcactgagaacagccacctccacatgctcccatgcgagggcctctgctggccaacaccagctttcagcatggcaactaggggaggatgagcacggtgtgataactaggggaggaggagcacagtgtgataactaggggaggaggagcacatgtgataaccaggggaggatgagcacggtgtgataactaggggaggaggagcacatgtgataactaggggaggaggagcacatgtgataactaggggaggaggagcacatgtgataactaggggaggaggagcacatgtgataactaggggaggaggagcacatgcgataactaggggaggatgagcacggtgtgataactaggggaggaggagcacggtgtgataactaggggaggaggagcacatgtgataactacgggaggaggagcacggtgtgataactaggggaggaggagcacatttgataactgggggaggaggagcacggtgtgataactaggggaggaggagcacatgtgatacctacgggaggaggagcacggtgtgataactaggggaggaggagcacatgtgataactaggggaggaggagcacggtgtgataactaggggaggatgagcacggtgtgataactaggggaggaagagcacggtgtgataactaggggaggaggagcacagtgtgataactaggggaggaggagcacatgtgataaccaggggaggatgagcacggtgtgataactaggggaggaggagcacatgtgataactaggggaggaggagcacggtgtgataactaggggaggaggagcacggtgtgataactaggggaggaggagcacatgtgataactaggggaggatgagcacatgtgataactaggggaggaggagcacatgtgataaccaggggaggaggagcacggtgtgataactaggggaggaggagcacatgtgataacgaggggaggaggagcacatgtgataactaggggaggaggagcacatgtgataactaggggaggaggagcacatgtgataactaggggaggaggagcacggtgtgataactaggggaggaggagcacatgtgataactaggggaggaggagcacggtgtgataactaggggaggaggagaacggtgtgataactaggggaggaggagcacatgtgataactaggggaggaggagcacggtgtgataactagaggaggaggagcacggtgtgataactaggggaggaggagcacatgtgataactaggggaggaggagcacatttgataaccaggggaggaggagcacggtgtgataactaggggaggaggagcatggtgtgataactaggggaggaggagcacggtgtgataactaggggaggaggagcacatatgataaccaggggaggaggagcacggtgtgataactaggggaggaggagcacatgtgataacgaggggaggaggagcacatgtgataacgaggggaggaggagcacatgtgataactcggggaggaggagcacatgtgataactaggggaggaggagcacatgtgataactaggggaggaggagcacatgtgataactaggggaggaggagcacatgtgataactaggggaggaggagcacatgtgataactaggggaggaggagcacatgtgataactaggggaggaggagcacatgtgataactaggggaggaggagcacggtgtgataactaggggaggaggagcacatgtgataactaggggaggaggagcacggtgtgataactaggggaggaggagcacatgtgataactaggggaggaggagcacatgtgataaccaggggaggaggagcacggtgtgataactaggggaggaggagcacatgtgataactaggggaggaggagcacatgtgataactaggggaggaggagcacggtgtgataactaggggaggaggagcacatgtgataactaggggaggaggagcacggtgtgataactaggggaggaggagcacatgtgataactaggggaggaggagcatggtgtgataactaggggaggaggagcacatgtgataactaggggaggaggagcatggtgtgataactaggggaggaggagcacggtgtgataactaggggaggaggagcacatgtgataactaggggaggaggagcacatgtgataaccaggggaggaggagcacggtgtgataactaggggaggaggagcacatgtgataactaggggaggaggagcacggtgtgataactaggggaggaggagcacatgtgataactaggggaggaggagcacatgtgataactaggggaggaggagcacatgtgataaccaggggaggaggagcacagtgtgataactaggggaggaggagcaccgtgtgataactaggggaggaggagcactgtgtgataactaggggaggaggagcacggtgtgataactaggggaggaggagcacatgtgataaccaggggaggaggagcacggtgtgataactaggggaggaggagcacatgtgataactaggggaggaggagcacatgtgataactaggggaggaggagcacatgtgataactaggggaggaggagcacatgtgataactaggggaggaggagcacatgtgataaccaggggaggaggagcacagtgtgataactaggggaggaggagcaccgtgtgataactaggggaggaggagcacatgtggtaactaggggaggaggagcacggtgtgataactaggggaggaggagcacatgtgataactaggggaggaggagcatggtgtgataactaggggaggaggagcacatgtgataacaaggggaggaggagcacatgtgataactaggggaggaggagcacggtgtgataactaggggaggaggagcgcggtgtgataactaggggaggaggagcacatgtgataactaggggaggaggagcatggtgtgataactaggggaggaggagcacatgtgataaccaggggaggaggagcacatgtgataactaggggaggaggagcacatgtgataactaggggaggaggagcatggtgtgataactaggggaggaggagcacatgtgataactagggtaggaggagcacatgtgataactaggggaggaggagcacatgtgataactaggggaggaggagcacatgtgataactaggggaggaggagcacggtgtgataactaggggaggaggagcacggtgtgataagtaggggaggaggagcacatgtgataactaggggaggaggagcacatgtgataactaggggaggaggagaacggtgtgataaccaggggaagaggagcacatgtgataactaggggaggaggagcacatgtgataactaggggaggaggagcacagtgtgataactaggggaggaggagcaccgtgtgataactaggggaggaggagcacggtgtgataactaggggaggaggagcacatgtgataactaggggaggaggagcacggtgtgataactaggggaggaggagcacggtgtgataaccaggggaggaggagcacatgtgataactaggggaggaggagcacggtgtgataactaggggaggaggagcacatgtgataactaggggaggaggagcacggtgtgataactaggggaggaggagcacatgtgataaccaggggaggaggagcatggtgtgataactaggggaggaggagcaccgtgtgataactaggggaggaggagcacatgtgataactaggggaggaggagcacggtgtgataactaggggaggaggagcacatgtgataactaggggaggaggagcatggtgtgataactaggggaggaggagcacatgtgataactaggggaggaggagcacggtgtgataactaggggaggaggagcacatgtgataactaggggaggaggagaacggtgtgataaccaggggaagaggagcacatgtgataactaggggaggaggagcacatgtgataactaggggaggaggagcacggtgtgataaccaggggaggaggagcacagtgtgataactaggggaggaggagcacggtgtgataactaggggaggaggagcacatgtgataactaggggaggaggagcacatgtgataactaggggaggaggagcacggtgtgataaccaggggaggaggagcacatgtgataactaggggaggaggagctcatgtgataactaggggaggaggagcacggtgtgataacaaggggaggaggagcaacaattccaggagttggagattttacaaacagcatctagatgaatgacttgatttttccaaatttctgtcttcttttagacagaatgtgtattggtttcaagtatcaggatagttgaggaactgaatgagtttatacaactgattctctgtgtggagagggttgaagtctcattttctcctttggtttattttttccctttgacctgtttgggggttgagcctatggaatcatccctgcaaaaataatcagctttacacgcatgttaatttcactaaaatccagcaaagcctaatctttgaaacgcaagtgtgtttactaggacgagtcacaacctgacaccctgtggctgatgccaacaggcctgacttactcagaatttaccatcagtgtctaataacttggcatggctctgggtggagattttttatggaaattttagtgaattcttaccaatgtggaaccatttccatgcttgaaggactgaatcatataaacaacattgctttcataaagtccgtaggctgaattaggctttaaaatctgaacagcaaaggtgtacttagcattagaaacagaaacactggcg

SEQ ID NO: 12083 - DNA, 1097 bp, Artificial sequence
  DNA replication origin
tggggttactaacctgagagcgtgctaatctgcgtgggtcatccagggatgtggaaattgtctgaagaatgaagccaagaagaaaatgacaacatgagagacaaatggggaatggggagaggagaaagggagagagacagagagagagggagagagatagagacagggagagagacagagacagagagatagagacagagagagagacagagacagggagagacacagagacagagggagagagacagagacagagggagagagacagagagaggcagagggagagagacagagacggagagagagagaggcagagggagagagagagagacagagggagagagacacagagagaggcagagggagagagaaagatagggaagagactgagacaaagggagagaaacagagagagacagagggagaaagagagggggcagagggagagagagatgggggagagattgagacagagggagagagacagaggaagaaagacagagagagaggcagagggagagagagagaggcagagggagagagagagagaggcagagggagagagacagagacagggagagagacacagagagagagagagacagaagagagagggagagagacacagagagagagggagagagaaagagagagaggcagagggagagagacagagacagagagagacagagagggagagagacagagagaggcagagggagagagagagatggggtagaaattgagacagagggagagagaaacagggagaaagagagagaggcagagatggggagaaacaaagatagagggagagattgatacagggggagagagacagagagagatgggggagagattgagacagagggagacagagacagagagagacgtagagagagagagacagagagggagacagagagagggaacctgactctgcaccattagtggcgctggctcaagaccctgattctgtgcccctccctctgattctgtgatgcacctatgaccctgctcagctgtgagcccataacacccctgggttctaacctggaagctgaacatgttagcctgtttcaggatgagttcccatc

SEQ ID NO: 12084 - DNA, 1338 bp, Artificial sequence
  DNA replication origin
ctagtgaagcccagctcgatggggacaggcgactctaaatcccctcaccctagaatcaaggacaagccccatgcacttggcaggagggagcagtctcattgatctgggttctgtatcccatagcgagagcagtccctcgggcacgtggactgggtgcgtgggagcctgagatctggatgagaggtttgttttttcctggagggtcaatggtaggaacctctattgaccagacctgtgatgccggcttgtgttttgtgtcgtttggcagagttcccacctgtagcttgtcaggcagggctggcctgtgtggggttttgtgaccgcagttgatgggagttgtggggcacccactcagaggagccgggggcaggaggcacctccatccctggcacggagcctccagagacaggacagcttcccctcctaggacagctagcacccactcgggaggctgtgagatggggggccactcgctggtcccccacagcggccatgccctgagacgatgcatgtgtgtgagacaacatggggtgtatagtgtgtgtgcattatgtgtatctgtggtgtgtgcatatggtgtgtactatgtgtgtgtgttctgtgtgtatgttgtgtgtcgagtatgtgtgttctgtgtaatatgcgtgtgtatggtctgagttttgtgtgtgtgtgtgtgtgtggtgtggtatacatgctgtgtgtggggtatgtagtgtgtgtgtgtggtgtgcatattacgtgtatctacagtggtgtatatggtgtgtgtagtgtgtgtggtgtagcttatatgttgtgtgagaggagggtggcgtgtgtgtggagtgtgtattatgtatgtgtggtgtgatgtatatgatgtgtatggggtgtatgtgtgtggtttggtgtatatgatgtgtgtatatatggtgtgcctggtgtgtgcagtgtggcatatttatatggtgtgtgtgatgcgtgtgtgtgtgtgtggtgtgagtatatggtatgtggggtgtggtgtattatgtatatatggtgtggggtgtggtgtgtgtatatggtgtgtgtatggtgtgtgtgtggtgtgagtatatggtgtgtggggtgtggtgtattatgtatatatggtgtgtgtgtggtgtgtgtatatggtgtgtgcgtggtgtgtgtgtggtgtgcagggtgtgtgcacatggtgtgtgcatgtgatcctgtggtgtgctgaacagagcggctgcttaaaagggggggtggggagtgaggactgcagggtcactatgttcactgatgctcacattcttaaggcacaaaacagatggcctgaggagttggcccctgagttcttaaata

SEQ ID NO: 12085 - DNA, 1226 bp, Artificial sequence
  DNA replication origin
ccctgcccgcagccggcgaggggccctggggggtcggcggggcgggtccgggggaggccgcggtgacctcggggcgcgtgcagaccccgccctccgcgcctggccacagattccagcccaccttggcgacctgcggagccgggggcggagagaggaggcgcaggaggacccgcgacacagctcgggatccgcgcgcgctgggcctccggcgccgctcgtggggttcgggaggccgggaccctgcccgggagatgtggacgccgggcggacccccggggtccgcgggctgggaccgccgtaggttgggcgcgaggttgcgcgcggcgttcgcggggctgcaggagctgcaggggctgcgagccacgcagcaggagcgggtacggggcgccctggccctgcagcccccgcccgcgcccgccgcgccctgcggcccccacggcctccacggccccgagcagcagctggaggcggcgctggccgcgctgcaggagcagctggtaaggaccgggcgccgggactcggggctgcgaggtgtgcgggccacaggcgctgctccttcggcagcgactgtgtgttagtgggacgggggtgtctgatggatggaggggacgtcctttgggatttgaatggaatgcagttcggtctccaaggagggggacatggaggccccgcgcgcaggtgcctagaggtgaagcgcacaggtgaggaccctgaaaactgcccggggctgcagcccgcgctccgccgtgcgtggatgtgcgcctacccacgccagcatcccgaagctggcagatttgggagagacaccctgttcgttacagggttacagcactgatctgacctgcaggcactgaccggcgttcccctggcggaggtcggctcgggatcctggcatcactccccccccggggaccaggtcccccctgctgtcttgggttaggggcaacagtgtccgcgtggtaaagcgcaccccgacttgtcctcaggaatgtgctgacttttcttaaggtcgcgtcactgtaataaagtattgggggaaagcatgtaactgacaaaggcctcttcaactttaaaatgtgacctgacctgtaaggagaggcgtgtcctctgatccagaggagagagactctgatttccctgccacgggccctcttcagcactccctgggcgctctgaacccctcctttcacacaatgaaaggaactccactcattacccctctgctt

SEQ ID NO: 12086 - DNA, 1439 bp, Artificial sequence
  DNA replication origin
gtgtttcccgctgttgcagcttaatctggtagcgaagctgttgattgagttcccgtgagtaacaagaaacagcagagatttgtgcatttctacgtacggcaagtcctggccccaacagcttagtgctacacctaccagttgtgggaaaatttacatttccaggaaactgcatacaactgggtagagcgctggtccttcagggagagaagtgttccagttaaatatggccatcttcttcctccgtctccaagaatacaaacacattattttaagaaccaaaatggctgagcccacaattgtagcatgaacagccctaggcattaaacaacaggttaagtagctcttgctgtctatgagcccagctctgacactgcctgggtgagggcctagcccccagtgcctgagtttctgcatctgtgagcccagctctggcactgcctggctgtggggtgctaggccctcagtgcctcagtttccatatctgtacactgggtctccaaatggtgttgaccatcatggagtggttgtaaggagttaatgactcatatgcatgaagttcttagaacaggccttcccctttgccagcactcaataaatgtcagttattattagcaatattagggtcaggctacaatagtaaagggtagtgttttgtccctgagaggattggaatctagatggaatgagaaataataacagcagccatcatttgaattttccctgtataccgggcagcagactagcacgttgagtaaatatctcaagtaaagggtacaaatccaggtggaaacagagaaggagcctgtgacagaaactgtgcagccaggagaggccggatctacatgctcagaacacagggttgtcggcgaagcttccccgagagcccacttggacctgttgtgggaagagacggcagagctaagacaagcaggtgggtgccgtggaggagccgagagccgattgcaaacaacagcagaggacgtctcctctgcgactgtgggactcccctttcctaggtgtcttttaaagcagaattgattcccaccctgcggggagaggggcgtgcggtgtgaacctgctggcaagaaggggagggagtgaaatctttacagagcaccctccgtgaggccggatttttagaggtagggatcaggaaccactggggcagtccctgcagggggtggtctgggcttgtgtgaaaaccttggcgaggagagacccatgccagcgacgtggcgtcctaagcaggacgtccagcgagtcagtcaccagcgcgggcgcctcgtcctgtccatggaacattctgggctgcgccgcctcccctgggggtggggctgcaggaaccctcaggaccctcacgccctgggggaggaagaagcctgggctgagtcccagtgcttgtggggaagctctgagcgtggacaccgtgggcactgacc

SEQ ID NO: 12087 - DNA, 1117 bp, Artificial sequence
  DNA replication origin
ggaagctctgagcgtggacaccgtgggcactgaccactggggtgaggacctcaccccttccctgcacgtctgtgctgggccttgagggaggagtgagcacagccccccccggccggcggggcagccgagggaagcttgggggcagccggggggcagctgggggaagctggggggcagccggggggcagctgggggaaactggagggcccctgggggaagccgggggacagctgggggacagctgggggaagctgggggacagccgggggaagccgggggacagccgggggaagccggggggcagccgggggaagccgggggacagccgggggaagccggggggcagccgggggacagctgggggaagctgggggacagccgggggaagccggggggcagccgggggaagccgggggacagctgggggaagccggggggcagccggggcagccgggggaagccgggggacagctgggggaagctggggggcagccaggggaagctatgagcatgaggagccaggggtccccttgggagaggagggagtgtgggtgtggagggcgcctgctgcccaggctcagcccccagagccaggccggagagggagggcatggagtcaccaagcgctttagagccggatgcagaggtgcctgtgtacgcattcacttccacgggaaccagcagcgtgtggaggaggcgcaaggggactgggtgagtcctgctgtggctccagtccatgcccggcagctgtcagggatgcagagaaggacgcgaccccagagggccagaataccccgtccgaaactcactctggcttcagaggccgaaggaacaaaccacatcctctggagccagatggacagagggcttcttgcctggctgttcgttgacctggtggatactgccacgtccaggtgcctgggagccctgcacggggaagggaggccattcccccagggaaggggggtccccagaccccaccccgcaacagggaggagcatttatgggggtgagactaggagagacgtgaaaaaccctgggttgctctggctcgtggggaccttgaggtttccaggcggtgggtgtgcattccaggcccatgtttccagccaggact

SEQ ID NO: 12088 - DNA, 766 bp, Artificial sequence
  DNA replication origin
caaatcctggtcacttctttctgggccaattctgaaccgtccccatgaggtgagggggctgcttatttgtgccatgtttgcttatcttcatgagcaatgagttcacgttacatggaagggatgggtggaggagaggggcctgtgagctgggcgggcgggtgcccatggtcaggagaggggcctgtgagctgggcgagcgaggaaggggctaggacaacagggtctccccacaggtgagcgaggaaggggctgggacagcagggtctccccgcaggtgagcgaggaaggggctgggacagcagggtctcccggcaggtgagcgaggaaggggctgggacagcagggtctccccgcaggtgagcgaggaaggggctgggacagcagggtctccccgcaggtgagggaggaaggaggttccaccacttgggcaacactcagcttaaccagcgagtggaacgcgtgcttgcagagggcgccaggagacacgtgtaagcatgttgagcagcatggtggtggggatgaacgccctgcaggcaagaggcctggaagagcagctgtggcgggatcacggaatacggcactctacagtgaacacgtggaccaactgctctccacacatcagcaagcacggacccgaaacacggcactgagtgaaatagcaggtcaagcttacaaataaccacggcttccattggtgttcaaaggtggcacttctactaactcactaatacagtcacttaagacatacagattatgatcatccatt

SEQ ID NO: 12089 - DNA, 1136 bp, Artificial sequence
  DNA replication origin
gagtgagaacctcaacgggcccaggacggtgctcagcaggggcggccccaggcaggtgtgagaacgtcagcgggcccaggacggtgctcagcaggggcggccccaggcaggtgtgggaacctcagcgggcccaggacggtgcccagcaggggcggccccaggcaggtgtgagaacctcagcgggcccaggacggtgcccagcaggggcggccccaggcaggtgtgggaacctcagcgggcccaggacggtgcccagcaggggcggccccaggcaggtgtgagaacctcagcgggcccaggacggtgctcagcaggggtggccccaggcaggtgtgagaacctcagcgggcccaggaccgtgctcagcaggggtggccccaggcaggtgtgagaacctcagcgggcgcaggacggtgcccggcaggggcggccccaggcaggagtgagaacctcagcggcccaggacggtgcccggcaggggcggccccaggcaggtgtgagaacctcagcgggcccaggacggtgctcagcaggggcagccctcagtggatgtgagcaccccatgctccggtgcttcctcctgccagtcctcttgctccttgtctcagctgcgtctgtcctcccgcaggacgctcctgtcagacaccaatctgaatgtttaattatcatcattactattaaatggttttgttctcctagctaacaaataccactttactggtgcagcagggttcttgcttgcactattgattatctaacacacagaatcatttgcatgcagaggtggaagagacatctttgagcagctggcggaaccggcacgtttgagagctgagcatttgggaagcttttgcgatctcttaaatcaagtgtagcctaaagctacactgtctgcatattttaaattcaacctacaggttctctgtagaggtgtaaacggaccatagcctactcttgcaccaatcaccgagttttggccagtcaaaggtggccaactgttcaaaccatgctcaaacaccacaagtgccgagatgtaaccaattggctgtttctgcacctcacttccgtcttctgtgcgtctctttcctttttctgtcctaaatattcttccaccacgtggctgtgctggagtctct

SEQ ID NO: 12090 - DNA, 991 bp, Artificial sequence
  DNA replication origin
ccaactccatttctaaaaggaaacacatttaccacattagtatctaactgtgggtgactggcactggtacatttctacctagtagcttacaggaaatgcatgtccacccccatgatagcacctgtgttcccagaatcattcaagaaaatgttatacatttccaatgagaaagcaagtctgccattttagaacttttagcattatattcctcccataaaaatggctgaagcagaggaagttcagatgattatctatctatctatctatgtcatctatcaatagatatgcaatgagtaagacagaggcagagagagagacggagatggagagagagagagagggagatggagagagagaggaagatggagggggaggggggagatggaaggggagggggagatggaggggagggggagggggagatggatggggagagggagatggagggggagagggagattgagagggagagggagatgcagggcgagagggagatggagggggaaggggagattgagatggagagagggagggagatgagagggagagagcatgagcgattctcaagtgggcgcctcacatactttcaaaaatgctttattgcttatgatgtgctatttaaagtgtgtttctaaatgtgcctattattaaaagacattctttgagaaccatcaagaaccacccccctttcccaggatgaaaaacatcaataaagcttttcttcctttgaaaagttggtggctgtgattggagctagtgctggagatgaagccaggtgtgggtgatgacagagcagtgtttctggaactcgttatttatataataaaagtatttttgtttgtctaacgtaatcttggcatgtgaaattgatctttgtttaacgtattaggtggtgttgaaaactaacctggcttctactgagacacactggtcatgcagcctggaagggaagctgccctttgccctttgcccctcacccctcaccccttac

SEQ ID NO: 12091 - DNA, 1878 bp, Artificial sequence
  DNA replication origin
cgattctcaagtgggcgcctcacatactttcaaaaatgctttattgcttatgatgtgctatttaaagtgtgtttctaaatgtgcctattattaaaagacattctttgagaaccatcaagaaccacccccctttcccaggatgaaaaacatcaataaagcttttcttcctttgaaaagttggtggctgtgattggagctagtgctggagatgaagccaggtgtgggtgatgacagagcagtgtttctggaactcgttatttatataataaaagtatttttgtttgtctaacgtaatcttggcatgtgaaattgatctttgtttaacgtattaggtggtgttgaaaactaacctggcttctactgagacacactggtcatgcagcctggaagggaagctgccctttgccctttgcccctcacccctcaccccttactgggcatctgtggctctggaatagagcctgtcctgggaccccacagagctgatgggcgagacgtggtctccacggcagcaaagggaggcaaaggggagagaggagttccccagccctttctgtgtctgcttagttcacatgcaaaagaaaacatcttgaggcaggagcggaggtaaaacagcgccacacaacacacacaacagggggcatttgcagcttgttaatgctgatttaacagcaattagaatggcatagatatcttccgggagggggccatcaaggcgttaattagaaaaaaattgagagtaaagaaatacagggagaaaacaagacattctttaagaagctgtcaacctgggcaaggacggcccagtggtggccccagaaggggcttagaaagatggccctgaaaggtggccctgggaggtgattcttgggggtagccctgggaggtgattctgggaggtgattgtggggggtgattctagggggtggccctgggaggtgactctgggaggtgattctgggaagtgattctggggggtgattctgaggggtgattctgggaggtgattcttggaggtgactctgggaggtgattctgggaggtgactctgggaggtgactctgggaggtgattctgggaggtgactcggggaggtgattctgggagatgattccgagcagtgattctgggaggtgattctgggggggtggccctgaaaagtgtccctgggggatgatcccgatgtggccctgggtgttggccctgtggggtgatcctggtaggtggcctaggaaggtggctctggaaggtggctgtggagtttgcatgtgggccgggagccatggaggaagcacagcaggcatcagctgtcagggagctgaaggaaaaagaaagtccggggaatcaggaggaggcccactgacagcccagctccatccccgagatcccaggtgtgaatgttccttttaaatatcaccacggcggttactctcctcaaacgtccagcatggccagaaatggcagcagaggcacccagagcaggcacgtgggggaggcagtgtgtggccatcaggctgcatgtggacgggccgccctttctcagggctctcagatgcgcttccagagagcagggtttgtgtcgcctgggtggtagaggatgcggccgggagctgccctgcagatggagcacgctgggaacgttggtcacgacacggagtctctgggaggttgtggaggccagcgtgggtctgagcccgtgtccgtgccgccacacagggcacgggagcctgttcagtctcctcttctgaatacgagggcttgcaggagggaccaacacaaaattcgtttccgggcacacggacgcctgaggtaagagggccggggtcggggaaggcaaagaggagccggtcctggggccagtgtggggcctctgctctg

SEQ ID NO: 12092 - DNA, 3122 bp, Artificial sequence
  DNA replication origin
aatctgatgcccgtggtgccacgccctgatccctggaacctggggatgtggccttgcgtggcaaaagggactttgcagatgtgattgaggaaagggcccacagaggaaagatgaccctgatgatctgggtgggccctaaatttcccgaattaatcacaggcgtccctggaaaagacaggcagagggccgctgacctcaggagagggaaggggccctggtgtcaggggcaggggttgaagcgatgtcctctgaagatagcgggggccaggagtcgaggaccacggtggccttggaagctggaacaggcaggaaggggttctcctggagcctccagaaggggccacccctgtggacactttgacttgggcccagtgggactaatttctggcccacggaactacaagatggtagatttgtgttgttttgagccaccaaatgtgtgtggtttttgcagctgcagtgggaaaatcacacgccccatgtcatgagtgcatcgcccagcagggctgcgtgggactcgggctatgtgggactcggactcgggctgtgtggactcgggctgtgtggactcgggctgcgtgggactcggacttgggctgtgtgggcctcaggctgtgtgggactcgggctgtgtgggcgtcaggctgtgtggactcgggctgcgtgggattcggtctacgtgagactcgggttatgtgggactcaggctgtgtgggactcgggctgtgtggactcaggctgtgtgggactcaggatgtgtgggactcaggatgtgtggactcaggctgtgtgggactcaggatgtgtggactcgggctgtgtgggactcgggctgtgtggactcgggctgtgtgggactcgggctgtgttgactcgggctgtgtgggactcgggctgtgtgggacttgggctgcgtgggacttgggctgtgtggactcgggctgtgtgggactcgggctatgttgactcaggctgtgtgggactcgggctgcgtgggacttgggctgcgtgggacttgggctgtgtggactcgggctgtgtgggactcaggatgtgtgggactcaggatgtgtggactcaggctgtgtgggactcgggctgtgttgactcaggctgtgtgggactcgggctgcgtgggacttgggctgcgtgggacttgggctgtgtggactcaggctgtgtgggactcgggctgtgtgggactcgggctgtgtggactcaggctgtgtggactcgggctgtgtgggactcaggctgcgtgggactttggctgtgtgggactcgggctgcgtgggactttggctgtgtggactttggctgtgtggactttggctgtgtggacttgggctgtgtgggactcaggctgtgtggactcgggctgcgtgggacttgtgctgcatgggactcaggctgtgtgggactcaggctgtgtggacgtgggctctgtgggactcgggctgtgtggacttgggctacgtgggacttgggctgcgtgggactcgggctgtgtggacctgggctgtgtggactcgggctgtgtgggacttgggttgcgaggtactcaggttgtgtggactcaggctccgtggactcgggctgcgtggactcaggctgtgtggactcgggctgcgtgggactcgggctgcatgggatttggtctacgtgggactcgggccgcgtgggatttggtctacatgggactcgggctatgtgggactcaggctgtgtgggactcggtctgtgtggactcaggctgtgtgggactcaggatgtgtggacttggtctgtgtggactcaggctgtgtgggactcaggatgtgtggactcgggctgtgtgggactcaggatgtgtggactcgggctgtgtgggactcgggctgtgtggactcaggctgtgtgggactcgggctgcatgggactttggctctgtgggactcgggctgtgtggactcgggctgtgtgggactcaggctgtgtggactcgggctgtgtgggactcgggctgtgtgggactttggctgtgtgggactcgggctgcgtgggactttggctgtgtggactttggctgtgtggactcgggctgtgtgggactcaggctgtgtggactcgggctgcgtgggacttgtgctgcatgggactcaggctgtgtgggattcaggctgtgtggacgtgggctctgtgggactcgggctgtgtggacttgggctacgtgggacttgggctgcgtgggactcaggctgtgtggacctgggctgtgtggactcgggctgtgtgggacttgggttgcgaggtactcaggttgtgtgggactcaggctgtgtggactcaggctccgtggactcaggctgcgtggactcaggctgtgtggactcaggctgcgtgggactcgggctgcgtgggatttggtctacgtgggactcgggccgcgtgggatttggtctacgtgggactcgggctatgtgggactcaggctgtgtgggactcggtctgtgtggactcaggatgtgtgggactcaggatgtgtggactcggtctgtgtggactcaggctgtgtgggactcaggatgtgtggacttgggctgtgtgggactcaggatgtgtggactcgggctgtgtgggactcaggctgtgtggactcgggctgtgtgggactcgggctgtgttgactcaggctgtgtgggactcgggctgcgtggactcgggctgcgtgggactcgggctgtgtggactcgggctgtgtgggactcaggctgtgtggacttgggctgcgtgggacttgtgctgcatgggacttaggctgtttgggactcaggctgtgtgtacgtgggctctgtgggactcgggctgtgtggacttgggctacatgggacttgggctgtgtgggactcgggctgtgtggacctgggctgtgtggactcgggctgtgtgggacttgggttgcgaggtactcaggttttgtgggactcaggctgtgtggactcaggctccttggattcgggctgcgtggactcaggctgtgtggactcgggctgtgtgggacttggactgtgtgagattgagactctgcctccttccggtcactcagctttgctccttccggtcactcagcttgccccaacttg

SEQ ID NO: 12093 - DNA, 2042 bp, Artificial sequence
  DNA replication origin
cactgtgacacccttctctgagatgctgtatctgttccttggaaaccgccagaagggtatgacggggacaccgaagcgttcctgtccccagaggcttcccgctctgagctcctaagtacaagctgaaatctctaaatctgttttttgtttgtttgtttgtttttgagatggagtctctctcacccaggctggagtgcagtagcatgatcttggctcactgcaaccttcgtctcccgggtccaagcgattctcctgcctcagcctcccgagtagctgggattacaggtgccaccatgcccagccaattttctgcatttttagtacagacgaggtttggtttcaccatgttggccaggctggtctcgaactcctggcctcaagtgatccacccaccttggcctccaaagtggtttccttatccaggagtgtgttcagagccttggcctccagggatgtgcacattgccatttgtcaatattctgtctgaaacactgggcacagggagagtagatttctggtcctgaatctgtctgggtgaggttgactagtgcagcttctcagtataagggaggagtacctggagctatgaaaaaaaaatgtatgaaactaccagagcccatggccaggcctactatgtgagcaggaggtgaggaataagacaggtgtgctgggggatgaggacaggacgggtgtgctgggggatgggcacaggacgggtgtgctgggggatgggcacaggacgggtgtgctgggggatggggacaggacgggtgtgctgggggatggggacaggacgggtgtgctgggggatggggacaggacgggtgtgctgggggatgggcacaggacgggtgtgctgggggtaagggacaggacaggtgtgctggggcatgagggatgggacaggtgtgctgggggatggggacaggacaggtgtgctgaggcatgagggacaggacaggtgtgctggggcatgagggacaggacaggtgtgctgggggatggggacaggacaggtgtgctgagggatgaggacaggccaggtgtgctggggatgaggacaggacaggtgtgctgggggatggggacagtacaggtgtgctgggggatggggacaggtcaggtgtgctaggggatgaggacaggacaggtgtgctggggatgaggacaggacaggtatgctgggggatggggacaggtcaggtgtgctaggggatgaggacaggacaggtatgctgggggatggggacaggataagcgtgctgaggcatgagggacaggacaggtgtgctgggggatgaggacatgacaggtgtgctgggggatggggacaggacaggtgtgctgggggatgaggacaggacaggtgtgctgggggatggggacaggacaggtgtgctgggggatgaggacaggacaggtgtgctgggggatggggacatgacaggtgtgctggggcatgagggacaggacaggtgtgctggggatggggacaggacaggtgtgctgaggcatgagggacaggacaggtgtgctggggatggggacaggacaggtgtgctgaggcatgagggacaggacaggtgtgctggggatggggacaggacaggtgtgctgggggatggggacaggacagatgtgctgaggcatgagggataggacaggtgtgctggggatgaggacaggacaggtgtgctggggcatgaaggacaggacaggtgtgctgggggatggggacatgagaggtgtgctgggggatggggacaggacaggtgtgttggggatgagagacaggacaggtgtgttggggcatgaggacaggacaggtgtggtgggggatgaggtcaggacaggtgtgctctgggtgcaggggtgaggaactgggttaagcagagggcagagctgacctcccagcccgccagacatcccccagggcctgccaggaggtgtgggtggtctagaagccctgcgtcttggagcgaggactccagagcagctttgttagttttgctccccatgcttcctgtcatgggaactcagga

SEQ ID NO: 12094 - DNA, 1303 bp, Artificial sequence
  DNA replication origin
gcaagtcagatgggggctcagcttcccccgccgcaggctcagaaccccctctgctttccaaaaagtttgtgggtgtcattttctcttctctcacccacatcctggtaggcacgtaccttaaaaagttcccttgacttgaataggccttttttagagaggaaatgtagactttggtttaatccacaatcttggccctccattttttagggtttaggtgagtgtggcgggctctgccggagcgtgtacaccaatgtgatggattccacaggagtgtgtacgcgggcgtggcgggctctgggggaacgtgtacgcaggcgtgggggctaatgtctataagggcgcggtggagggggggccctgcgggagcgtgtacgtgagcgcggcgggagcgtgtacgtgagcgcggcgggccctgcgggagcgtgtacgtgagcgtggcgggccctgcgggagcgtgtacgcgggggtggtgggccctgcgggagcgtgtacgcaggggtggcgggccctgcgggagcgtgtacgtgagcgcggcgggccctgcgggagcgtgtacgtgagcggggcgggccctgcgggagcaagtacgcaggtgtggggtttgggggactttgcgggagaggctccagaggagacactgccaggtctctgctggagggagatgaccactttagcccggaaaatagactggacatgcaagaaacaacacgaaaaacatggcgtaccagctcggccatgagcgccggtgggtgcagtggggagaggaactgcttgaggtggacccgctctccagggagtcctccttccggctgcggaggcctgagccgggtgtggagaattgcgctctgcttgtccagcaggagggaggccgttctcctcaggcagataaagagaggtaagctgccaggttttcagcctgggaattttcctttttaacatttttaattgtggtaaaaatcacagcgtataaaataataggaaatttcccaccttaaccatttttaagtgtcccggtcagtagtgttaagtccatttacatcattgtgaatattttgcttttcctaacacaagaggtttgtagagaggagctgctacggcagctttttcttcctttttttaaaaaaactttgctaacagtggacctagaccgagaaaccctaggcctgggtagtggccccggtctggcagggatcggctgtgcagggcgagtgaaaccgtgctcccgtctctgtgcgctcccgtccacggggttccacacacccctcctctttcagaaacaccgcggggtctgtccgacagacgt

SEQ ID NO: 12095 - DNA, 1603 bp, Artificial sequence
  DNA replication origin
cagcggcatcttgtctcccttacgtaggagcacacaccagcagtcaccagacatttgaggacagcctctcctgtgagaggcaaagactcaagcagacccaagaagccagagactggggagagagccctagtgtgcacaggagcaagcctgccggaaggaggacaggagaggcagcctccctcctccctcctgctcatcctccagctccgcccgtccccctcaccacacaggcccaaaagggagtggggacctgaagagaggagagggaagctgaggcttccccagagtggacggggcagagagcaaagtgaagagaggggacagctaggggttccgaagagaagaggtggggacagctaggggttccgaagagaagagagggggacagctaggggttctgaagagaagagagggggacagctaggggttccgaagagaagagaggggacaggtaggggttccaaagagaagagagggggacagctaggggttccgaagagaagagaggggacaggtaggggttccaaagagaagagaggggacagctaggggttccgaagagaagagaggggacaggtaggggttccaaagagaagagagggggacagctaggggttccgaagagaagagagggggacaggtaggggttccgaagagaagaggggggacagctaggggttccaaagagaagagaggggacagctaggggttccaaagagaagagaggggacaggtaggggttccaaagagaagagagagggacagctaggggttccgaagagaagagaggggacaggtaggggttcaaaagagaagagaggggacagctaggggttccgaagagaagagagggaacaggtaggggttccaaagagaagagagggaacagttaggagttccaaagaggaggggacagttaggagttccgaagagaagagagggggacagctaggggttccgaagagaagacagggggacagctaggggttctgaagagaggggacagctaggggttccgaagagaagagaggggacagttaggggttccaaagagaagagagggggacagctaggggttccgaagagaagagggggacagctaggagttccaaagagaagagagggggacagctaggggttccgaagagaagagaggggacagctagggttccaaagagaagagaggggacagctaggggttccgaagagaagacaggggacagctaggggttaggggttccaaagacttcctggaaatatcgggtccttggatggtgctgctcaagagaaaaaacaatgaaactatcaccaactttgaaagaaatatgagaagtcaaaaccctgagccagatcgagagtggcactcacctttccactcaggacctttcctgcagagcagccagttccatccaacatgccttccccaagaaaggagagagacaaatgagaaagaaacctcatcctccagccaagccagttaacaaagcgggcacactccacactcctggaggcctccttagctgcagtcctattgtcagttgtcagcactctgcctgttttcttttttgttttttcgggggttttcctgtttttttggtttttg

SEQ ID NO: 12096 - DNA, 1422 bp, Artificial sequence
  DNA replication origin
cccgaacccggccggctgcaagaggcggcaccacttgagctccaggtcccgcgggcccgggcttaccgtgagcgccgagaacttctgagcgggcaccggcgggagcagcccagcgagcagcggcagccagcagagctgggggagcagcatggtggcggaggtggcgggagcgggagatcggccgcgtcctgcgccctggcactgcagccgggagagcccagtgggcgagcgcggctgggcgggcgcgtggaggggcggctccgcgatgctctccccaccgctcccggcggcccggctggagcagctcccctgcaggcacccagaggtcctccgcgttctttgcgtccgccctcgctcctgtcaaataccccggagcttcccggatcctcccctcccgcccgcctctctccctccccctctcctcccccagccccacctcccagcgcccgctgccgcgcccgctccgctccggtgcccgctgcggcccagaggcctccctggcgcgggtctgcggagcgagaggtggagcgggggccaccagggctgcgcagtggcctgtccgggctgtctctgtgcctccttccccgcgcgcactctcacacacacacgtgcacacttacacacacgcacacccaggcacacgcacgcactcatacccacgcgcgcgcaccctcggggggcttccaagcacaaccacgggacgcaccgcgccctcctcacgccccagggtccaggcccggtccgcgcaggatcagcccagcgggacttttcatccacaaaggttaacgccaagccttggccggtccccagactccggggttctccttgacctctgccctctaaggccccctggtccagcccagaacattgcctctcagaggtgctgaaggatcagcggcgctccagcaaaggcagctgggaacacatgtccaggaaaggctgcgccgggggcagcccgcctttggcatctttacacggggttatccactgcagggatgggggaatttaggtcctaaagatccggggtctgacctgggctgtagccttgatcctctcaagtcgggggagcatgtggttgggcatcattcacagacacatgtggctgtttttaaacagctctgtcaaagcatttcaggtgtttgtgcggggagcacagggcttgtggaggttgtaaactcacccacgaagactacgttggaaaccaggaaatttttgcacacccagactctggataatatccactgcagacaacattgctgacatagtttagccttggcttataactttacaggaaaaagccctaattctgtctcacacagaaagccagaagagtgaagatttgttcaagaacaatgaatcaattgacttgtcaggggcattgggaaaagcacaaaacacagaaaatccaaatctgaggtttca

SEQ ID NO: 12097 - DNA, 996 bp, Artificial sequence
  DNA replication origin
ctgcgtcagggtgttttgtttatctcttactctgttcagtgatcagtgaaggcgctagaatcaaataaatccaccctgcataccagctgggtgtcaccatggacatttgatttcttcttgggattagggacattgactcctgaaggctttccctgcccaggtcagggttgtcccatgtatcagcccacagtggaccaggaagatggtaggcattctcccacatcaggcccaaaccgacctgcgatttgtgactaggattagtggtgagttgatgatattgagggctgagttgtgaaggagcaaaatcctcccacagaagagactctttcaaattctctgccatgaaagcaacattgtgctggacttgagcagccctcctggtggtgacctgggctttcaggagcaaagcagaaggtgtggaaccactcccaggaggctggggaggaggatggcactggggaggaggatggcgctggggaggaggatggagatggggaggaggatggcaatggggagaatggagatggggaggaggatggcaatggggaggacgatgatggggagaaggatgaggatggggaggaggacggagatggcaaggaagatggggatgaggaggaggacggggatggtgaggatggtgatggggaggaggatgaggatggggaggaggacggagatggggaggaggacagaactggggaggaggatggtgatggggaggacgatgatggggaggaggatggtgatggggaggatggtgatggggaggaggatggtgctggctaccctgtctccactgaggcaatgaggcttatgcacatcttttgctaaactccctcttcctaccataagccttgcgatacatatttacgttttaaagtaaagtactaattaacatattcgtagcactttgagcaaggatggaaacgtgttgttggagtgagtagactaataattctaatgtctttgggcacgttttcagttttagaatgg

SEQ ID NO: 12098 - DNA, 1093 bp, Artificial sequence
  DNA replication origin
acaggagcgatgtcatcagtgcaagttctgtcaacccgaggctcaaagccggggcgtgggcctcgtgctgtgcaagcgtctagggcttcgtaggtgtgttttgatgaaggtcacagacgcgcctgggtccctggtggggaatctgggccatcggcaggaagcgtgacattgaggacaagctggaaagggggcgtttgccgcatcgggaagggtattctccggttgtggggaagatgagttccttcggtcatgcctgggttgatcccagtgagttgatgaaacaggatcctggcaccctcacatgtgaaaatgaagcagaacttgggtctgtagctagagccccagggtgggtgagccctggggtgggtgagccctggggtggatgagccctggggtgggtgagcactggggtgggtgagccctggggtgggtgggccctggggtgggtgagctggggtgggtgagcactggagtgggtgagccctggggtgggtgagccctggggtgggtgagccagggtgggtgagcactggagtgggtgggccttgtggtgggtgagccctggggtgggtgagccggggtggtgagccctctggtgggtgagccccgggctgggtgagccctggggtgggtgagccggggtggtgagccctgggctgggtgagcccgggggtgggtgagaccttggtgagaagagccccgaagtccgtgtggttgacgctggcccgattcattttctctgtgctttggtttcctcatcgctcaatcatgtttccttcaagtgataggcttcaaatatcttccctgatcaatgtttctctcactagaattttgaactctttggaaacctttcatagataacgtttactttattgtaaacaggataaaatttgctttgattgactgataccccaaaagatattcttggtgtactgcatttgcccacttatgtggctacactcacatcacaattagcacacttaagacctatgtatttaaatgacctcaaaactcctcaaatgaaatcccctagaccccagtcctccaagcagttgcttagaaagaaattatgggatatccttctaaggtaatt

SEQ ID NO: 12099 - DNA, 1057 bp, Artificial sequence
  DNA replication origin
cttcttttttttttgccaagagattttacgaaagtgacatagtttgtgaaagccaaatagggaatcagatgaaactggggagctctggatgaagcgaggtgctgctctgagagctggaactgggggctctggatgaagcgaggtgctgctctgagagctggaactggggggctctggatgaagcgaggtgctgctctgagagctggaactgggggctctggatgaagtgaggtgctgctctgagagctggaactggggggctctggatgaagcgacgtgctgctctgagagctggaactggggggctctggatgaagcggcatgctgctctgagagctggaactggggggctctggatgaagcgaggtgctgctctgagagctggaactggggggctctggatgaagcgacgtgctgctctgagagctggaactggggggctctggatgaagcgacgtgctgctctgagagctggaactggggggctctggatgaagcgaggtgctgctctgagagctggaactggggggctctggatgaagcgaggtgctactctgagagctggaactgggaggctctggatgaagcaaggtgctctgagagctggaacattgggggctctgaatgagttgaagcactgctttgaaagctgaaactggggtgctctggatgaagcgaggtgctgctctgagagctggaactggggggctctgagtggaagcactgctttgaaaactggaactggggtgctctggatgaagccaggtgctgctctgagagctggaactggggtgctctggatgccgctcccacagctggagtcctgctctcgtgccctgctccaggggctcctctagggcagatcagccgcttctgtgggttggtggtgggggaagggttgagagacacttgggcagcattggagggggcattcattgtcaggccactgcctgctggatcaggagatgaggaggtcacttccaactttctccctttgctcttctcagttgtagtgagtttccaaaaatctcaagaaaaacagcatatttgtcatagt

SEQ ID NO: 12100 - DNA, 1576 bp, Artificial sequence
  DNA replication origin
tgcttagctgaaagctggtcctatttagggagagcagcgtctatcctaatacagtgctctgcaggatgtaagaagcacgttctgttcttcgctaggactcaccccaggaggccgagtggctggttggcttctcacaggcctggagcccctaagaacacaggaccgctgctgccctggggccgagagacatatgccctcggtcctctggcaggacaccctccctgccacggccagtcttgcagtctaaggagtgcagaggagtctcaggtggctggagcccacagggtggatggatgcagttctgtcagcacgaaggggaaagggcctggcctggagttcacctcccctgccctcggaggggcacctggggacagtttctcagccctcccaagcccacctgtgtgacatggcagggaagcccagaggcacttcctcaccctggaatctggggagtggggtgagctctgctggaatctggcagagtggggtgagctctgctggaatctgggggaatggggtgaccactgctggaatgtgggggagtgaggtgactgacccctgctgggatgtgggggagtggggtgaccgctgctgtaatctggggagtagggtgaccgctgctggaatctggggtgtggggtgacccctgctggaatctgggggagtggggtgacccctgctggaatctggggagtggggtgaccgctgctggaatctgggggagcggggtggcccctgctggaatctggggcagtggggtgacccctgctggaatgtgggggagtggggtgacccctgctggaatgtgggggagtggggtgaccgctgctggaatgtggggagtggggtgacccctgctggaatgtggggagtggggtgacccctgctggcatgtaggggagtggggtgaccgctgctggaatgtgggggagtggggtgaccgctgctggaatgtgggggagtgcggtgaccgctgctggaatgtgggggagtggggtgaccgctgctggaatgtgggggagtggggtgaccgctgctggaatgtgggggagtggggtgacccctgctggaatctggggagcagagtgaccccctgctggaatctgggggagtggggtgaccgctgctggaatgtgggggagtggggtgaccgctgctggaatatggtggagtggggtgaccgctgctggaatgtgagggggagtggggtgaccgctactggaatgtgggggagtggggtgacccctgctggaatctggggagcagagcgacccctgctggaatctgggggagtggggtgacccctgctggaatctgggggagtggggtgacccctgcagaagcaggtgttttggtgcagataaaaaggccctttagaggagagggctgctgaccacatccccggagtcctcagcagcagagatgagccccagggtcaggttttctgttgtcccatcccaggtggttcagggacgccggcagtcaactcaggaaaaccaccaggggactgagtcgcttcctcccttcgctttgggcagtgctcagtaactgtggctcgtgctccctgacactgacg

SEQ ID NO: 12101 - DNA, 1573 bp, Artificial sequence
  DNA replication origin
ccctggtcccggcacccggggatgcggggaggaaatgaacatcgcgttcagggagcacacagccctggtcccggcacccggggatgcggggagaaagtgaacattgcgttcagggagcacgcagccctggtcccggcacccggggatgcggggaggaagtgaacatcgcgttcagggaccacgcagccctggtcccggcacccggagatgcggggaggaaatgaacatcgcgttcagggagcacgcagccctggtcccggcacccggggatgcggggaggaaatgaacatcgcgttcagggagcacgcagccctggtcccggcacccggggatgcggggaggaaatgaacatcgcgttcagggagcacgcagccctggtcccggcacccggggatgcggggaggaagtgaacatcgcgttcagggagcacgcagccctggtcccggcacccggggatgcggggaggaagtgaacatcgcgttcagggagcacgcagccctggtccccgcacccggggatgcggggaggaaatgaacatcgcgttcagggagcacgcagccctggtcccagcacccagggatgcggggagaaagtgaacattgcgttcagtgaacaaacaaatgaggactcaacgtcggaaacatcagtctccctcggcagggcacctccatgagtccccaggaaatccatcctggacacaatcacagaagcacagaaaattgtatccatagagaagtattcctcatggaagtgtccctaccaaaatactacacacagtatacgaatctattcctcagaactcggtttggtcaactatgttccatcatgcaaccgtctaaacagaaccatacacaccacgccgtggaaaagcgcctcacaaacgcgaccacaccgaagaatcacccggattgctgagacacgttcaggatccctgtgtcccatcggcacgtctggctcggaggctgcatttttccaataacctgagatggttatgtatggagcacatggtggagtaacatttgccgacggcacaggcatggcggcacaggtgcagcactgcgtaacagaatacagtattcacacacccaccggtgtttccacaggcagtcatcaccagattatgaattcacaagatattttactttattttccttgcttgttaatatctcctacaataaaccttttttactaaacaaaaagatgtattcaactgccattctgaacatagtcaatcttgcacctcagcagaaccaattctcaggtaatacacacagcggtccatgctcgggggttaacaacaaaaatgcattgttacgaaggtcaggccatgcgccactgtcactgcaaagagggtcgtggaaaccctgaactcccctccttcagataatcctgcactgctcagacagctacgctccattggttgttaaaaacttcactatgagttatgtgctcttggaaaagatgaagggatgaggagagaaaagaaaacaagacgtttaaaaaatacactgccccccagacaaataaataacacagaaatcagtgcaggaaaggattagagatgtacctgaaa

SEQ ID NO: 12102 - DNA, 1446 bp, Artificial sequence
  DNA replication origin
aaggagtaaataagaagatgggagtaaacagaaaatagcacccaccagcctaaactagacgtgaattatgtcattatgatgttcatttctttaatagttaagaccccttagggtaatgtgtgggcatactgtcaatacttgtaataattcctgaagaactcttaaggtgttggctgacactaaataacaatgttatgcatttctttaaaaacaaggtatgtctggggcagcatagtgttcccagagcagactggatgtggagaaaagggattcagagttccttgacaacaacagcaatgacatccattcaaccacgcagctgccagcaatgggctcaacagccacaaaacagatcagcagcagagctgtgtggcacactcagggccaggggaggcctccaggccagtgcacatatagctcagggaaacatggaaaagctggaagctggaactgggcagagggaacctgtgggttctgtctctgtggcattagtttagggagaagccagcctggtggtggtcaggtgtggcattagtttagggggcagccggtctggtggtggtcaggtgtggcattagtttagggggcagccggcctggtggtggtcaggtgtggcattagtttagggggcagccggcctggtggtggtcaggtgtggcattagtttagggggcagccggcctggtggtggtcaggtgtggcattagtttagggagcagccggtctggtggtggtcaggtgtggcattagtttagggggcagccggtctggtggtggtcaggtgtggcattagtttagggggcagccggcctggtgttggtcaggtgtggcatgagtttagggggcagccggtctggtggtggtcaggtgtggcattagtttagggggcagccggcctggtggtggtcaggtgtggcattagtttagggagcagccggtctggtggtggtcaggtgtggcattagtttagggggcagccggtctggtggtggtcaggtgtggcattagtttagggggcagccggcctggtgttggtcaggtgtggcatgagtttagggggcagccccagcctggtggtggtcaggtgtggcattagtttagggggcagccggcctggtgttggtcaggtgtggcattagtttacggggcagccggtctggtggtggtcaggtgtggcatgagtttagggggcagccggcctggtggtggtcaggtgtggcatgagtttagggggcagccggcctggtgttggtcaggtgtggcattagtttacggggcagccggtctggtggtggtcaggtgtggcatgagtttagggggcagccggcctggtggtggtcaggtgtggcatgagtttagggggcagccggcctggtggtgtcagattgacactttcaagtacttctggttttcaggagcttcgcgggaccatgtgcctgctggaag

SEQ ID NO: 12103 - DNA, 1561 bp, Artificial sequence
  DNA replication origin
aagaaatggtttcctccagtttccaacagttgaaactactgtttttttttttgtttttttttttgttttttttttttttgaggcagagtttcgctcttgtcacccaggctggagtgcaatggtgtgatcttggctcactgcaacctccgcctcccggattcaagcaattctcctgcctcagcctcctgagtagctgggattacaggcatccaccaccacgcccagctaattttttgtatttttactagtgacagggtttcactatattgtccaggctggtctcaaactcttgacctcaggtgatccacccgcctcggcctcccacggttctgggattacaggcgtgaaccaccgcgcctgaccaagccactggcttttataggcagctcatgcacaagagcagagcatcacccagcgttgggtgatcgccacttggagaaccagaccatccaggtgaagaggtgcaacacccacagctgatggacagactgtgtgtgagtgtgtgtgtggggagagtatgtgtgtgtgagtgtggatgtgtgagtgtgggtgtgtatgagaggggagtgtgtgagtgtgggagtgtggggatgtgtcgggggagttagtgtgggtgattgtgtgtataagactgtgtgtgactgtgggtgtggggggcgtgtgtgtgtgtgtgtggggtgaatgtgtgactgtgggtatgtttgtgtgtgggggggtgtttgggggattgtatgagtgtgggtatgagtgtgtgagagtattagtggttgtgtgtgactgtgggtgtgtgtgtgagagtgtgagagtgtgtaggggagtgtgtgagtgtgggtatgagtgtgtgtgggtgtgggtgtgtgtggtatgagtgtgtgtgggtgtgtgggggtatgtgtgggtgtgtgtggtatgagtgtgggtgtgtatgggggtatgagtgtgtgtgagtgggtgtgtgggggtatgagtgtgtgtgtgagtgtcagtgggtgtgtggggtatgattgtgtgtgggtgtgagtgggtgtgtgggggtacgaatgtgtgtgtgagtgtgggtgtggggggtatgaatgtgtgtgtgtcagtgtgtgtgtgagtgtgggtgtgtgtggtatgattgtgtgcgtgtgagtggttgtgtgtgggtatgagtgtgtgtgaaacagtgtgggggtgtgtgtgtggtatgtgtgtgtgtgggtgtgtgagagcgtgggtgtgtgtgggtatgtgtgtgggtgtgtgtgagagagaccatgggtgtgtgtgggtatgagtgtgtgtgtggtatgagtgtgtgtgggtgtgtgtgagagcgtgggtgtgtgtgggtatgtgtgtggtatcagtgtgtgtgagtgtgagtgtgtgtgtgactgtgtgtcggtgtgtgttgggggaagtgggggttctgctttcctggcttccacaccccaaagcctcccatggtcccggggggggtgggtgcaccctatttaccttgtggatgtgccgggaatggggcgccccgtgtccaccaggacgcaccagcagtaccccgtggaggggtggcactgca

SEQ ID NO: 12104 - DNA, 2743 bp, Artificial sequence
  DNA replication origin
tgtatggacacagagtgcagatagctcacctaactactcacatccccagaattacagtagtatgtttctaaagcctgaagctttgttcccagctcagctaaaatttagaagactcgtgtctgtaaattcagtctttgatatgacagcagggatcacagaagtagacatttttagtgggcagaatattgacacctcgtgtcacctttgtgaggctctcaaaggccaccaagcgaggtcctggccggctcctgtctgctttgtagaaaaggtaaacaccgaggtccttacatgtcacatgatacctggcaggaatgtgttgctcctgatctaactaccttttggaaaatgtcctaagctccacttagggcaaggtaaggttcattttatgctctctcagaaaaccataactaatcttcaaaaaattagaatagtgctaaaatcgtgtctgaaaaatccaggtgttgcctctaaggtttctacatgagtcaaagacgataattatgccagcaattgcttggggccccaagaaaaaagatgctcctggctgtagatgtgaagagaccctgtgctggctgtaggtatgaagaggccccctgtgctggctgtaggtgtgaagaggccctgtgctggctgtaggtgtgaagaggccccctgtgctggctgtaggtatgaagaggccctgtgctggctgtaggtgtgaagaggccccctgtgctggctgtaggtatgaagaggccctgtgctggctgtagatgtaaagaggccctgtgccggctgtaagtatgaagatgaagagaccctgtgctggctgtaggtgtgaagaggccgtgtgctggctgtaggtgtgaagaggccctgtgctggctgtaggtgtgaagaggccccctgtgctggctgtaggtgtgaagaggccctgtgctggctgtaggtgtgaagaggccccctgtgctggctgtaggtgtgaagaggccctgtgctggctgtaggtgtgaagaggccccgtgctggctgtaggtgtgaagaggccccatgctggctgtaggtgtgaaaaggccccgtgctggctgtaggtgtgaagaggccccgtgctggctgtaggtataaagaggccctgtgctggctgtaggtgtgaagaggccctgtgctggctgtaggtgtgaagaggccccctgtgctggctgtagatgtaaagaggccccctgtgctggctgtaggtgtgaagaggccctgtgccggctgtaagtatgaagaggccctgtgctggctgtagatgtgaagaggccctgtgctggctgtaggtatgaagaggccctgtgctggctgtaggtgtgaagaggccctgtgctggctgtaggtgtgaagaggtactgtgctggctgtaggtgtgaagaggccccctgtgctggctgtaggtgtgaagaggtcccctgtgctggctgtaggtgtgaagaggccctgtgctggctgtaggtgtgaagaggccctgtgctggctgtaggtatgaagaggccctgtgctggctgtaggtgtgaagaggccctgtgctggctgtaggtgtgaagaggccctgtgctggctgtaggtgtgaagaggctccatgtgctggctgtaggtgtgaagaggccctgtgctggctgtaggtgtgaagaggccctgtgctggctgtaggtgtgaagaggccctgtgctggctgtaggtgtgaagaggccccctgtgctggctgtaggtgtgaagaggccccctgtgctggctgtaggtatgaagaggccctgtgctggctgtaggtgtgaagaggccctgtgctggctgtaggtgtgaagaggccctgtgctggctgtaggtgtgaagaggctccatgtgctggctgtaggtgtgaagaggccctgtgctggctgtaggtataaagaggccctgtgctggctgtaggtatgaagaggccctgtgctggctgtaggtatgaagaggtcctgtgctggctgtaggtatgaagaggccctgtgctggctgtaggtgtgaagaggccctgtgctggctgtaggtataaagaggccctgtgctggctgtaggtgtgaagaggctccatgtgctggctgtaggtgtgaagaggctctgtgctggctgtaggtgtgaagaggccccctgtgctggctgtaggtgtgaagaggccccctgtgctggctgtaggtgtgaagaggctccatgtgctggctgtaggtatgaagaggccctgtgctggctgtaggtgtgaagaggccccctgctggctgtaggtgtgaagaggccccctgtgctggctgtaggtgtgaagaggccctgtgctggctgtaggtgtgaagaggccccctgtgctggctgtaggtgtgaagaggccctgtgctggctgtaggtgtgaagaggccccctgtgctggctgtaggtgtgaagaggtcctgtgctggctgtaggtgtgaagaggccccctgtgctggctgtaggtgtgaagaggtcctgtgctggctctaggagaagaggccctgtgctggctgtaggtgtgaagaggccctgtgctggctgtaggtgtgaagaggccccctgtgctggctgtaggtgtgaagaggccctgtgctggctgtaggtgtgaagaggccctgtgctggctgtaggtgtgaagaggctccatgtgctggctgtaggtgtgaagaggccccctgtgctggctgtagatgtgaagaggcactgtgccatgccctttagggagaggcct

SEQ ID NO: 12105 - DNA, 2431 bp, Artificial sequence
  DNA replication origin
actttttatttatcaaaataaaaaaaaatgcccttaaagatcatcaggtttagtagctttcaaacatcttcaccatggaatctgtgccccaactcaatctgacaaggaagcctggagcataagacacacatcacactggggctggctgggcaaaggttatggaggctggttgctcttaccagcctcctgcttcccatgcccagccccctagtggccagggacaccctgtccagtccctgggattcagagaacccagctttaaatgacactgcagtttactgctgaagccaatgacggggccatctctgcctcagagcctggccaagtgcccgtccagtcatctgtggtcacgcccatgcaggggggtgtgctccttacagatgccattgcacccacaacacataattgggcagaaagaaaagagaaggcctctttctctggcacagggtaccttctccaggactgcagcagcatggcagcatagccaatggcacaggttgggcatctcaatcttgtcctgggtcaggccttagcagctgtggaaccttagtaagttacttgttacttggtctttccaagctctgatgttggcttcacatggagcttcgtggggctcaattaccaagtgacctgcactgattaagtgctcaataaatgtttgtgatgaggagggtaatgatggtgatgaagatgattgatgatgaggatgatggtgaggagagggaggatgaggataatgatggtgatgaagatcatgaggaggaaagtgatgaagacgatgaggatgatggtgaggaggaagagggtgatggtaatgaagatgatgaagatgatggggagaaggaggatgatggtattggagataatgagaataatggggaggaggaggatgatggtgatgaagatgatgatgaggatggtggggaggaggaggatggtgatgaagatcattgatgatgatgatggtgaggaggaggataacagggatgaagaggatggtgagaatgatggggaggaagagggagatggtgatagagatgatgaggatgatgatgatgaggatgacagagatgaagatgatgtgagaatgatgatgaggaggagggggattgtgatagagatgaggaggaggatgatggggaggaggaagatgaagacagggatgaagatgatggtaagaatgatggggaggaggaggaagacggtgatagagatgatgaagatgatggggagaaggaggaggatgatggtgatggaaatgatggtgaggatgatggtgaagaggagggggatggagaaagagatgatcgtaaagattatggtgaggaggaggaggaccatggtgatgaagatgatgatgagcataataggaaggagaatgatggtgatggagaagatgatcaggagaaggaggatcatggtgatgaagatgatgacgaggataatggggggatggaggaggatggtggtgaagataacggtgagaatgatggtgaggagtaggaggatggtgataaagatgattaatggtaaggatgatggtgaggaggaggagaaggacaatggtgatgaagataatgatgaggaggacaatggtgatgaagatgatgaggatgatggcgaggaggaggatggtgatggatatgatgttcgggatagtgaggaagaggaggatggtgttgaaggaagattatgatgaggatgatgatgaggaggaggaggagatggggatgaagatggtgatgaggatgatggggaggaggaagaggatggtgatgaagatgattgatgatgacagtgatggggagaagaaaaaggaggatgctgatgaagatgatggtgagaatgatgatgatgagaaggatggtaatggagatgataataaggatgatagtgaggaggaagaggatggtgatgtagatgtttgatgttgaggatgatgggaggaggaggaggatggtgctagagatgacaataaggatgatggtgaggaggaagaggatggtgatgaagatgacagtgagaatgatgatgaggaggatggtaatggagatgataaggataatggtgaggaggaagaggatggtgatgaagacgattgatgaggatgaggaggaggaggatggtgattaaaattatgttgaggatgatggggaggaggaagaggatggtgatgaagatgattatgaggatgaggaggaggatggtgattaaaatgatgttgaggatgatggggaggaggaagaggatggtgatgaagatgattatgatgaggatgatgatgagaaggaggagatggggatgaagataacgatgaggatgatgatgaggaggaggtgatgatgaaaatgatgaggtgatagggatgacgacaacgatgcagctgcattctttcagtttccacaccatgctcttccaggtcccgtcgagc

SEQ ID NO: 12106 - DNA, 1469 bp, Artificial sequence
  DNA replication origin
tcgaactcctgacctcaggtgatctgcccaccttggcttcccaaagtgctgggattacaggcatgagccactgtgccctgcccacccttgttttaaggttggaattaatacatagatgaaagaacagtggaaaccggtgtaataaaactcttcggccacacactcatttcatcccctccatcttcctacaactgccttgattttgttgatgtcgatctcagaggaatctggccccactgactgttttaataatgattccattccccttcctggtgactgtcagtgagtgggtgttggaaagtgactgtatttggacagggcctttgaagaggtgatcaagttacaacaaggccacgagggtgcctaatccagtctaacgatgtccttctacgaagaggagatttggacacacagagatactggggatttgtgtgcctagagggacgaccgcgcgaggacatagccagcagccgcgtctcaagacaaagaggcggcccctgagaaaccaccctgcctgtacctcgaccttcgccttccaaccccgagaaagacaaggacatagatgtctgtggttactacccgggctctggtgttagggcagctgaaccggctgagactaggggccctggacctgggaccctgtccccatcctccctcccttgtggtgacatcttctgcatatgcaaagcgcaggacctggaatgaagctgccgtttgggccacaggagataaggaatttccttttgatttcagcgtgtttgggccaatttctttctcctcctgccacctgaagctgaagcgtcctgttagtatcatcactaacaggatatgcctgtaatctcagcactttaggaggccaaggtgggcagatcacatgaggtcaggagtttgagaccagcctggtcaacatagcgaaaccccatctctacaaacaatataaaaattagccgggcgtggtggcaggtgcctgtaatcccagctactcgagaggctgaggtgggagaatcggttgaacctggaggcagagattgcagtgagccgagatggcaccattgcactccagcttgggcaacagagggcgactctgtctcaaaaaacaaagcaaaacgaaagaaacaggacgtcctgtttctgtgtttagtatagtatctgtgttagtatccactcttgctgtgcccccgctggccggcctgtcctggtcaaaccctggccctgggcctgatgctcctctaagaatcgccgctctccccagtcagagtcctcatggcagccccacggtcagcagagccacgggccaccctcaccccgagtcccgctggaagccactcgccaagcagcctctcaggtaccgccctctgtgataaacagggcaccatgtccaggccaggagcctccacgagagaaaggtcagggggacggagcgtgggggggaccgcgtgcacgaggcggggacagagggtcggggggac

SEQ ID NO: 12107 - DNA, 1700 bp, Artificial sequence
  DNA replication origin
atcgccgctctccccagtcagagtcctcatggcagccccacggtcagcagagccacgggccaccctcaccccgagtcccgctggaagccactcgccaagcagcctctcaggtaccgccctctgtgataaacagggcaccatgtccaggccaggagcctccacgagagaaaggtcagggggacggagcgtgggggggaccgcgtgcacgaggcggggacagagggtcggggggacgcgtgcacgaggcagggatggagcctggggcggggggacgcgtgcacgaggcggggatggagcctggggcggggggacgcgtgcacgaggcggggacggagcgtggggggaccgcgagcacgaggcggggacgcagcgcggggggaccgcgtgcatgaggcggggacagagggtcggggggacgcgtgcacgaggcggggatggagcctggggcggggggacgcgtgcatgaggcggggacggagcgcggggggacgcgtgcacgaggcggggacggagcgtggggggaccgcgagcacgagggcgtcggctgctgggatttgaaggaagctctataaagcgagggagcagggacccccgttcctgccgggggtgccggggtggggaaagcacagaatcttcttgaggccctgggctgagtgaggggcgcacaggaggcgggagctgcacgggtgactgtggggtggcggccgtggccagagcgcagggagggagacgggaggccacccggctgccgggtttcctcctggaggctccgtggccattttcctgagctagaaaacgggcccacgccatcaaggtggggacaggcccgggctcccttcttgttttgaataaagaccatgttttccacgtggcgtaagacatggcgtgatgacacttaacttcgcactactaaaaataccttaagagatacttatcttgtttaaataatttggaattatggctccacattaaagaaaacaaactccaagcaacagcttttctttctctccttcccttgtgaggtccgccggcaaaccaccaatgtttccgtattcaaggccaaaataccctagggagggaccggactccttttattctttacatagcattgtcagtgtttggggacattggaaggaagctaaggaagctatagtgacaaactcctgccactctcgcgttcagaggtctgcaggacagcaggctcgtgagccggggagcgggctgcatcccaaagatgcccaggcttccaggtgcctgaaacctgcagggatcagtctaattgcctttctccacgataccattgctcttaagaagtgttttggcaatgacttttaacaataggacgatggctgagttcccagatctgcattacggaggcattttaaaagcccacatcttcctcagctacaccgagtctctctcctgatgtcagtgctgtgtggctgaaaatcagcttttttagaaggccgtttaatgtagagatttatagggccgcatgaacgctgcatttaagaagaatttttttaaaactataaagtatgacatatttaatggggatggggcaatgtgatatgatggctaaggctttgtaaaacttttaaataaaattaacacacataacttttaatgcccccatgtcaaagcatcttaacattataagaagtaaacacataaaatcccatcccctttcaaagccgcac

SEQ ID NO: 12108 - DNA, 2958 bp, Artificial sequence
  DNA replication origin
gttgaattctttttcactgctctaaaatattgtttcaatgcaagcaatagggcccctactgtcctgttttaataaagtgattattccaaaggaatgatctgctcttggatgagaacatttacatatggcactctttcttccaggcaggtatttccaactctgctgtttctaaaaggtctcgagaactagagtgttggacgtgactgagatggactgagaacacattcttcccctttaagttattagattctcggtggtcccgggcaaggattgggaaacgtttcattcaacagggattgagcctgtcgtgctgttgagagaaacatcaggtgcatttcaacatcttctcatggaatttctggccatcaatcactgcaggactgtaggagggaccctggggcccgggcagttcatgacacggcctggagggaagcataccggccatggcctgagtcccagagcaggacggaggctgcgcctgtcaggggggcttgccagcctgcagagtgtagacatcgtgtaaatgtcaaggagtgtcacaggacaagcgtgttgctgagagaaggtgtcctgtgcgaggtgtgcaggggtgataggtgttgaggatgctgagtccagagggcagaggcctggggcggtgggcacgtcaccagcagagaggccgctggagaccacagaggaagtcgaacccaggggacagagctgtgtcccagaatgagctgacggtctccatggctgcttaggtagagatgacaagggggaaagagaaagaggcttggcagtttctgtcccaggaagaggatggttccactaaaagtagaaggccctggcccgctggggctttctcaggggctggaggggaatgcgaggagcttgatgttagacacggcggcaaagctaatgtaggtggagatgcacctctctagatggacagctggcaatttgctggggcgtggacgtcacgttgagtccattgagacgcaggcctgcagggaagagaagtcgggtcagggcgttctgctcagaggcctgaggtggggaggaaggggcgtggaaggaaatgctggaggttggagagtgagtcaggaggaggttgtcttggggagcagtcacggggccacaggcatctgagatggggagtggagagcggagcactcacagggccacaggcatctgagatggggagtggagaggggagcggtcacggggccacaggcgtctgagatggggagtggagaggggagcggtcacggggccacaggcgtctgagagacgggggagcacgaggcccaagaaggccgatgggtttagggtgggaggagctccctctggagatcagtgtttccacaaggtggtaggggcagaggaagcaggatgggtgctgatgaggacgcggtgctgatgaggacgcggtgctgatgaggacagggtgctgatgaggacagggtgctgatgaggacagggtgctgatgcggtgctgatgaggacagggtgctgatgaggacagggtgctgatgaggacgcggtgctgatgcggtgctgatgaggacgcggtgctgatgaggacgcggtgctgatgaggacagggtgctgatgacgcggtgctgatgaggacagggtgctgatgacgcggtgctgatgaggacagggtgctgatgaggacgcggtgctgatgaggacgcggtgctgatgaggacagggtgctgatgaggacgcggtgccgatgaggacgcggtgctgatgaggacagggtgctgatgaggacgcggtgctgatgaggacagggtgctgatgaggacgcggtgctgatgaggacagggtgctgatgaggacagggtgctgatgaggacagggtgctgatgacgcggtgctgatgaggacagggtgctgatgaggacgcggtgctgatgaggacgcggtgctgatgaggacgcggtgctgatgaggacgcggtgctgatgaggacagggtgctgatgaggacgcggtgctgatgaggacagggtgctgatgaggacagggtgctgatgaggacagggtgctgatgaggacgcggtgctgatgaggacgcggtgctgatgaggacagggtgctgatgaggacgcggtgctgatgaggacagggtgctgatgaggacagggtgctgatgaggacgcggtgctgatgaggacacggtgctgatgaggacgcggtgctgatgaggacagggtgctgatgaggacgcggtgctgatgaggacagggtgctgatgaggacagggtgctgatgaggacagggtgctgatgaggacgcggtgctgatgaggacgcggtgctgatgaggacagggtgctgatgaggacgcggtgctgatgaggacagggtgctgatgaggacagggtgccgatgaggacagggtgccgatgaggacgcggtgccgatgaggacgcggtgccgatgaggacgcggtgccgatgaggacgcggtgccgatgaggacgcggtgccgatgaggacgcggtgctgatgcggtgctgatgaggacgcggtgctgatgaggacgcggtgctgatgcggtgctgatgaggacgcggtgctgatgaggacgcggtgctgatgaggacgcggtgctgatgaggacggcgaaggtcaggaagtgctagttccgagcgaggagggaacaggaggtgagcgggctgggctttagggtgaggcgaggctcatgaagactaaagagccagggaggcgcaggaaccagggagtcgaggatccagggctctgccgagggggcctcagcggggaggcgtgaagccgaacagaacgacaggcagaggtggaggctgatgctgactgtgtgctgaagccggccctgtgaagtaggcagccccatcacttggttcacggacacgcagttctcaagggcgtgcaacctgccaggcgctgcagagcgtccgggatgaaaacactaacatggatcactcg

SEQ ID NO: 12109 - DNA, 1246 bp, Artificial sequence
  DNA replication origin
caggaagtgctagttccgagcgaggagggaacaggaggtgagcgggctgggctttagggtgaggcgaggctcatgaagactaaagagccagggaggcgcaggaaccagggagtcgaggatccagggctctgccgagggggcctcagcggggaggcgtgaagccgaacagaacgacaggcagaggtggaggctgatgctgactgtgtgctgaagccggccctgtgaagtaggcagccccatcacttggttcacggacacgcagttctcaagggcgtgcaacctgccaggcgctgcagagcgtccgggatgaaaacactaacatggatcactcgcaggtccccctggagtcaggagggataacccggaaagaggcccctgtggtgtgtgccgcagcccacagggcagttcagtgcccagcagcaccaggtggcaggaggtgcctagggcaggcgcccctgtgcaggacgctgggggacacaaggggtttggctgcaagacaggagggagggatgggatggggacaggagagaggcacggggacaggagggatgcgatgagggaccagagggatgaaatgggattggggacgggagggagggatggggacagaagggagggaaatgggatgggagggatgggatggagacagacaggagggagggatggggtacaggaggatctcagctgggggacaggagggatgagacagggtagttgggcttccagaaaggccaaggagagcttctctggagtctgtacagaagcaggaagctcagtgaggacacccctgggatcctgctgatgagggagaagagagctttacactcaggcccaggctgtccccgctggctgctgtggcgctcggctctgggagaggcccgtgctgcttttcctgcgcgacaccagcaggagtgatgtggaggagaggctgacaggctcagaaagtgagggacgggctccatccaaatcgatgggcagtgaagattggcatggtgctgagagcccaggacagctgcacagggaccacactgaccacggcacccactcagcattttccctcgtgggccaggatgcttatcctcctctgaagggaaccctgtcagtgctgaccatcttttaccaggtattggaggatgcttagcaaaatcctttgaccaaaggctcgacattcacagattctagacgttcctatgaaaatacctacttatttccactggactgaactctgattaaaataaaaacaagg

SEQ ID NO: 12110 - DNA, 814 bp, Artificial sequence
  DNA replication origin
gggcttcctgctgtccttcctgtttgtaattcggttttacttttcttacagggcttccgaaatcattgaagtgtcaaaacctgaatccaccagaatgtgtccatggaactgaaaactatcagatatttagacagggtgcgttaaagggctcaccgtgcgtccgttttatgccgtaattatgtgcacaaataattgcatggccggcgtcgcgtgagacgcgggaaggaccggggagcggcagaaccagggcttccaattcccgtccgcgtttaaagcgcgccagcgccctctggtgctcaggctgcgcagcgcgccggctccgcgggtgccgccaagggccggggctgcctgggggcctgcccggggttccagacctgctggaccgtgcatggctcatcaggccgggcctgtccaggggtttgagaaccgcagacctgcaggactgtgcatggctcattaggccgggtctgtccagggggtccagacctgcaggaccgtgcatggctcatcaggccgggcctgtccaggggttccagacccgcggggaccttggctccatcaggcgggaaccgccccgcgggattctgaaaggatgaatgcattttcctctttctagcatggaaggattgttaattatttcttcgtagttttctgtgcttccctttctcctttttgcctcacctgctctttcctcctgaatcctgagtgatttgggtaaagccaatggtcggattacctgggaagaagctgggaagccaaatgtatgaagagcggggcttcagataggggccacggagagcccaggcccaggagg

SEQ ID NO: 12111 - DNA, 1135 bp, Artificial sequence
  DNA replication origin
gtgcatggctcatcaggccgggcctgtccaggggtttgagaaccgcagacctgcaggactgtgcatggctcattaggccgggtctgtccagggggtccagacctgcaggaccgtgcatggctcatcaggccgggcctgtccaggggttccagacccgcggggaccttggctccatcaggcgggaaccgccccgcgggattctgaaaggatgaatgcattttcctctttctagcatggaaggattgttaattatttcttcgtagttttctgtgcttccctttctcctttttgcctcacctgctctttcctcctgaatcctgagtgatttgggtaaagccaatggtcggattacctgggaagaagctgggaagccaaatgtatgaagagcggggcttcagataggggccacggagagcccaggcccaggaggcctgcagagcctgggaggagggaggctcacccagcccggggcctggccccatgggggtcctgctgcagaggaggagggaggctcacccagcgctgggcctggcccctggtggtcctcctgcagatgtagccgtgagggctgctgaccccctccaacttcaccgcctctcctgaatcccaggccatcccagcctcgtctggcggtgtgaagagtggatctgaattccaaagatctgggtcttgctctgactttccccatttgctgcagtttgaggaagtaacgaattattttggaatcttcatgtgtgtacattttaatttttaaaataagggtaaaaaaattccaccattgcaggtgactgaaagtgaggagggagagcttgtgtggaaggacatgaaaaattgctctcggagccaacaactgctgctcccttctccctgcaccctctagacaggcgctgttcctgaccctgtgaagaggcagcgtcatgcggggcgatgggaacacagagactgcagcatggacagacgtttgtgttgcaagcagacacacacctccagggtaaatgtttattccagaggcaccaccattcccacgcccagcgagtgtgcattctttctggattcagagccccacagttgtgtttgtgagtcatcaatggtgaacggtggggccttctggggacaggggtgtgatccatgtctc

SEQ ID NO: 12112 - DNA, 1314 bp, Artificial sequence
  DNA replication origin
aattccagtgtttcttatgcatgatcatttgattttattcccctatgcccaagcgttaagatgttttttatttttttttcctattggatcaagtaggctatgtcccagtgtataaatctcacttattacacataaataaacttaaaatatgattgaaatctctatatgtgctttccactgcgtcagacggaagtttggagacagaagtggttgaacacaggtcagacgaatcatacgcccttcgcccttcgccctccctacctcagaggtcggatgtggtgatcggggctttccacatgtctgaaatgtctgacatggatgtggtttttttaagcaaacttcttagaactctgttttattttacatttacagaaaaactgagaaagcagtactggaatcccacaagccccacaccactttctgatgccgtgaacgtttttcctggtgtggtgcatctgcctcagtcatagaagcagtgttggtaatcagcatcgtggaggcggcgtcggtggtcagcgtcgtggaggccaggtcagtggtcagcgtcgtggaggtggcgtcggtggtcagcgtcgtggaggccaggtcagtggtcagcgtcgtggaggtggcgtcggtggtcagcgtcgtggaggccaggtcagtggtcagcgtcgtggaggtggcgtcggtggtcagcgtcgtggaggccaggtcagtggtcagcgtcgtggaggtggcgtcggtggtcagcgtcgtggaggccaggtcagtggtcagcgtcgtggaggtggcgtcggtggtcagcatcgtggaggccaggtcagtggtcagcgtcgtggaggtggcatcggtagtcagtgtggtggaggcagcgttggtaatcagcgttgtggaggccacgttggtagagtcatggaggcagtgtcggtaatcagcgttgtggaggcagcgtcgttagtcagcgtcatggaggcggcgttggtggtcactgtcgtggaggccacgttgatagcatcatggaggcagcgtcggtagtcagcgtcgtgggggcggcgtcggtagtcagcgtcgtggaggcagtgtcggtagcgtcgtggaggccgcgtcggtgttcagcgtcgtggaggccacattggtggcgtcatggaggcggcattggtagtcagcgtcgtggaggcggcgtcggtagtcagcgtcgtggaggcggcgtcggtagtcagcgtcatggaggcagtgttgataatcaacatcagctcagggcgtccttgatccgcgtcccctcagtcttccctcctgcgcaggatcccacgtgacacttagtcctcatgtctc

SEQ ID NO: 12113 - DNA, 796 bp, Artificial sequence
  DNA replication origin
tggccatccatcttctccactagagtgtggtagacggcagctaagggcagctcagcccttctgcgtctgtgaatgggtcttgtcttcaaaggtcaattcggggagccctctttctaagacagtgactaaactcctactgaggttgacgtgctctggcggggtaagggcaggagacgtgaaagctcaagttagatggtgggttacaagaactcagtggtccattgccagggaggtcgcctcattttctgcttagtagatgactgggagctgctgggcgagaggtgcggtcccagcgatgcaggaagagcagctcagggggttgggggctgctcggggtgcagggacacatggggggcagggacacatggggggcagggacacatggggggcaggggcacatggggtgcagaggcacacgggggggcaggggcacacgggggggcaggggcacacgggggggcaggggcacgtgggggtcaggggcacccggggggcaggggcacgttggggggcagggacatgtacagctgcctgtggacctgaacccgctgagatgccggtgcctgcccctctgaggatgaggccccctctcccaaaagtaacgttcctcggggtcatgcagtgagcatgggcaaagagaacggacgacagttgcatcagacacaggaaagggcgattcacacaaaggtcccagcactgggagccatccccttgctctacagctgcgagagcctgagttcaggggaactgagtcacaggccccaggcccacagcggccccgtgtgcagcgcctgag

SEQ ID NO: 12114 - DNA, 1527 bp, Artificial sequence
  DNA replication origin
gtgggagacgcgcctgccaggacagctcggggctgccgcgggggtgccccggccgcgcagcggagcaggatgggctggagtgcagccggggagcgggtacccggcgtctcggggctgcccgggcacctggcaagcgtttttcgaggcctccgtccatctgcgcccccgccgcaccttcccccactcggcggcgggtccccggggagcgatgagccgcccgtgcctggtgcgctcggatgcccggaggtttctaggacaccgaggctaccggtgggtatcgaatgccctcgagttgttcacggtccggcgtgggttccaaaaaccgcctttggtgaaacaaggcgccctcagagccgccccgcatcggggtgtgcctgggcctggtccccgcaggtggctctcggggccggttctcggtgccgccggttctcggtgccaccagttctcggtgccgccggttctcggtgccgacggttctcggtgccgacggttctcggtgccggttctcagtgccggttctcggtgctgccggttcttggtgccggttctcggtgctgccggttctcggtgctgccgattctcggtgctgacggttctcggtgctgccggttctcggtgccggttctcggtgctgccggttctcggtgctgccggttcttggtgccggttctcggtgctgccggttctcggtgccggttctcggtgctgccggttctcggtgctgccgattctcggtgccgccggttctcggtgccgccggttcttggtgccggttctcggtgccggttctcggtgctgccggttctcggtgctggttctcggtgctgccggttctcggtgctgccggttctcggtgccgccggttctcggtgctgccggttttccgtgctgacggttctcggtgccggttctcggtgccggttctcggtgctgccggttctcggtgctggttctcggtgctgccggttctcggtgccgccggttctcggtgccgccggttctcggtgctgccggttttccgtgctgacggttctcggtgctgccagttctcggtgctgcccccgccccccaggcaggacccaccaccccctctgctctgcccgcagcgaccctgtccctgcaggccccgcgccccaaagaccagggacctcgcccatccaggttcctaaatatgaaggaaatggcggtcaaggacaggaaagagtaggttttcgttatcttagtgaaatgaatgggggctcagtagatgattctggtttcgagaactctcgctgcccccatctcctggcactgactcctcagccaccagcggggagctgtgcagagcccggggactcactggggtgggtggagaacgtgtcctgtcacccagagccaccaacaaatgccactttctacgtgtgctgagaccttcgaaatatcagggatgtctgatgggagctttaatcattactttctgaaaaaaaaatctctatctctatctgtatccatatatacactgagctagtttacgtggtgtataagagg

SEQ ID NO: 12115 - DNA, 1121 bp, Artificial sequence
  DNA replication origin
ttgtgcttgcagaaaatcacggtgggcacaaaattttggacacgatttcgagagcgtgagagctactgttcacgaatccagggccagcctcgtgtctgtcttcctttaaagcacctggcttggtacctaaaatgttccttttttttttttttttgaaattcaataacttcagaacaggcgttgatgtagacagatctccatctttttggttttttgagtgagtttttgctctgtaggctgaattctttggaatttagttctgaaatcaccctattgttgagtattcgtttcctagccatctgctgctgtctgcctttctctgcaaccttggtgggtctgacgagcaagaagagtgtgggcagcaaagcctcggggaaagcccagagcagcagagcaggggtggaaggagcagagcggcaggggcggaaggagccgccgggcaggggcggaaggagcagagcgataggggcggaaggagcctcggggcgggggcggaaggagcagcggggcgggggcggaaggagcagcagggcaggggccgtaggagccgcagggcaggggcggaaggagcagcagagcagagcaggggcggtgggagcagcagggcaggggcggtgggagccgcagggcaggggcggaaggtggcggtggggagagggagatgtagagcgaggagctggggtggctgtaggggaaacctaggggcatgtttatcattggtaagagtagggggagcagagcttgaaacatttatacagtagtttttagctgatggaagaaggaagataatttcgtgtcacattcctgaaagctattcaaaatggaatctcacatcacatctgagacagtaaacaaacgttcaccatggaatagaatttgaaacaaaaaatacaaatagcttcctttatggaatacctactgcatgtctggccatgtaccaagtgttctgcaacatttatgttatttaaactgcccagtacttccattgcttctcctttacagatggggaaactgagtcatcagggaggtgattagcgtgcagagggtcacattgctggtaactggaagggcctggatttgaccacaggtgttttatgacaactccaaagacaaaaaatcaa

SEQ ID NO: 12116 - DNA, 1403 bp, Artificial sequence
  DNA replication origin
acgtttttgttaatattttgacgaactttagagctgtattttgggagctctcatttcttttgtaattgcaaaggacagttctcctttatttatagtccaggtccctgttttattggtcaaattcatttaaaattctgtacttcgttatattttagcatttatggtataatcacatttttaaatgtgtttttccttcttttattctttcccattcatggagaggtttgtgataatgcttactgaacattggcattagtgatttctgggtggtaaaattgggataatttaattttgctttctttatggttttgagttttatccctaattacaaagttattagtttaaaatttaaatatgaaaattttaaattttcaaaatgaagtcatcaggatgtggggcctggtggaggctggggtgactgacatcccccagttgacagtggtgggtgggaataaggtgtgggaagatgggcttattccaaggggaggggggtttggcgttggcttgagatggatctgcctgtgggcatcctgtgccgacagccactcgccatgcagagtggaggctgaagaaagcagctcgctgcaaagaggccagcggggtacaaagaagtactaactgcagggcaccgagccctgcgcaggaaagagcgggttgtctgggaggcaggaggaactctgtccccgaagtcacaggaggtgcccaggccttgagaggaagcagcaggaatctctgtggggcgtccctgagctccagtgaagcctcagccccgtgtgggcagaagttgggggaacatctggaaagcatgaccaaggggacgcctgcaggagctgccagaagcagtatggcagggacagggtcagagggaggaggctgcagggtccaggagaggtttcagaagcagaagaggctggagcttgcctatgctctgcgagagggcaaatcccaggagaaaggaacacacaggaaaaggggggttactggaggtgtcccgttggagggaggaggctttggggtcactgcactgaagcaggacaggccgggcctctgagggccaggaggagggtgctggtgggtgggggtctgcagaggggtgcagcgggctctcagaacccactttggctgctccaccattcaacacagggactgccgagagtggcgggcggtgtttcaacaagaactgagttgggtgctgaaggcttagaagagcccctcaatcaaattggagaagaagggaattgagatgaaacagctttgaagtcacacaggaaatgtgcggtacctgtcaggcaaatgagttaataaatacacaaatgggttaatgcaaatgggagatagaagtaggacttctttttagtggctactacaatacggatttttaatttcacctttctgcgtctagt

SEQ ID NO: 12117 - DNA, 1589 bp, Artificial sequence
  DNA replication origin
ccctgcccgccccgatacagagggaaccagcccgtcggggtcggcctggaagcagccaagacggaaaagcaagtacgcaaggccggccttccttgtgtgttgcgagcggctttggaaaaatcagatgagctcagaaaagcagcaggaggaaggagaggaaggggtggcgtggcccgggagaggcatgggaggggctggcccggggaagctgagcacctgctcggctgggccgctgctctccgcgcggggtgcggggcgtgctcagccgggcctgtgagggtcaggccgccacctctccgctgttagcgcagcccttggtgagctgcagccgaggctcagaaacgatggctgagtcacaaacggagcctcaggaacgaacagcacctcaagtgcgtgtccagaaagcccttcccacttcaggacttgggtccgcttgggaccggacctgctggggcctgcggtgcccgacgccccgcctcgacgcctccggagccatcgtcctgcctgtcgctaaccccgcagcccttctccccgtaggtgtgtgagcccgaaaacccatgcaaggacaagacacacaactgccacaagcacgcggagtgcatctacctgggccacttcagcgaccccatgtacaagtgcgagtgccagacaggctacgcgggcgacgggctcatctgcggggaggactcggacctggacggctggcccaacctcaatctggtctgcgccaccaacgccacctaccactgcatcaaggtgaggcgcggggctcgcagggcacacggggccacggcggtcagccctcctcctggcgccggggacgctacgcggacggggggcgggggcagcacagggaatttggaaggagggtctctcaggcctcttgcctgatcaccaggttgaatgcatccccctggtcccctctctggaggtccttagtagacacaggcacactctggcgccgcccactgctgggcacagagaacctcgggcacgtcggcccatatttgcaattgcgcgcatcgttaacgcctgaaactgagcagagggaggacgccggctccacgctcggctccaggctgtgcagaggccattgtgtctcaggcaggtctggccaggctatgtcacttggaaagagttaggacatggttttcttcccaaagcccaagcgtgttgcagtataaggagctgctcagctggaagaaggagctccttcggggcccatcccaggctggactgctttcctgtggccgctggaacgaacaccacggcccgggaggctcacaacaacaggaatctgttatctcacagctctggaggcctgaaacacaacgtcaaggtgctagcggggccgtgctccctctgcttctcccagcttctctggctcaggcgtcgctgggcttctggcgctggtggctgcatggccctgacctctggtcggcttcacaccactttctccagtgcctttctctccggaaacttcctctgcctctctttgataagaacacctgtggttgtatttagggcccacccagataatccaggatgagcctcactgttcaatgtccttgacctaattccacttgtta

SEQ ID NO: 12118 - DNA, 1921 bp, Artificial sequence
  DNA replication origin
tccaccattgcagcaggcgtagtggtgcgatcacgctctgacctgtagtcagccaacctggggagaaaccagtttgtggggctgtgtagggaacaccatgtcccacctgctcttccctctcactcagccaactcacgttctccaccccgggtcttgctctgagctccccctggttggctttccccgcagtcgatggccgctggagcccctggtccccgtggtcggcctgcactgtcacctgtgccggtgggatccgggagcgcacccgggtctgcaacagccctgagcctcagtacggagggaaggcctgcgtgggggatgtgcaggagcgtcagatgtgcaacaagaggagctgccccgtgggtgagtgaggggtagaagcgggggcactgaaacccgggcttccattctgatgaaaagcacaaacgctttgggaaactagatgaaaaacacagaaaagaaaaatcaattttagttgcacacgcaaagataactacttttaacatctgtgtttcagtcctcctgtatttctaatgtaaaaacaaaaaagatgccaggtggcgtggcctgtggaatgtgggtagttgtgtggcgtggaatgtggtgtgtgggtaattgtgtggtgtggcctgtggaatgtgggtagttgtgtggcgtggcctgtggaatgtgggcagttgtgtggcatggtatgtggtgtgtgggtagttgtgtggcatggaatgtggagtgtgggtagttgtgtggtgtggaatgtggtgtgtgggtagttgtgtggtgtggcctgtggcatgtgggtagttgtgtggctgggaacatagcatgtagatagttgtgtggtatggaacatggtgtgtgggtagttgcatggtgtggactgtggcatctgggtggttgtgtggtgtggactgtggcatctgggtggttgtgtggtctggaatatgtagttgtgtagtgtgaaacgtggcatgtgagtagctgtgtgttgtgaaacatggtgtgtaggtagttgtgcggtgtggaacatggtgcatgggcagcggtgtggtgtgaaatgtgacacatggtagttgtgtggtctggaacgtggcatgtaggtagtagtgtggtgtgtcaccttgcatgtagttatgtgttgtagaaggtggtgcgtgggcagttgtatggtctggaacatggtacatgggtagttgtgtggtctagaatgtggcatgtaggtagttgtgtggtatagcacctgacgtgtgggcagttgtgtgttgtggaaggtggtgtgtgggcagttgtgtggtctggaatgtggcacatggtagttgtgtggtctggaacatggtgtgtaggtagttgtgtagtgtggaaggtggcgtgtgggtagttgtgtggtctggaacgtggcacataggtagttgtgtggtgtggcacctggggtgtagttgtgtgttgtggaaggtggtgcgtgggcagctgtgtggtctggaacatggcacgtaggtatttgtgtggtgtggaaagtgacgcatgggtagttgtgtggtctggaatgtggtgcataggtagttgtgcagtgtggcacctggggtgtagttgtgtgttgtggaaggtggtgcatgggcagttgtgtggtctggaaggtggcacgtggtagttgtatggtctggaacatggtgtgtgggtagttgtgtagtgtggaaggtggcacgtgggtagttgtgtgatccggaacgtggcgcgtaggtaggtttgtggtgtggcacctgacatgtagttgtgtgttgtggaacctggtgcgtaggcagttgtgtgttgtggaaggtggcgtgtgggtagttgtgtggtgtggcccgtggcgtgtagtcataatgtacacgtgcttctgcaacccgctgcactgtgtccacctgagcaatgcggtcttggagat

SEQ ID NO: 12119 - DNA, 1977 bp, Artificial sequence
  DNA replication origin
ttctccttccctctcctcagcagctgtgagatgctcctcggttaataaggcacaccgcttacaggcaaatacccctctaggcggcacagcctgatctctctccgcttcttgtgttagtccggcaggacggcggctggagccactggtcaccttggtcttcatgctctgtgacctgtggagttggcaatatcacacgcatccgtctctgcaactccccagtgccccagatggggggcaagaattgcaaagggagtggccgggagaccaaagcctgccagggcgccccatgcccaagtaagtacggtgaaggcggggccctgggtgggcgggcttgcaggcagctcacagtgagcagccacagctggagccgggatccggggtgtcagggcctgttccagcccagcccagccccagccgagcagcaaagggggctgccatcccgggcctggctcggtaatgaacccatcctttgtgattaattctgctcacctgtgctcagcgcaaacctcctctgagatagccccgtttcattccagttcaggacagactgtaattaaaggaagaatgatccagcaccgcagctctgtcatgggagtgagtgtggatgggggagtgagtgtggatggggagtgagtgtggacggggagtgagtgtggatgggagtgagtgcggacgggagtgagtgtggacggggagtgagtgtggatggagtgagtgtggatggggaatgagtgtggatggggagtgagtgtggatggtgtttatgggggaatgagtgtggatggggagtaagtgtggatgggagtgagtgtggatggcgagtgtggatgggagtgagtgtggatggcgagtgtggatgggaatgagtgtggatggggagtgagtgtggatgggaagtgagtgtggatagagtgagtgtggatggggaatgagtgtggatggggagtgagtgtagatgggagtgaatgtggagagtgagtgtggatggggagtgagtgtggatggtgtttacggggcaatgagtgtggatggggagtgagtgtggatggtgtttatgggggaatgagtgtggatggggagtgtggatgggagtgagtgtggatggggagtgtggatggggagtgagtgtggatgggggagtgagtgtggatggggagtgactgtggatgggaatgagtgtggatggggagtgagtatagatgggagtgaatgtggatggggagtgagtgtggatggggagtgagtgtggatggtgtttatggggcaatgagtgtggatggggaatgagtgtggatggggagtgagtgtggatggggagtgagtgtggatggtgtttaagggggaatgagtgtggatggggagtgagtgtggatgggagtgagtgtggatggtgagtgtggatggggagtgagtgtggatggggagggagtgtggatgggggagggagagtgtggatggtggagggagagtgtggatgggggagtgagtgtggatgggggagtgagtgtggatggggagtgagtttggactgagtagtgagtgtggacagagggagagtgtggatgggggagggagaatgtggatgggggagtgagtgtggataggggagtgagtgtggatggggagtaagtgtggatggaagtgagtgtggatggagtgagtgtggatggggagggagtgtgaatgggggagtgagttgtatgggcagtgagtgtggatgggcagtgagtgtggatggaagtgagtgagtgtggactgagtgagtgtggatgggcagtgagtgtggacggggagtgagtttggactgagtagtgagtgtggacagaggatgccgcagatgcacagaactgtgtctctctgaaatagcctttccctgcgtctgtgcagactagggtgtgagttacagagcgcttggcccaaagcatcaagggcttccccagggaggcctggctcgggaagtgcatggatgtgctgaga

SEQ ID NO: 12120 - DNA, 2184 bp, Artificial sequence
  DNA replication origin
tggaactatcaaaagcaaacctttaaaacttatgggaaactcttagatcttccaaaaaaaaaaaaaaaaaaacacagagaaatctagatctgttatctccagatgtgtagaataagtatggatctatatacatatatctaccggaccatatgtggcaatcacccatgagttagtctactcaaagccaggtggatgccaatgtcccatttggagatctttgccaacacaacaaagacttcttcttcactggttatgtcagacttaaggaaaattggtcttatacaaacagctagttcatggattggttcttggtaatgacatccccttttccactgtttgttaaaagtgagagtaaccttgtgaagaggctgagccattattattttacaactgagaatactggcagaagcctggagaaatgcaagttagctggaaggttttactaccaggtaaaactacattcctgtcagagccagagcagaagcaaagatatatgcggtcttttgtttaacttttagaggaatgaaaaacaaataccctaggttagttaaagattagtgtgctgggtaaaatccactcagggtggtttctttgtctctattaatgtgttgatattgacctgattgtacatggttatgggcaacatgaatccgaggggaagcttctgagcttagtatgaattgcagcacagtttataaccaagtgattaaaaactcaatcacggaatgcctgacagcgctgtaaaatgtctaagtctttcctcaataatggactgtccgagagaagtcaggcatttcaaagatgggatcttcacccctgagagggagcagggtcctacatgggggtgaggtgagctccggcctagagcctgggccctgactgcaactgcgcaggccccgctgacctgaggactggaccccgcctccgtccctgactcgcctcaggtcaatttgtaaattacatgccatacccacccaggtcccacgatctagggcttcagagggagtggtgggaatgtggaaaggtgggagtggtgggaaggtgggagaggtgggaaggtgggagaggtgggaatgtgggaaggtgggaaggtgggagcggtgggaaggtgggaaggtaggagtggtgggaaggtgggaaggtgggagcagtgggaaggtgggaaggtgggagtggtgggaaggtgggaaggtgggagcggtgggaaggtgggaaggtgggaatgtgggaaggtgggaaggtgcgaatgtgggaaggtgggaaggtgggagcagtgggaaggtgggaaggtgggaaggtgggaaggtgggagtggtgggaaggtgggaagatgggagcactgggaaggtgggagtggtgggaaggtgggaaggtgggaaggtgggagcagtgggaaggtgggaaggtgggaaggtgggagtggtgggaaggtgggaaggtgggagtggtgggaaggtgggaagatgggaagatgggaaggtgggaaggtgggagcggtgggaaggtgggaaggtgggaaggtgggagtggtgggaaggtgggaagatgggaaggtgggaaggtgggagtggtgggaaggtgggagtggtgggaaggtgggagtggtgggaaggtgggagcggtgggaaggtgggaatgtgggaaggtgggaatttgggggaaggtgggaagttaggagcagtgggaaggtgggaaggccaggaggagcaaggcacagtctcaaggggactggctgtttgagcaagaggatagtgaattttctttaaagcagagcaaggagccataagaaagggtgtttggggatgaaaaaaaaaggatgaagagtcgagaggagccgtcagaacatatgggggatgtgttcaagaagcagatttgtggtcggaagctttgcaaagaggggacctgggtctgagtgacatgcgtggccactggtgctcctgcgtttggactgtgcaggcctctcctatgctgatgcgtctccccactcctgagctaatttctgctctgctccttctgtgacatgtggcagcgtgggaaatagccactgtcccctgtccctgctgttcctggtgtcacccagcaccaggccactctgggagccagggcagatggtcctccctgtggtcctggcctctgctgctggcccagtcctccgccttgtgtctcccagcaccaggccgctcc

SEQ ID NO: 12121 - DNA, 860 bp, Artificial sequence
  DNA replication origin
attttattatgattgtgctggtcagaaggtggctaggtggcttcctggggaccctgagtgaggatgtccgctgaccactcccatggccaggatccagagggagaagatggtggaaccctgggtttgcagtagtggctgcgggtgcaggaggctcggaggggcctggtggagccctggatttgcagtagtggccgcgggtgcaggaggctcggagggggcctggtggaaccctgggtttgcagtagtggccgcgggtgcaggaggctcggaggggcctggtggagccctggatttgcagtagtggccgcgggtgcaggaggctcggagggggcctggtggaaccctgggtttgcagtagtggccgcgggtgcaggaggctcggaggggcctggtggaaccctgggtttgcagtagtggccgcgggtgcaggaggctcggaggggcctggtggaaccctgggtttgcagtagtggccgcgggggcaggaggctcggagggggcctggtggaaccctgggtttgcagtagtggccacgagtgcaggaggtacggagggggcctgggccagggctgcgctcttgggacttgcagatggattggaccccagttccagggagggataagaatcagaggtgacgcagaggtcttgccttgtggagcctagtgatcaggacacttgctggtttgggggaggttgggatggggtggcctctgttcctggggagcggggaggagttttacatccgatgggcgtatttcagtggaagccagatggatgagtctaaagcctgggcaatccttcgttagacatgatgtttaaatccatgggcaggagacaggtgaggccactggaaagaggga

SEQ ID NO: 12122 - DNA, 963 bp, Artificial sequence
  DNA replication origin
tcctcggtttatggtatttagtaagtttatgattgacttaacaaatgaacaaagatattagttcattcatttctgtgtgaaaaccagagtttcttctcctctgatggcatgtggtgagcaccagtcagattctggtcagaccagcttggctactttccatctctctcagctaaacaccaacacccgggctcacagccaagagcgggcccatccgccaagagactcatgccctcagccagtgtccatcactggctctgtgctgcactctgctctgtgtgggggatgcagagcaaccgagagaggaaggttgggtgctggtcccaagattctcttctagaggagctcatgctggtgggcaagaagccggatgtgcgtggtaaatggtcagcaagctgacctcagagacagccagctgacctcagagacagccagctgacagatgctaaggaaaaagtgaaatgacccagaaagggactgggatgcagggtgggggttttggggccagtggtcagagaagacccttggaggagggtttgggcctggggtctgggtgactaaagacccagcctctgaggatgtgatgggagaaggacagagagctcaaggacggcatctgaggcacagaagggcagctgggagggaggggaagcttggaaggggcagggccagactatgggaggaagctgtgagagtcagctcttactaagtgcactggaaggtccctgggggatttttccagtggggtctccgtcacagatgtccctgtggttgctgtgtggggaggggctgttcggagggtgggtgcagggatggaggattgggatgcctggcactagtgagccactgacctctctctgctgttaggctgggatctgttctgagcactctgtgggatgtggcctcagctccctaggagagggccccaggcttgtccccattttattatgattgtgctggtcagaa

SEQ ID NO: 12123 - DNA, 3058 bp, Artificial sequence
  DNA replication origin
aaatgattactgtgcacaccctgttagcaagctcagtactacgtgggtccaaattatgagactggatttttgacatcaaggagtttgccatctacctggggatgtaacacataaacaaataaaatattaaatgaataggcaatttatcccaaagtagtataggtttttcctcccaaataaattgagtctttgtcacaggcatttaaaagagagaagaataatttctatctcggctgctgtagggaaactaccacttccctgtaaagaattagacccatacttacccatgttggcaatggaggaggaacaccaaatgggggaggatggcgaaacctggcccaccatgagtccctgtctcctggacatcctcacgcgtaaccagtgggtgaccactgtgcagacagacggaggtgttagtgtgtgtgtgtgaatgagtgcctgtgcggacagaggtgggcactgtgtgtgtgtgaatgagtgtgtggacagaggcaggcattgtgtgtgtgtgtgtgaatgaatggacagagggaggcgttggtgtgtgtgtgtgaatctgtgtgcggacagagggaggcattggtgtgtgtgtgaatgagtgtgtgtgtggacacagggaggcattggttgtgtgtgtggatgagtgtgtgtggacagaggggggcgttggtgtgtgtgtgaatgagtgtgcggacaggcaggcattgtgtgtgtgtgtgaatgagtgtgtggacagaggtgggcattgtgtgtgtgcgtgaatgtgtggacagtgggaggtggtgtgtgtgtgtgaactagtgtgcagagggaggcactggtgtgtgtttgaatgagtgtgtgtgcagacacaggagggtgttggtgtgtgtgtttgaatgagtgtgtgtggacagaggcgggcattgtgtgtgtgtgtgtaaatgagtgtgtggacagagggaggcattggtgtgtgtgtgaatgagtgtgtgtgtggacagaggcaggcggtgtgtgtgtggatgagtgtgtgtgtggacggagggaggtgttgtgtgtgtgtgagtgtctgtgcagaggcgggcattgtgtgtgtgtgtgtgaatgagtgtgtggacagaggcgggcgttgtgtgtatgaatgagtgtgtggacagagggaggcattggtgtgtgtgtgaatgagtgtatgtgtggacagagggaggcgttggtgtgtgtgtgtgaacagaggtgggcgttggtgtgtgtgtgtaaatgagtatgtgtggacagagggaggcattggtgtgtgtgtgaatgagtgtgtgtgtggacagaggcaggcggtgtgtgtggatgagtgtgtgtgtggacggagggaggtgttgtgtgtgtgtgagtgtctgtgcagaggcgggcattttgtgtgtgtgtgaatgagtgtgtggacagaggcgggcgttgtgtgtatgaatgagtgtgtggacagagggaggcattggtgtgtgtgtgtgaatgagtatgtggacagaggggggcattggtgtgtgtgtgaatgagtgtatgtgtggacagagggaggcgttggtgtgtgtgtgtgtgaacagaggtgggcgttggtgtgtgtgtgtaaatgagtatgtgtggacagagggaggcattggtgtgtgtctgtgtgtggatgagtgtgcagagatggggattggtgtgtgtgtgtgaatgagtgtcttgtggacagaggtgggcattgtgtgtgtgtgtaaataagtgtgtgtggacagaggcaggcagaggtgtgtgtgagagtgagtgtgtgggtgaacagaggcaggcattggggtgtgtgtgtgagaatgagtatctgtgtggacagaggtgggcgttggtgtgtgtgaatgagtgtgtgcgcggacagagggaccattggtgtgtgtgtgtgaatgagtgtgtgtgtggacagagggggccgttggtgtgtgtgtgaatgagtatctgtgtggacagaggtgggcattggtgtgtgtgtgtgtgaatgagtgtgtgtggacagagggagcattggtgtgtgtgtgtgaatgagtgtgtgtggacagagggggccgttggcgtgtgtgtgtgaatgagtgtgtgtgtggacagagggggccgttggtgtgtgtgtgtgtgtgtgaatgagtgtgtggacagaggtgggcattggtgtgtgtgtgtgtgtgtgaatgagtgtgtgtgtggacagggggccgttggtgtgtgtgtgtgtgaatgagtatctgtgtggacagaggtgggcattggtgtgtgtgtgtgagaatgagtgtgtgtggacagagggagcattggtgtgtgtgtgaatgagtgtgtgtgtggacagagggggccgttggcgtgtgtatgtgtgaatgattgcgtgtgtggacagagggggccgttggtgtgtgtgtgtgtgtgaatgagtatctgtgtggacagagggagcattggtgtgtgtgtgtgaatgagtgtcttgtggacagaggtgggcattgtgtgtgtgtaaataagtgtggacagaggcaggcagtggtgtgtgtgtgagagtgagtgtgcgggtgaacagaggcaggcattggtgtgtgtgtgtgaatgagtatctgtgtggacagaggtgggcgttggtgtgtgtgtgtgaatgagtgtgtgtgcggacagagggggcgttgtgtgtgtgtgtgaatgagtgtgtgtgcggacagagggggcgttgtgtgtgtgtgaatgagtatctgtgtggacagaggtgggcgttgtgtgtatgtgaatgagtgtgtgtgtggacagagggagcattgtgtgcgtgtgaatgagtgtgtgtgcggacagagggagcgttggtgtgtgtgactgagtgtgtgtgtggacagagggggccgttggcgtgtgtgtgtgaatgagtatctgtgtggacagaggtgggcattggggggtgtgtgtgtgaatgagtgtgtgtgcagacagagggagcgttggtgtgtgtgcgaatgagtgtgtgcggacagagggagcgttggtgtgtgggagagaatgagtgtgtgtcgtgtaagtgtatttgcgc

SEQ ID NO: 12124 - DNA, 1714 bp, Artificial sequence
  DNA replication origin
ttctaagtgcacacggctgggccatggcccccttcgtttgctcaaacaccagctggatattgctgtgaagatattttgtagatgtgattaacatctaaactagcagactttgaataaagtcagttaccgtttataatttgggtgaacctcatccaatcagttaaagagattaagagaaaaaaacggaggtcccttaaggaagaaggaattctggctccagactgcagcatagaaattctgcctgagtctccagactcaaggctacaccatccgctctcccctgggtctccggtgtgccagcctgccctgcggatgccacgcttgccagccccacaattgcatgagccaattccttacgatgaatctgtgtatgtgtgtccggttggtgctgcttgcctggagactgctggctgatgccctgataatgattatgtcggggatttggtggtggaggagctgttggacaggttggcaggaaggagaggaggccgtggccaggtgccgggttcctcagctcactgccgcgctcatgtgttcccgtagatcagggtgttcccaggagaggggaaggccgtgggcggctggggggtggctgggggtcagtagagcagcatgagccttcaggtcagggttggggtgcagttcatgtggacactgaggttacctaggaggtcagggtcagggtgctgtccatgtggacactgaagtcacataggaggtcagggtcagggtgcagtccatgtggacactgaggttacctaggaggtcagggtcggggtgcagtccatgtggacaatgaagttacctaggaggtcagggttggggtgctgtctgtggacaccgaggttacctcagaggtcagggttggggtgctgtctgtgtggacactgaagtcacataggaggtcagggtcggggtgctgtctgtgtggacactgaggttacctcagaggtcagggtcggggtgctgtctgtgtggacactgaggttacctcagaggtcagggtcggggtgctgtctgtgtggacactgaagtcacataggaggtcagggtcagggtgcagtccatgtggacactgaggttacctaggaggtcagggtcggggtgcagtccatgtggacaatgaagttacctaggaggtcagggttggggtgctgtctgtggacaccgaggttacctcagaggtcagggttggggtgctgtctgtgtggacactgaagtcacataggaggtcagggtcggggtgctgtctgtgtggacactgaggttacctcagaggtcagggtcggggtgctgtctgtgtggacactgaggttacctcagaggtcagggtcggggtgctgtctgtgtggacactgaagtcacataggaggtcagggtcagggtgcagtccatgtggacactgaggttacctaggaggtcagggtcggggtgcagtccatgtggacactgaggttacctaggacgtcagggtcggggtgcagtccatgtggacaatgaagttacctaggaggtcagggttggggtgctgtctgtggacaccaaggttacctcggaggtcagggttggggtgctgtctgtgtggacactgaggttacctcggaggtcagggttggggtgctgtctgtgtggacactgaagtcacataggagggtggcaggggccacagtggagaggaagatggagctagaaaccagggaatcagatgcaacgt

SEQ ID NO: 12125 - DNA, 1581 bp, Artificial sequence
  DNA replication origin
ccacagactcccaggcgcctccccacacgctgccaggcgcctccccacagactcccaggcgcctccccacacgctcccaggcgcctccccacacgctcccaggtacctccccatggtcccagctacctccccacagattcccaggcgcctccctgcacgttcccagacaccttcccaggcgctgccagcctcctcctgcgcacagatcgggaggtccctggacttccacttgttgagctggactcaagccggatcgcctggaggatattctcagggcacagcggctgcctgcgcctgagcagtgctgaggagatgccaaggtcaggcatcagctttcagagaatgcagctgcgtcagagatggagacacgcagagccacgtgtcgtggagaatctaaggaagttcgctggcgccagcagcgggaaaaggccctggcttgatgaggggaactcgcagccttgcagcgcgggtgggagccccgggcggaaccgcagaagcatccccggccgtggggttttctcctccagctggagacgtggagggagtggagcagagatgagctgtgagctcagcagttcacacaggacgggatgggggaggagaacccagggatgggagagattggagaacaaggagctgctgggtctcagcctcgtgtagacgacagggcctgtggggatggccacgcgtgaatctggtcctggcggggagcgtccggcgcgatgggagggacctgcagccagtgatcctcccgtggcatcgcttctagagttgagaggagaaagccagtagctgccggtctctggtgggtctcacagatgctggagcaggtgtaggaggaagcgcctccagcaggagtgacacccccatgccgcccaggaaggtgtcgcgcctgttaggagggaaaggactcaggatgtgcgttgcatggggttgtgagtgagtcagtggcagcccccccgcctcctcctcctgctttgacctgatgcaggatggactcagcaccccgccgaaggcactcccattcccctctgcatatggttttcatcatgtggaccttcaatagctatttttgattgatgggtattcagtgggattcaacatccgtaaacgttctgacccaagtcctgttgatcaatggcgtcaccgcacggcctttttgacccaagtctgcaccattctgtctttcctggagtcacccttcgagtgctctatgtgaccgtggcctcctgcggagtctgcccttggctcacggctggacagacattggctcttggcgtctctcatgttggtcacccctccagctgctctgcagcaacaatgcccctttccattcatagaaggtcgttatcgtgcttgcactcgggactgagttcacattgccttctacctgccagagaagctctgagctcctggaggaatgttccttttcttctgatgaaaaatgacgaggtgaacccctcgtgcctcggcgtaatgtggtcatcagaggtcgtgagaagagcacagaaatgcgtgtttctcataatcgcctggatgctaatcactgcgtcaaaacctcccgtgagccgctttctccac

SEQ ID NO: 12126 - DNA, 1159 bp, Artificial sequence
  DNA replication origin
aggcgcaggcagccgctgtgccctgagaatatcctccaggcgatccggcttgagtccagctcaacaagtggaagtccagggacctcccgatctgtgcgcaggaggaggctggcagcgcctgggaaggtgtctgggaacgtgcagggaggcgcctgggaatctgtggggaggtagctgggaccatggggaggtacctgggagcgtgtggggaggcgcctgggagcgtgtggggaggcgcctgggagtctgtggggaggcgcctggcagcgtgtggggaggcgcctgggagtctgtggggaggcgcctggcagcgtgtggggaggcgcctgggagtctgtggggaggcgcctggcagcgtgtggggaggcgcctgggagtctgtggggaggcgcctggcagcgtgtggggaggcgcctgggagtctgtggggaggcgcctgggagtctgtggggaggcgcctggcagcgtgtggggaggcgcctgggagtctgtggggaggcgcctgggagtctgtggggaggcgcctgggagcgtgtggggaggcgcctgggagtctgtggggaggcgcctgggagtctgtggggaggcgcctggcagcgtgtggggaggcgcctggcagcgtgtggggaggcgcctgggagcgtgtggggaggcgcctgggagtctgtggggaggcgcctgggagcgtgtggggaggcgcctgggagcgtgtggggaggcgcctgggagcgtggggggaggcgcctgggagtctgtggggaggcgcctggcagcgtgtggggaggcgcctggcagcgtgtggggaggcgcctggcagcgtgtggggaggcgcccggagtgcctggggaagtgtttaggagtatgtcgggaggtgcctggaagtgtttgtctggggtggtgatttgttgtgcattcttgcagagcccagcccaggcatggacacagccctttttctttgggctccatacttgaggattcctctcgaaagagctcagagtgaggggttcattttcataatatctgggacagtggatgtgtccatttccacagctcagccacactgctcctgaagacccagtccgtgctccctgcgcccctcagtttttccagaaactttgcttcctgctctcggcttaaagacacctcgtgcctccgcagg

SEQ ID NO: 12127 - DNA, 1113 bp, Artificial sequence
  DNA replication origin
gtgacacagccacagtccaccagcctgtgcttcctgcaggccatgctctgctccaggatctgggtgggccccagcagcgaggaaaattggaaactgtctttttactgggttccattggtgtcactgtgctgcacagtatctgctgaggcctcgccatgcccaagcacagcgctgagcataggacacagaggtgtgaggggccacaccttccacacccactcagcacctgcctgctgcctgctgcttgcctgctacatgctgggcctcctgacgagggcagggggccgacagaggaagtgcagccccacatcatccgtcccagacaagggtcgtggcagtgctgtggtggtgggggcagtggggggggggtggcggttgcataccatcctgaccttgttggatcagaggaataaacagatgaggaagaaatcagcaggtgaatggcaggaggtacagccgccgggaagagcccctgtggtctcaggcctgaggccctgaggctggaaagcaggtgttgggtcccaaaggccttggagcagagtccaggctttgcaggactgagcaggtggggaggggggaaaccgatcatcaccgctgcagcactctctgggagagcaagtggctacctgcgctctgaaagaagggagcaaagtaggtggatctgagaactattggaaggcagagtcaagtccctgggatttagagtgtgatgactgggctgagagacagggaggacccaggaagactgagaatctccctctgtccttaaacctgtgcactctggggacatctaaaaagtttctgactcagcgcctaggaccgtgggccccccatcttagaaactgaaaggaatgttcatctacctttaagcaaaggcttgtgtttttaagtgaaatcatctcagatccaggagagagggctgggaagacagtgtgcagaggacttgggtgaactcctgggtctctggtgtctttcccagtaatgtctgctgtgtctgcagagcaggagtttctgctgcttcttctgatcccaactccttgcgtccctcgagtcatttctattctgaatcccacctgtgcccttcaccccagggcctgtgtggagaaacaaggg

SEQ ID NO: 12128 - DNA, 1116 bp, Artificial sequence
  DNA replication origin
tggtgcatcaaaataatgatttgaaatttttattttaggaaaagacccttctaagttccagcccaggcatattaacatgtaaagtgcatgtgttggcctagagagcgggctgcgttattgaggagagtaggatgttagctcacacagggcagcccctcccaccagacaggaaactcaggctgcctgccttcaacagctcaggatcagtgttgggagcgataagaccaacctcccagtaggaggataaaacacatgttacagaaacacgtttgcagagaaacggaatcagtaggtgatggtgggtggatggatggatggatggatggatggatggatggagagagggagggatggatggatggagagagagagagggagggagggatggatggatggagagagagagagggagggagggatggatggatggagagagggagggagggagggatggatggagagagagggaaggagggatggatggatggatagagagggagagagatggatggatggatgggtggatggatggatgaaattttttatgtgaattggctcatgcagttgtggaggccgagaagtcccaagatctgctgtctgcaagctggagccccaggatagctggtggtggtgttcccgcctgagtccaaaggcctgagaatgggggaagaattggggggtactggtttaagtcccagcccaagggcaggagaacactagtgtcccagctcaaagaggcagatagacaaataccagggtgaagtcccctcctctgcctttctgtcctgttcaggcaggattcgatggattgcatgatgcccacccatgctccctgcttcctccctttcatctcatgcctttgagtgacttccctgatctgaatacgtgcctgcagagataagctattggccttctagctctcctttcctggatgtgtggctggcctggcccctccacagtggcttctgtggtgtcgggactgagggtgagagcactgggctgtgagaaagggttggggacagggcgccggcccccaccacacactcaccgagtcctggaagctggcaccctctccatgacttcaggctcatgaacgcacttcgtgaaagatctggc

SEQ ID NO: 12129 - DNA, 2388 bp, Artificial sequence
  DNA replication origin
tgacgatgctgtaaacaaacgtggcccatcaaggccggacacggtgctcttcttagaacacagctctgccgtaacatcagagcacgataacagagtgcatttaggccctgagtccctgagttagcaagactgctcaaaggcaaggagatacaaagcagctgagaaaccatgaggaggccttgagattccctaaaccttcaggagcccactcctcaaaggcaaatgtgacttttctgaagaaaatgcagacatatcccccgcctcctacctcacctcttgactttttatgtctcttaacatagcggccaaaatggctctgttacctggagtccctgaccgcagcgcacacgcttgtctccctggttggcactcacctctaccaagctcccgtcttcatgtgcccctggccactcccccactcccccactccccccccccgccccgcactgctgtgctccaggcagaaatcccaggccactctgtgtaaagacagcctccaaccctccaagctcttctgtgcccctggccactccccaactcccacccctcccagtggtactgctgtgctccaggcagaaatcccaggccactctgtgtaaacacatcttccaaccctctaagcccttccctgctctgcttgttctctggcttgaacaatggtgactgtgtcttattatctgttctttaaacccctgtgcctgggacagcactcagcaccctggaccctctcataaggcacttttggagggatggatggatggagagatggacagaaggggatggagggatgagagatggatgcgtgtgtgcatggatggtggggtggagggatggagagatgagagatgaataagtggatagatggtggggatggagggatggagggatgagagatggatgagtgggtgggtggatggaggggatggagcagtgcagagatgagagatggatgagttggtggatggatggtggggatggagggataagagatggatgagtgggagcatggatggaggggatggagggatggggagatgagcaatggatgaatgggtgcatggatggaggggatgaaggaatggagggatgagagatggatgagtaggtagatggagggggatggagggatggagagacggatggatgagtgggtggatagatgaggggaaagagggatggagagatgagaggtggatgagtgggtggatagatgaggggatggagggatgacggatgagtgggtggacagatggaggggatggagggatgcagagatgagggatggatgagtgggtgggtggatggaggggatggagggatgcagagatgagggatggatgagtgggtgggtagatggaggggatggggggatgcagagatgagggatggatgagtaggtgcatggatggtgggagatggagggatggagagatgagagatggataagtagagggatggatggagggatggagaggggcggagttgagagatggatgagtgagtggatggatggaggggaaggagggatgcagagatgagagatggatgagtagatggaggtgatggagggatggggagatgagggatggatgtgtgggtggatggatggagggggaatagagggatggagggatgagagatgaatgcatgggtgcatggatggtgggggatggagggatgcggaggtgagggatggctgcatgggtggctggatgaaggggatggagggatggagagatgagatatggatgagtggctcaattgatgggggggatggatggagagagatgagagatggatgtgtgagggatggatggcgagagatgagagatggatgtgtgcgtggatggatggaggggatggaggaatggagggaggggtggagggatgagtgaatggatgggtgatggttggatggatgaattctgctccaatggcatctgcagctttgtatggattccccagttctgccatattaaggcatgtcatcagtgtcaggctttgtgtgggagccccgggggatgaggggttgatagacattggtggccctgagtgccaacctggggctttggacttaaaggaaaagccaagcatcagggtcctattccaggattttaaaggagtcacaggacaatgtgtagcagggcgacatctctgaggtagcatgagagacacaggaggggaggaggtgacttaagggctggaggacaggtgggaggggcccgaaagcatttatgcagacgtctatatctatgtatataatttttttcactgtaaaatataaatctcttaagaaacttagacctcttaatatttgagagtgatattagagttttctttccacagtgtaactatgttttcaccaaagaccaacatcaagagtgaggg

SEQ ID NO: 12130 - DNA, 730 bp, Artificial sequence
  DNA replication origin
cccagtttctgccagctccagaaatgtaggaatagtcacctccacccccaccccctcccccaagacccccatctcatccccccacccctcctaactccatggatgccaccagccgcactctttctgcccaggagcccaggcgacttctgaaaagcaggctggattccgtccctctcctccactgcagcagggcctcctcggcggcctcccgggcactgctcctctcggtgcctcctttctagccctgaacgctcagacctctgtggggctgtgggatgcatctgtgtcttcacacacgcccttcccttcagccgcccatccctgcccctccccagctcagccaggcgcagcttctccttgaaaactcagcctttccttcccccaaatggtcacagctctaattacacatttcctttctgatctggtgctggacatgtggcttctccaggaggctgagctgcaggtctcagtccgagtcacatcccagcctcagagcggagcctggcatgtgtgacgctcagggcctggtgtgtgtgtggtgtgtgcgctggtgtgtgtgtggcctggggccttgtatgtgtgaggatgtggtgcacagcctgcaaagtgtgtggtggggcctggactgtgtgtggtgggctctgggctgtgtgtggtgggctctgggcagtgactccgtgtgtatgtgctacctccctccccatcatgttcttcctggtcttcgctcaac

SEQ ID NO: 12131 - DNA, 1018 bp, Artificial sequence
  DNA replication origin
tgagacctgcagctcagcctcctggagaagccacatgtccagcaccagatcagaaaggaaatgtgtaattagagctgtgaccatttgggggaaggaaaggctgagttttcaaggagaagctgcgcctggctgagctggggaggggcagggatgggcggctgaagggaagggcgtgtgtgaagacacagatgcatcccacagccccacagaggtctgagcgttcagggctagaaaggaggcaccgagaggagcagtgcccgggaggccgccgaggaggccctgctgcagtggaggagagggacggaatccagcctgcttttcagaagtcgcctgggctcctgggcagaaagagtgcggctggtggcatccatggagttaggaggggtggggggatgagatgggggtcttgggggagggggtgggggtggaggtgactattcctacatttctggagctggcagaaactggggaagggagccagggttggagaggagtgcgcctcggccgggtttacgctgtgcgagcctggggctctgggaggctctctaaggatggtggagaatccaggggcttcccaagggtgttcctgcaggtgttccacgctgctggggcccgggcggcctggagtgccaggcgagggcctggcagatgtaggcaaggagtggctccagggctgagtgcccgagggtccgggaagggccctcgtccttcggatccagcagcacagaggtgctcacgtgctcaatgctgagttgtgactgaagcatctcatcctcagattcacacggcaaggccttctccacaaacacttacactaccccacataccagtcaaaggaaaacattacagttacatggcgttgaaatcaaagatcttacccttgtaatacaaagcagcttccacttccaggtttgccaggttaaatacgaataagcccactgagcttccgatccacacacatcgggtgttctcagaagaaagactgatttaaggaaaaaaagaaaagaatacacaataa

SEQ ID NO: 12132 - DNA, 796 bp, Artificial sequence
  DNA replication origin
cccctcgcgcccacgcccctttcgctatctcgcgacagctggagaagcctcgcttccggccggctcacttacggacctagcgtcacttccgcctccggcgaggctccggcctcgggtccggatgtataaagcgcggccccctgcggggagtggtggtgagtccgagggtgccacagcggccctgcccctgcccctgcccctgccctgagtgggcgccgcgctacgggggaggggttaacccacccctcctccccggggcctcacgcgggtgggaagggacagtcccagcgacagaccaggcgcctggacgcgccgtggacccgcgtgcggacggcggggacaggctccggtgctgagcgcctccggtgtccccagcagcactgacccacttgcaggccccggagctgagccgccagccatggccgctccccgcgggagggccgcgccctggacgacggccctgctgctgctcctagcctcgcaggtcctgtctccgggaagctgcgcggacgaggaggaggtccccgaggagtgggtgctcctgcacgtcgtccagggccagataggcgccgggaactacagctacctgcggctgaaccacgagggcaagatagtcctcaggatgcgcagcctcaagggagatgcggatctgtacgtctccgccagcagcctgcaccccagcttcgacgactacgagctgcaatcggccacctgcggcccggacgccgtgtccatccccgcgcacttccggcgcccagtgggcatcggcgtctatggacacccctcccacctggag

SEQ ID NO: 12133 - DNA, 1348 bp, Artificial sequence
  DNA replication origin
gacggcggcggcggcggcgcggggcgctcgggctgatggcggcggcggccgggcccggggctgcgctgtccccgcggccgtgcgacagcgacccagccacccccggagcgcagtccccgaaggtgaggaagcggccggtgcgacccgaccctgaccccgtcccgggcctgggtgccggggcgtgggcccagtcccaccggcggccgcccagcgtctcgggggcgtgggcccaggccgggcgccgcgcctgagaccgggggtggtcggcgaggcggggccccgaggtgagcccgcggcctctagcgagcaacaagtgcgggcgggcgggggacgcggcgcggcttccccgaagttggcagccggccctgcttgacaagcttgtccccaaaacgcctcctcctaggccagccgtgggacggaacgcgcccggggccgagagagttggcctcggaggggcctgcagaagcgcgcgttcgctcagcgttcattccgcgcatagtttgccgaagtgtttgaacgcttactgcaaaaaccgagtggcgaacgatatggaaaatcaacacactcagtgaacttactgtaataactaagttaatacgcaagcgtccggatgttttcagcggaagtctgttaaaactttttactgcttgaggaggtgaaaagaaattggtgcttgtggagaaaatggagatgagcagtagtgtcacgcatcaaaacgttttggttctaaagttaggctagcagtttgtgacagaaagttggaagggaggaatgatgttttaaaagcctggaagcttgaaattggattgaaattagaaggcggtgggaactggaatgctgcagagccagccagccttcgtgcggtgcgcggtgtgccgtgtgcgcgttggcaggggaagccgtcctgtagcagcctagccgggctgcgcctgcttgggagcttttcccgttgcgcacgtccaccgtgctgtgagactcattttgaaggttcctcaaaggctgtcgtcaatggaagtaactagattgtaagactctgaatgcacatccttgcacttccagcatttgacgtctggcccggcacctggagggcactgagccagtgccccctgagtgcattcttgacccctgagccctaggaaggatgtgatgcatagaaattcatctgatctgtagttggaaaccacctgtaactctggaaggcacatctctgatttagtatgtttgggagtctttgaaaacatgggcctctgtatcagtattgcggttacacggaaattcttaccttattccgtcatgtattgggaacaatattgctgttactacctccctcaagaaaaaggcccgctgc

SEQ ID NO: 12134 - DNA, 1080 bp, Artificial sequence
  DNA replication origin
gcggccgcctcagccccgccgccgcctggctccccacggcccggcgttgtactcggccgcggctccccccagcccccggcgcgccccacctcccgcccgccctccggcccgccccggcccggcacgtcgccacttggcgcgctcgcagccgccccctccccgcggcccccggcccggcccctccgcgcgtcaccctcgttccctccctctctccgcgcccccgccgcgcccctccccgcccctcccgggggtccccgccccgccccctctctgccgggggtcgccctgcccggagcagtcgcgcggagactgcgcggcctccgcctctacgcgctcgcggtcgccgctcctctcccgcctttgttctcgggtcgcccctctcgctggtggcgctccgagagagcagcggagccacctgcccaggccacgcttccccgagcatccgcagctgcacccgggggctgtcggcgcccgccccggagcgtgcgggaggcacagcgggaagaagtcgctgagattcggccctcgtggctttgcgtgcccgcgtggttgatgcctccgccgagaacgcggtcggccgggagccggggaggagcgtggacgccggcctggcaggtacccccgcgagaacgtgggagccggtgtatttcagctgcatttattactgatctcgggctgcaccagggcacttgtaggaccgcactaaaaacagcggaaagtgaggagccaagcctgggtccggggcggcccgccgtacagctggcctcacggattccactgcctgcgcctgcagatgacttgttctggagagtagagaatgttctcggatttaaagtacaatccggtttcctttccattcattatagttgcctacactcaacaaacaaaagttgggaaagataaagggattattctagcgcgtcacattgacaaacaccgacgttaacacgctcagtccagcctgactcacttgcctcaggtcagagaggtcaccactgacgacgccgggccctcaagccgatcctaatccagcttggttctctcagcctcagccagaccatccgttcttgcctctgtccc

SEQ ID NO: 12135 - DNA, 2162 bp, Artificial sequence
  DNA replication origin
atgtgaagaactctgtggtgtgaagagctctgtggtgtggagagctagactctgtatgtggagagctctgtgatgtggagagctctgtggtgtggagatccctgggcatgtggagagctctgtggtggagatctctgtgactgtggagagctctgttgtgtggagagctctgtgtctgtggtgagttctgtgtatgtggagagctctgtggtgtggagagctctgtggtgtggggagctctgtgtctgtggagtgctctgtgttgtggagagctttgttggggagagctctgtggtttggagagctctgtggtgtgaagtgttctgcatatgtgaagagctctgtaatgtggagagctccacgtatgtcaagagttctgtgtctatggagaactgtggtttggagatctctgtggcatgaacagctctgtagagctctgttgtgtggacatctctgtggagagctctatctgtggaaagctctgcatatgtgaagagctctgtggtgtggagagttctgtgtgtgcagagccttctgtgtctatggagaattctgtggtctggagatctctgtggtgtgaacagctgtgtgtatgtggagtgctctgctgtgcggacatctctgtggagagctctatgtctgtggagagctctgtgatatggaagtctctgtggtgtggagagctctgtgtctctggagagctctgtggagtgtagagcgctctgtctgtggagaattctttagtgtgtagagctctgtggtgtggagagccctgtgtctatggagcactctgtggcaagtagagttctgtggtgtgaagaactttgtgtacactgagagctgtgtggtgtgaagagctctgttgtgtggagagcgagttctgtgtctatggagaattctgtggtgtggagagctctgcgtatgtgaagagctctgtgtatgtgaagagctctgtggtatgaagagctctgtgtctgtggagattgctgtggtgtggagagttctgtgtcagtaaagagctctgtggtgtggagacctctgtgtatgtggagagctctgtggtgtgaagagatctgtggagtggacacccctgtgtctgtggagagccctatggtgaggagagcgctgtggtgtgaagagctctgtggtgtggagagttctgtggtgtggaaagctctgtgtatttggagaattctgtggtctggagagctctgtattgtagcgagctctgtgtctgtggagagctaagtggtgtacagagcgctgtgatgtggacagctctgggtatgtggggagttccgtgatgtggggagttctgtggtctggagagctcggtgtatgttgagaggtctgtgctgtgaagagctctgaggcatgaagaacttcctacgtggagagctctgtggtgtgaagaactctgtgatgtgatgtggggagctctcttaatgtggggaactctgtggtgtgaagagctctgtggtgtgaagagctccatgtatgtgaagaggtttgtgtctgtagagagacgtgtgtctgtagagagagctgtgtgtctgcggagagctctgtggtgtgaagaactgtgtgtctttggagagctttgtggtgtggagaactgtgtggtgtggagatctgtgtctgtaaatagatctgtgtcagtgaagacctctgtgttgaggagatctcagtgtctgtggagagccctgtggtgtggagagccctgtgtctgtggagagctctgtgtctgtggagagctctgtggtatgaggaactctgtggtgtgaagagctctgtggtgtggagaggtctatggtgtggagacctctgtgtctgtggagagtctcgtgtctgtggaaagttctgtgtctgtgaagagctcagtgatgtggagactctatgtctgtgaagagttctttctgtggagagctcagtggtatggagagccctgtgtctgtggagagctgtatgtctgtgaagagctctgcggtgtggagagttctgtagtgtggataactatgtggtgtggggatctctgtgtctgtggagagctctgtggtgtggtgatctctgtgtctgtggagtgttccacggtgtgaagagttctgtgttgtagagagctctatggtgtgaagagctctgtggtgtgaagaactctctatctg

SEQ ID NO: 12136 - DNA, 2564 bp, Artificial sequence
  DNA replication origin
cttgaacttcaattgtattatttcaagattcaactagggcataaaatactgaagtttatttctggaaacataagtagttacatttacattatgtgtagcatgctgtctttccaaacgtcacccaactccacacaccgaactcagagcagagtctcctcggagagtgggggcattggcttgaggaaaaggatggaagcgtttcaatgtatatgtgatagatagaaaaaagagataacactcagaatagttaacaacctttgctccaacaacacaggctccacaaccctccccaggccagggtgaacagccttgtgtatttcagaaaataaagaagtgtggaaaaatactgtgtttgggatttaggtggtgagtacctagaggttctatgttgttctctgtactattctgtgagttctaaccaagaataaataaataacaaattactgttatgtattgacagcaggggctgtcactgctggggtctcagtgccaggggtgtcagtgctgcggacgtcaatgttggggtgtcagtgctggggacgtcagtgttggggtgttagtgctgggggtctcagtgttggggatgccagtgccggaggtatgagtgctgggggactcagtgttgggggtgtcagtgctgggagtgtcagtgcagggctgtcagtgctggaggtatgagtgctgggggtctcagtgttgggggtctcagtgttgggggtgtcagtgctggaggtatgagtgctgggggtctcagtgttgggggtatcagtgctgggagtgtcagtgcagggctgtcagtgctggaggtatgagtgctgggagtctcagtgttgggggtctcagtgttgggggtgtcagtgctggaggtatgagtgctgggggtctcagtgttgggggtgtcagtgctgggggtctcagtgttggggctgtcagtgctggaagtatgaatgctgggggtgtcagtgctgggggtgtcagtgctgggggtctcagtgttgggggtgtcagtgctggaggtataagtgctgggggtctcactgttggggctgtcagtgctggaggtatgagtgctgggggtgtcagtgctgggggtctcagtgttaggggtgtcagtgctgggggtgtcagtgttgggggtctcagtgctgggggtctcagtgttggggctgtcagtgctggaggtatgagtgctggcggtctcagtggtgggggtgtcagtgctgggagtgtcagtgcccggctgttagtgctggaggtatgagtgctgggggtctcagtggtgggggtgtcagtgctggaggtatgagtgctggggttctcagtgttgagggtgtcagtgctggaggtatgagtgctgggggtctcagtgttgagggtgtcagtgctgggagtgtcagtgcagggctgtcagtgctggaggtatgagtgctgggggtctcagtgttggggtgttcgtgctgggagtgtcagtgcagggctgttagtgctggggacattagtgctggcagtgtcagtgttggggtgttagttgtatgggtgtcatacccatacctgggggcatcagtgctgggggcatcagtggtggggggattagtgctgagggagcaattctggtggggggtcagtgctggagtgtcagtgatgggggctcagtacctgggttgtcagtacctgggaggtcagtgctggggaagtcagtgcttggacgtcggtgctggggggatcagtgctgagggagctgtgctggggggtcagtgctggggatgtcagtgctggggggatgagtgctgagggagcagtgctggggggtcagtgctggggtgtcagtgctggggggatcagtgctgagggagcagtgctggggggtcagtgctgggggtgtcagtgctggggtgtcagtgttgggggtgtcagtgccgggggtgccagtgccgggggtgtcagtgccgagggtgtcagtgctgggggagtcagtgctgggggtgtcagtgctgtggaggtcagtgcaggagatgtacctgctggggaggtcggtcgtatgggtgtcagtgctgtggtatcaggggaggggtgctcattgcaggcagtggtcagtgcaaaaagggtcagtgcagggggtcagtgctagaggggtcagtgctgggaaggtcagtgctgcaaatgtcattgatgagggggtcagtgtagagggcatcagtgccgctgaagtcacagctgccagtgtgagtgcagaaaatttaagtgttgggggtctatgctaaggggagtcagacctaggggtaagtacatgggtgtctgtggtgtggaaagctctgtgtctgtggagagctctgtatgtggagacctctgtggcgtggaaagttgtgtatgtggagagctctgtgtctgtggagagctctgtggtgtggacagctctgtggccttgagagctctgtgtctgtggagagctctgtggtataaagagttctgtggtgtgaaaaaccgtgttgtggagagctctgtggtctggaagctctgtgtctgtggagagctctgtgtctgtggagagctctgtgtctgtggaa

SEQ ID NO: 12137 - DNA, 993 bp, Artificial sequence
  DNA replication origin
ggggcgacacagggagggtgctcaccctggtgggggcgacacagggagggtgctcaccctggtgggggcgacacagggagggtgctcaccctggtgggggcgacacagggagggtgctcaccctggtgggggcgacacagggagggtgctcaccctggtgggggcgacacagggagggtgctcaccctggtgggggcgacacagggagggtgctcaccctgatgggggtgagggtggggcttaggggaaggcacctctgagctgtctttgggttgaaattgaaattaaaggagggaggaaatgggggaataaaaagtgcaaaggccctggggccacctgagcgccccttggagaattgtggccaggccctagccaaggagccctgagcccaggtgaggtctcagacttcagggtggcaaggagacctgggggctacccctgcagaccacacatgcctggaaaagcttttggagtttatttctggggcaaagtgaagccagtgaagggcccgggtagaggaacaaacccctgactgtgttttaaaggctcacagccaaagaccacagggacagaccagcctggtggtccaggcagggccgaggtggcttgggctggaacagctgcgtgggggaaaggatggcacagagggtacttggaggtgggggatgaggagaaccaagggacagaggatgactccgtgttcgggcctgaaacattgggtagactgacagtgaggccatttgcttggcaaaacaagggggcagtggggtacggacaggagggcgttggctgctttcagctgagtgtcttgtcatgtcccatgcaggtgcaggaagcacaggggaggggccagggccaagcaagggctggtgagtgagcctcagctgcagggctggacagagtcatctgggggagaggtggggcaggaggatgcctggaagccaagaggagacactgttccagaggtgaatgctccatcaccactgaggccag

SEQ ID NO: 12138 - DNA, 1691 bp, Artificial sequence
  DNA replication origin
tgccaaaggaggactgcagtaaattctgatctgggttccgggcaggcctggggcctgcaaggcccagccgtcctctctggaactccctgggtccctggagaatgtggcctttctccttcctctcaagccacctgggtgttttctttgtcatgagaggaatcatcgtcctggggaccaggtcttcccagcgaggaaggtcgttgctaagttctgattttgcttcttcagtttcttcattggccacagaaagggaactagttccaatagtgtgctctccgcgtgaaggtcaccagtggtcagcaaagaggggtgggggtggggacacagcatcctcgccggcgtgtgacacgtgcctggccactctctgctattcagcatttattttgctaataaaatattattatctgataataaaaagatgattattatttgcagatgtcatcatgattgttctggaaaaccctggagaatcaatggagaaactaacaattggagaatacaggagaggagtgccatattctttagtaaacaggattggcaggtgaagatcagcaggacagctgcagtgccaggccctgagacggccattgtcctgggacaccagagggcctgcaaaaagagtgaagtggctgcggcatggagtgggtgtagtgtggagtgggcgtggtgtgttgtgggcatggtgtggtgtgggcgtggcatgggcgcggcatggagtgggtgtgttgtgagcatggtgtgggtgtggtatggcatgggtgggcatagtgtggagtgggcatgatgtggagtgggcgtggtgtgggtgtagtgtggagtgggttctggtgtggagtgggtgtgggtgggcatggcgtggagtgggcgtgttgtgggtgtggtgtgtgggcgtggtgtggtctggagtgggcgtgggtgggtgtggtgtggagtgggcatggtgtggagtgggcatggtgtggagtgggcgtggtgtgggtgtagcgtggagtgggttctggtgtggagtgggagtggtgtggagtgggtgtgggtgggcgtggtgtggagtgggcgtgggtgggcgtgttgtgggcgtggtgtgtgggcgtggtgtggtctggagtgggcgtgggtgggcgtggtgtggagtgggcgtgctgtggagtgggcatggcatgggcggggtgtggtgtgggcgtggtgagtgggtgtggtgtggtgtggactgggtgtgggtgggcgtggagtgggcatgctgtagtgtgggcatgatgtgggcatggcgtggagtgggcatgatgtgggcatggggtggagtgggcatgctgtagtgtgggcatgatgtgggcatggcgtggagtgggcatggcgaggccctgggagagaagggcagccagcagcacagaggctcggcagccaggcgaagagggcagctttactcaggaccaacggggacttactgatggtttggggcaggagagtagcgtgagttgatctgcgtatttcaaagatccttgtggctagtgcacccgtgtcacttgtggctaagtctgtgtcacttgccacagcaaccattggcagctggcacgggcatctggcgctcctgggagggttttcagtgtggtcctctgcacacctgctctggggtcccttgggtgctgatgagaagcgcagcttcctggacctcactgtgcaagggccaagggacc

SEQ ID NO: 12139 - DNA, 1162 bp, Artificial sequence
  DNA replication origin
tctgagtcctgccgcacaactcgccggagccttgtcattgaccactgtccacacagtgtgcccaacactgacatccttcctcaacaggtacttcccatgccccgtgtttgattcatcacccatctgcaggtgaggccaacgcgacctgcaaagggatgacctgcccgtggccatgggcctgggttgctgggatccaattcctgtttggcccctcctatcccaggggctcctctgtaccagcccccaaccctcgccactgacagaagctcagtctggctgtggtgagcggcctcaggcatgtcccccacaggttctctctgtggacctgtctctcccggctgcagggggaaggagcaccagggagggggcgtgaggggtgggggttgctggtgagacatggactctgtgggttccttgagaagctgtgagcaccaggatgccatgtgcactggacacagcccagcctcggctgcctgtgcatgtgtttgtgcaggtgtgcaggagtgcaagtgtgagtgtgcttgaaaatgtgcgtgtgcagatgtgccttgtgtgtgtcaatgcttgagtgtgtgcacatacatgtgtgagcgtgtgcatgtatatgcctgtgtgtgtgcctgtgtgtgggtgtgagtgtatgtgtgcatgtatgtccatatgtgtttgtgtgtggtgtgtgtgcttgtgtgtgtgcatgtgtgtttatatgtgtggtgtatgtgtgcatgtgtgtggtgtgtgggtgagagtgtatgtgcatctgtgtttatatgtgtggtgagtgtatgtatgtttgtgtgtggtgagtgtgagtgtgtgagtgcatgtgtttttgtgtgtggtgagtgtgagcatctgtgtacatacgtgtttgtgtgtggtgagtgtgagcatctgtgtgcatatgtgtttgtgtgtggtgagtgtgagcatgtgtgtgcatatgtgtttgtgtgtgcgtgtgtgtgcatatgtgtttgtgtggtgagtgtgagcatgtgtgtgcatacgtgtttgtgtgtggtgagtgtgagcatgtgtgtgcgtatgtgtttgtgtggtgagtgtgagcatgtgtgtgcatgtgtgtttgtgtgtggtgagtgtgagcgtgtgtgtgggtgtgagtgtgtgtgcatgtgtgttactggtgccaagg

SEQ ID NO: 12140 - DNA, 3199 bp, Artificial sequence
  DNA replication origin
ctgacctcagggaagatcacgttttttgactctcctgtcctgacaccttcctaaagccttgctcaacttgcagatggaccctggggacttgatgctcagtttgcggatggaaccccctccccgtctgggggtttggcgaaaacgcagactcttgggtcctgcccttccttcaggctcccagggtggccaggcagggtcctgggacaatcttgacccaaacaacctctaagacctctgaagaattacggttgcagcccctccccgcttccctgggcctcgggtggtgaaatcctacagatcaaaggaccagggcctgggcgcccctcctgggcaccgcctggggtcggagtgccctccccagggaccctggtggcccagacgctgccccgctgtgcatctgcctctgtcccggctccctgatcacaggcgccttagggctcgcccatcacccggtgaggatacacaagacctgctgcaacgtggctgcggaagcaagggggctaagggtgatgatgatgatggggtgacagtgatgttggggtgatgatgatgatggggtgacagtgatgttggggtgatgatgatgatggggtgacagtgatgttggggtgatgatgatgatggggtgacagtgatgttggggtgatgatgatgatcgggtgatgatgatgatggggtgacagtgatgttggggtgatgatgatgatggaggtgacagtgatgttggggtgatgatgatggggtgacagtgatgttggggtgatgatgatgatggggtgacagtgatgttggtgtgatgatgatgatggggtgacagtgatgttggtgtgatgatgatgatggggtgacagtgatgttggtgtgatgatgatgatggggtgacagtgatgttggggtgatgatgatgatggggtgacagtgatgttggtgtgatgatgatgatggggtgacagtgatgttggggtgatgatgatgatggggtgacagtgatgttggggtgatgatgatgatggggtgacagtgatgttggggtgatgatgatgatggggtgacagtgatgttggggtgatgatgatgatggggtgacagtgatgttggggtgatgatgatgatggaggtgacagtgatgttggggtgatgatgatgatggggtgacagtgatgttggggtgatgatggtgatggggtgacagtgatgttggggtgatgatggtgatggggtgacagtgatgttggggtgatgatgatgatggggtgacagtgatgttggtgtgatgatgatgatggggtgacagtgatgttggtgtgatgatgatgatggggtgacagtgatgttggtgtgatgatgatgatggggtgacagtgatgttggtgtgatgatgatgatggggtgacagtgatgctggtgtgatgatgatgatggggtgacagtgatgctggtgtgatgatgatgatggggtgacagtgatgctggtgtgatgatgatgatggggtgacagtgatgctggggtgatgatgatgatggaggtgacagtgatgttggggtgatgatgatgatggaggtgacagtgatgttggggtgatgatgatgatggggtgacagtgatgttggggtgatgatgatgatcgggtgacgatgatgatggggtgacagtgatgttggggtgatgatgatggaggtgacagtgatgttggggtgacgatgatgatggggtgacggtgatgttggggtgacgatgatgatggggtgacggtgatgttggggtgacgatgatgttggggtgacggtgatgatggggtgacagtgatgttggggtgatggtgatgatggggtgacagtgatgttggggtgatgatgatgatggggtgacagtgatgttggggtgataatgatgatcgggcgatgatgatgatggggtgactgatgttggggtgatgatgagggtgacagtgatgttggggtgatgatgatgatggggtgacagtgatgttggggtgatgatgatgatggggtgacagtgatgttggtgtgatgatgatggggtgacagtgatgttggggtgatgatgatgatggggtgacagtgatgttggggtgatgatgatgatggggtgacagtgatgttggtgtgatgatgatgatggggtgacagtgatgttggggtgatgatgatgatggaggtgacagtgatgttggggtgatgatgatgatcgggtgatgatgatgatggggtgactgatgttggggtgatgatggggtgacagtgatgttggggtgatgatgatgatggggtgacagtgatgttggggtgatgatgatgatggaggtgacagtgatgttggggtgatgatgatgatcgggtgatgatgatgatggggtgactgatgttggggtgatgatggggtgacagtgatgttggggtgatgatgatggggagacagtgatattggggtgatgatgggggcaacagtgatgttgggggtgatgacgatgatggggcaatgatggaggtgatgaagatgggggtgacagtgatattggggtgatgatggggtgacagtgatgttggggtgatgatgatgatggggtgacagtgatgttggggtgatgatggggagacagtgatgttggggtgatgatgatgatgtgacagtgatgatgtgggcaatgatgatgggggtgatgatgatgggggtgacagtgatgaaggcgatggtgggtgatgatggggaatggtggtaataatgggagtgatgatgataatggcagtaatgatgggggtgatggggaggtgagggtgtagggcctcccaccaacaggggaaggaacatctggtctgaggttcacatattgcaggggctgtattaagtgttgcttcaacacaatgaggtaaatgcccaggtcccaaggcaccaagaccgggtcctctgggccttccccagtcgccctgaggccacttgctgccatccatccaaacagtaggcctggcttgcctgcttcccagggttcctcatctcccaggcaagaggggtggcacggattctataaataaataaatagcgtaaaattcaacccagtaggaggcctgcaaagccctcagggtgtggcccttgctgcccatccccttctacagctacactggccttttcttcggccgggacaccacaaacgcactcccaccccagggcctttgtgccgct

SEQ ID NO: 12141 - DNA, 1538 bp, Artificial sequence
  DNA replication origin
caaacatatcactatattctttctgcccacttgttctttacggctagtgacactgcatcgcatccctcaaaccctactcttctcaatacaattcattgcttcagctccatctgctcccatcagctgtgtcaaatgaacagggtatgagatcaaatgagaagcatgggttgaggataattcccaggttcctacctggagatggggtacctggtggttattgccactgattgacagaatgaaatcagaatgagagcaaatttagagtgaaaggtggttagttcatttttgcagcggtggccattgaggtgggaagtgtcaagcatgggtaaagcaaaggggtggatgtgaaggacgtgaagatgaaaggaatgaaaaggctcagaagcagaacccatcctcactgggcctcagtgataatgagtggttccaggagactgggccagtcagcagtgagaagcaaatggtcaacagtgaggatggggtggtcagcagtgaagatgggaggtcaatagtgagaaagagatgttcagcagtgaggacgacaaggccaacagggaggatggggaatcaacagtgaggatgaggaggtcaacagagaggataggaggtcaatagtgaggatggggaggtcaacagtgaggatggggaagtccaacagtgaggatggggaggtcaacggtgaggatgagaggtccagtgagaatggtgaggttaaaagggaggatggggagtcaacagtgaggatggggaggacaacagtgagaatggtgaggtcgacggtgaggaggtgaggatagtgaggtcaacagggaggacaggttggccaacagtgagaatgtggaggtcaacagtgaggatgatgaagccaacagggaggatggggagtcaacagtgaggatggggaggttaacagtgtggatggggaggtcaacagtgagaatggggagtcaacagtgaggatggggaggtcaacagtgaggatgatgaagccaacagggaggatgaggagtcaacagtgaggatggggagtcaacagtgaggatggggaggtcaacaatgaggatgatgaagccaacagggaggatgaggagtcaacagtgaggatggggaggtcaacagtgaggatggggaggtcaacagtgaggatgggaatgtcaacagggaggacagggtggtcaacagtgagaagatggaggtcaacagtgaggatgatgaagcccacagggagggtggggagtcaacagtgagggtgggaggtcaacagtgaggatgtggaggtcaacagtgaggatggagttgtcaactgtggctaatatagcagacaagcaaaaaaagctaaggacttaaaagtctgtatcaattctttgaatatggagttactttttccagcatgttttggtgaaatgggggttggaggattgttctggaggtgaagtctagactaatatgggtgagaaatcacggctgatagggaagcagtaacacatggaagccacctcctttccaggtctgtggccccctctgtcctggtcctcatt

SEQ ID NO: 12142 - DNA, 1237 bp, Artificial sequence
  DNA replication origin
atttccaaaagtgccggcgctgcctccttgggatcagaggccttctgcgcttgagcctggcacctgccctgggccccagtggacgggtccttcctcttggaccactggccccatgcattgtccatcctcaacaccttccctgtggtgcccagaggcagcgtccaggagcacacccaggtgcccagcgggaccccggagctccctttgaacaggcaccttctggggctggggtccccatgtctgggggggaatagggggctggggcccgtgtctagggagttatgggaccttgcatctgagggggtgtggtggggggctggggcctgcatctgagggcgtgtggtggggggctggggcctgcatctgagggggttctggtggggggctggggcctgcatctgagggggtgtggtggggggctgggccctgcatctgagggggtgtggtggggggctgggccctgcatctgagggggtgtggtggggggctggggcctgcatctgagagggttctggtgggggactgggccctgcatctgagggggtgtggtgggtggctgggccctgcatttgagggggtgtggtggggggctgcagccctgcatctgagggggtgtggtggggggctgggccctgtatctgagagggttgtggtggggggctagaccctgcatctgagagggttatggttgggggctggggtctgcatctgagggccatgggacctgggtttgtggctgctggttcgcctctgggctctgctgcttctcacagtagtcgctgagccatcgcgggtcctgatgtctcacgggagaagcaggcctgggcaggtggcacctttgggagaaagcgaagggcagcctgggctggaggctgcacccaggcactgtggtcagtggctggggaatgagacacggccctcctgggccccgtgtcccttgtggtggggtctgagtgcctacttctctcaccatggccctcggggtcccgtgcctctgcggcctgagcctgcggtgggtcctggcgcagcacctggacacgggcctccctgcctgaggcctccttccttccttttcacccccctgagcctccttgcccttggctggctgagccggcacatccccgtggcgcctctgcacctcccccaagatcattctgccagcacggtcctcactgcaccctccggtcctccctgcaccctacggccctcccctgagattatttcgccagcccgatcc

SEQ ID NO: 12143 - DNA, 1337 bp, Artificial sequence
  DNA replication origin
cattcccccatgagcccgggaggcatcgccacatcactgggtggaaggcgccccgccgccggcgcaggcccagaccccggggaacgcgagagccacgaacctgggccaggagccgccgagaccagccccggccgccccagcgctcctcccgcccgggcgcgatgcggtgagaatggccccgggcgggaacgtcccctgtcggggcggccatgggaggcactggggtccctgctctgcggccgccccggtgaggaggcgccccggccaccccgaaacccgggagaggcgatgctggcggtgacaccgtcacccaccgcgaggacccgtccctcctcctggggctgcgccggcgccgggaagctcccgcgacccccgctctgtccggctcaggctcaggagggcgccctcgggtgtccgggagccgcatcctcacctccagagcgatggtggcaggacaggcccacggtcctcgttcgccccgggggtgcctggcggggaaggcgcccgagatgctgagacccccgagagcacaggcagaactcagaggaggcttctgagggaaaatctcaaattcacctccttgaagaaccgactgtccagtatgggcccttagccacatgtggctacttaaattaatttaaagtgaacagaattaaaactccgctcctcagttgcagtggttgtgtcccagcactcacgtggctgtggcgaccctcagtgctaagaatcgtctccacaccccggaaagttccatgggacagggcaggtctaggagttgctgggtggtaatcacagacacatgtgagaggcacatgcacacacacacacacacacatacaaacacacacgtaaacacacacatgcacagacacttccccctggcagtcatcctgaagaaggggctggctcgctatggcgctaagcctagaactcagtgtctcctggaggtacagcttcagctccagagaggagccctgtgtgtctgcagtggaggccagaggagttggcagccgcagtacagcgttccaaggatggagggtttgggaggggctgcttcacttgcatggggctcaccagggtccacggctgggggtattgggagcactgaggcagagagagtcacggcccagcaccatggagcccacatcctccaggggaacccaggatggggactgaaatgaccaatccccatgagggcgctcagggactcatctgcacctcccttagcccctggacagagctgccgagaaaggcatcagtcagagccacgcaggcctcctgagccgagtgctggtagagaggggtggccttcaggaggaagactggaggagagggag

SEQ ID NO: 12144 - DNA, 1286 bp, Artificial sequence
  DNA replication origin
cggcctcctcccggtgagacgccctcagggctcccccatctcagcgcccgggacgccgcagccatctcggtgggctgaagggaagtaagattcttgcagagggcgcctgccccagaaaacaaatttcatgtacaggtttcaaagaggccaagacgtccgtggcttccttcaggagaaagcggcaaaacccacgcccagatccgttgtgctttcagcttttcaccaggaaactcacttttctatgtaagagcaagcgagttccacagcgcggggaggccagtggagaggagcgcggccttgcctggctcatgtcctgtttccagcttgccctgaaaacgaattactaaatccatggaggaagagcttggggcctgcctggtcctcggccacagtggggctggggcctgtgactgcgtgtgcagagggtccgcgcccagggcccgggaaaggggctgcgctgccccgagcgagtccccgggcgcccccagcctgctgcagccacctcgggctccacatttcggccccttctcctctccgctgctctgggctcagccaccaagctccacgctgtgggcagaatccactggggcgcaggaaacctcagcttccgcagcccacctggccttcgcagtcttcctctccagggttttatttcaacatggccttttctgctgcgactcagctgtggtaggggccaagtttgggtgtgtgaggccagggaggtgcgttgtgttctcgcggaagagagagacgcagcgagggagcccgggcacacggacccagctcaccaaccgcagccaaaccaccaattctgtcccgtggcccttggtgaccggtgacagggagggaaggaaacgtggccagcttccgccagaccacaggcgaacacaggtggggcggcccactggcttgggcctaggagctgcaggagcaggggccacggtccagcctgacgcccctctcttggggcaggaagttccctctgtctgccgtgagcaggggcacttgggagggcccagcataggacctcaggagctcccggagcagcctcagcagccgcaacccctcgaccttgtccagcatcacgccccggtgccagggagacagaccgaagaatcccaccactgtgcaggagaggaagcctactttaattctgttcttgaagtaatggcaggtgaagattcgtatgtcataattaattcctcacttcttaggaatcgcagcgattagctctgtcattcctttgttatcagagagaactgtgagtcctgttattctcactgctt

SEQ ID NO: 12145 - DNA, 1479 bp, Artificial sequence
  DNA replication origin
caatagattctgaagaggggcgagccaggtggtcatcattatagagcttttctgacaggacggggtcctccacgtgcccctcaagaggcagacactacaggtgtgcggcggggacccacgcgggaatggccacctctgtctcaggcagaacagactgacgccacctgcccctgtcagggccacacctgcaggaaagaatttcaaacttcagatctgaacactctggaaaaagagagtgaatgtttaagctccctctcagcctggcagtggtggcatccacgggcggcgagtccagatcctgaggctgccacagcccctgcaccgtgtatgcctatatgcaaggacacccagctgtggtgaggcctggggccgccgccctctgctccagccaccccttgctgctctctgggggttccttcagctgcaggaagccagggccgctgtccatcccgaggccccgtccctcctgccaccctctcggcctgcacctgccagagtccagagaggttttccagcagaggctgtgaccgcagccggcgagagatgaagacggaacccgctccccacgacatgtacccaaaggcgccggccacaaggaaacatgcacaggacatcacagggcacgtctgacaaagatgcgggggctgcgaggactgggagtggctgtccacgagggcccagggccatgctttcatggaccgtcttacccgcctgctcagtcgaggccgagagccccggggagagccgtggccgcctgccccaggcagcactgggcattcccacgcttcctcctctccaggacaggctcctcagatgagagcagggattgcagcacgggcccgggcaccccggccgcgaccccgccatctctgagccacgccccctagccagggccgcccacccactatcactgaggcccacacctgctgagacccacacctgccgaggcccacacctgcccaggcccacccattatcaccgaggcccacacctgccgaggcccacacctgccgaggcccacacctgccgaggcccacacctgggggatgggcagtcgggggaggacgagtggtgccgagggtctggggggcccctgaaccaccagggcgaggttcccggctggggagacgcagagccagggctctgcacagggggtgccctggggagcaggcatgagagccacttctgcgaggtgaggtcacgagacagacgtcaacaagggctggccagagagaagagccggtcacccagggcctcggagggaaggaaggctcagggacccgcgggacgaaggcttggagaagcccctggggagcagcttgagcacagcgagctctgggacaatggccagtgtccagcgacagggtgttcagagacggggtgtccagcgacagggtgggtccgaggggacagcggccgccatgtccagcgacaggatgggtccggggggacagcggccgccatgtccagcgacagggt

SEQ ID NO: 12146 - DNA, 1318 bp, Artificial sequence
  DNA replication origin
gccatgtccagcgacaggatgggtccggggggacagcggccgccatgtccagcgacagggtgggtccgaggggacagcggccgccatgtccagcgacagggtgggtctgaggggacagcggccgccatgtccagcgacagggtgggtccggggggacagcggccgccatgtccagcgacagggtgggtccgaggggacagcggctgccatgtccagcgacaggatgggtccggagggacagtggccgccatgtccagcgacagggtgggtccgaggggacagcggccgccatgtccagcgacagggtgggtctgaggggacagcggccgccatgtccagcgacagggtgggtccggggggacagcggccgccatgtccagcgacagggtgggtccgaggggacagcggctgccatgtccagcgacagggtgggtccggagggacagtggccgccatgtccagcgacagggtgggtccgaggggacagcggctgccatgtccagcgacaggatgggtccggagggacagtggccgccatgtccagcgacagggtgggtccgaggggacagtggccgtgatgtccagcgacagggtgggtccggggggacctgctcttccaagaccacatcgtcataattctgtgaacatttacactgaaaaacaagtgtttgactggcaccgatgcctggcacagcttccctcattcattcccatgtgcacaccgggcacctccttcatggcctcagcctccctggtccccgatttgcactggacctgtgaccagggcttcctcacctgaagatcgacccggtgccagcctccgtcctgctcccccaggctcagcctccccacaacccagtggcctccccctcccacggccccctcagccgggcaccatcacactcttgggttcacatcgggccacctcctggctgggcgggatgagccctgtggggctgggacgtgcatgtcagcaaaggagccagcaccaggctggtctggagatgctaacccagaggttcctggatctggcaggctgtgcgcggccctcctggcctggccgtgtcctcagctggtgctgcagcccatcctctctgatccgcacagacctgtggccacccttgtgtgtgtctgcggcacatttaaattacacatgaattgagagaaggacctgccccgtggacctctgcagcctccacaggacctgcaggtgcggagtggttcctttctcatggtgtcgagggccagcaggctgcactctgtctccccacgcgaagtgccacaaatagccgatgtctccccgccctttcctcagctg

SEQ ID NO: 12147 - DNA, 1893 bp, Artificial sequence
  DNA replication origin
tgagcctggctggaatgatggttttgattcctgtacctgcagtgggacctgagatcctgtgttacaaaaggccccacatgcacgggtgaaatttttggtaggagaatgacagacccctctgcacctggccaacgacgctagggacagctagcaggaaagtggacccccctgcctactgggtctgcacagaccccatcagtaaaacaccttcgttcattttaaatttcactggtggcaagagaggaggctctgggctgattaatcagagcaaagaaagaaacttgtagcctttgctattgtgcacaaaaagagtcaaacgctagaaaatatttgaagagatttattctgagccagatatgagtgaccatggcctgtgacacagccctctggaggtcctgagaacatgtgccaaggtggtcgggggacagcttggatttatacactttagggagccataagacaccaatccaagacatttgagaagtacattggtgagtggcttggtccagaaaggtggacaacgcaaagctggcagggaggggaggcttccaggtgtcaggtaaatttaaaggttttctggttgacaatgggttgagtttgtccaaagacctgagatgcagcagaaaggaacgtctgggttaagataacggtgtggagagcaaggttttgtcatgcagatgaagctttagctaggaggctgcagacagaatagggtgcaaaatgttgttgtcaaagtctgtgctgctgttagtgaggggtacaatgagacgtgtgtgacccccgcttcccgtcatggcctgaacccacctctcaggttacattttaagagccctggctgaggaggaagtccattcagatgactggagggcctcagagttttgtttttggtttacacttttcaaacagagatgtctttcttccttttgcctttcttttctgaacagctgtgacttctgcttggacgtggatctgtggcagccacacgcctatggtgggaccagttctttcttagaagcacagtgtgtgactgtcttctcctgggatcgaggacaactccacggcctcttcccttaaacagggatctgatcctcccagtaaactttccttcctgtcgcgtgcttgggtactctataaaaatggaagtttaatcaatattttaacttacatatttatttatagacgcctggtttctcaaggacttcaacctctaagttcacagtggtgttcctgagcacccgggcagtcactcctggcagatggtccgaagctcaaggccaggcttgggacattccggcggccacccttccccacctggctctaacagactcccgatgaaaccgtctttctgcagggggtggaagggaatggggatgttttgattcctggggagatgataatttgatttttcaaatcttgaatatggacatatgtgataggcagttagctaagaagatatttattattcaaaaaggagaatcactttgtaacctcacagtgggcaagcagtggtagcattgttcccccagtgatggaggcccacagccagtggtgaccactagtacttcgtaagccccagacacagtgccccagcaaggacatggtggaccagcaagaacacataggaacagcaaggacacggtgggccagcacggactcagagggacagcagggacacagagggacagcagggacacggtgggacagcagggacacggtgcaccagcagggacatggtgggacagcagggacacggtgggacagcagggacacggagggacagcggggacacagtgggacagcagggacatggtgggacagcagggacacggtgggacagcagggacacggtgggacagcagggacacggagggacagcagggacacagtgggaca

SEQ ID NO: 12148 - DNA, 1591 bp, Artificial sequence
  DNA replication origin
tgctctctggtgccttaatcccaggacagcaaaagaagaaggcaatcctagatcaacgtctcttggcttttctggcctggcacccagagttcagtttcttaaactctgcctaacacacaggtcggcagcacttcccacagaactggactcccagttatggccgggactttggcaaggacacactcattcatgagcatcaagagtgatacccatccacgaccctgagggcctgctggtgcaagacccaaactcaacattttcagtgtggcctccgcctgctcttggtcacctgaccaggtttctgttcctgagccctgtggatggttcagacgtccccatccacatgagggtcatgtgatgcggctttaatttccacctggcaaccctggaagcccacgtgtgtctcaggaatgcatggcttccatctcctctacagccacaggcaacaggtctacctagggcatgtgtgggcagcacagggtgcatggtcacctgcagtggatggtgtgggcggcacggggtgcgtggtctcctgcggtggatggtgtgggcggcacggggtgcgtggtctcctgcggtgggtggtgtgggcggcacggggtgcgtggtctcctgcggtgggtggtgtgggcggcacggggtgcgtggtcgcctgtggtgggtggtgtgggcggcacggggtgcgtggtcgcctgtggtgggtgtgcggggccttctgtgaggcaggacaggctctacatgcacttcggcttcttggcagatctgagcgaatgagaactgccctgggcttcactcccgtttaactttgcatgaagaagaatgttctccactctgactttaagccaagtgcttgtctaagtgcttctctgacagggagacaacactccttccccggagccttccactgggcctggacatctcccgtctctgggctctgagttaactttgtgatgccagctctttgtggggtgtgcgcacggctgcaggtgaggagacctgtgagagtcggaagccagctgccaccccaaatgataagcacattgtagctgtctctgcatggcttcgttgcatgaggaaagtcactactgtcaatgcagggctgctggtctccacctcggaacgtggcagtgcacaatccatcactgccctgtgttcgcaggtcacagagaaaagaaatgctttctctattccttctcgcagttagtattttgtgattatagaaaaactgtgcgtagttggaagtagggaagggaaggagggagggaggaagaaaaacagaaagaaaataaaccaaaagaaaaagaaggaagaaaccaccgtattttcagtttgcttcgaattattaaagtggctcagggaaaaaactttaatctgaaaatagtggccaacacgagacaggacgccgattgctgcgtgagtaagaggaagcaccgcagaccaccgccgacgaaattctggattttttgaggagggatttcctgaagcgggtgttgaatatgggcatgaagccacgaggctgaatctagatgtatgtttcacgtttctcacaagagctgatgttggtttttgattgcaaaagatgcccattgca

SEQ ID NO: 12149 - DNA, 1259 bp, Artificial sequence
  DNA replication origin
gagagagagggagggatagagggtgggagggagatagacagagacagagacagaaagagacagaaggagagagagggacagagagagaaagctctaaaggatgtcctgctcagagtagtgaagaaataaaaaaagtggaaaaagttgggagagaaagccccaaagagaatggggtgggagggagagaaataaattccacttttgcttaaagttcttaaaaaataaaaattcctgagagtatttagggtgataattgccaagctaattatttttgttaaagtcaagttggttttctaacactatgaaatacaatagaccaaactattttacccacattcttgatgaaacatcgtctgtttaaacattccctcttctagccatgatggggtgatgaggactggctttgcgcccctgctttaaacaactcaggaccggaatccacgcggcttctgggcagcaggcagcacagggcaggggccctcagggaggttccagccaggaggggacaagctgttgacttcccgcccggaggtcacagtgcaggaaggggttcgacccatttgggggacagaggtcacagttcggagaggacagaggctaaattttcattgtcaagaatggcgagctccaagggcgggtccaggggtccgaggtgggtccccaggctgggtgcaaactgaggaaatagctcagggttgaggaagaagctccaggggtcagcagagccagtggggacccaggcagggctggaatggtcagtgctcccgtcaacccagtgaaagggcctcacggtgcccaaggccaagcagaagcctcagtgggcgccccccaccctgacacatcgggccccatctggagactcgatcgtgacagtggacatgctgttggcatctggtgggcagaggccagggatgcgtggaacacatgctgtgctcaagaccccctgaaatgaagggttatccagcccagagcgtccactgtgccaacgcggagaaaccccggcctgcatcagcgcaggcttggcctacagagtgatggtctctcgctgctaattcttggtgacaccctctgtggctgtagcactgccctctgagctcctagtacctgctcctgtctccctggagggtccgtgtgttgctctgggagcgtggccacagtcgcaccatccatgcagttcagctgcgcctctgctgtgtgttcctgtgttgggcctgaatttgaagtttggaggcagtgtcttctgctgaccatgttcctgg

SEQ ID NO: 12150 - DNA, 1381 bp, Artificial sequence
  DNA replication origin
tttggaatatgcgggagccggctccgcactgggcaggcacccaccctctgcatccgggaccctcagccggaccgaggtcagagggaacctcaattcattctgtgccaactcacccctggggtcctgggcacatgtttatttttatttttatttttatttattttatttttattatttatttttatgtatttattttttattttatttttatctttcaccattatcattataactattatcatcatcttagttgaaatatgaaaaaagcaagaactgtccttttcattaatattttgaaactcgatggttcccgttgtaaagtgtgcactgagtgaatgggactaggcaatgccacaacttccatccctctcactggttacttttgttcaaaaattacaataatgtggagaattctttcccatgtgcccggaaggctacggctctcgtgtctctcttcccttcctgctgcacatggggagaacgaaggggctgccacttggggctgaggagcagaggagcagaggagctgggagcagcacagccacggccgcagtgagatcatctcccctctctgcctggctggagctgtggggactcctcctgctgccctggcactccccacggggcttccctggctgcccggcctctgccccagctggagccctctttgtatccatgcctgcatggtgccgcccttgggctttgctgaatgccacctgcgtctgcctgcatcccgaagccaggcctgccacgttccgccacgttcccgtgtggacaccagcgcttgcaaatgcagctgggtctgtccccctttcctgatacagtttgtgcttggtggggtgggaagacctgtacctgggctgacgacgtgggacctctcctgtgacacacccacaggcagccggccccactgttgggggtccttggacacctgtcccaatgctggcgctatgtaaggaaggggtgaatggcagttcttggggccatcacgtgcctgatctttctcattttatgaagatgtggggagaatgaacaatgttctgtctgtgagagtgccccacggtctccaggacactgtactttttatgtttcccacaggacactgtgaacgccatcaacacacagcccggggtcgctgtctgggacgtgcccattaagtcacgataaacggtttttactaaaagcttaggcaccaatagaggcctgctgagggcggtggagaggacaccagagtgggtatgtggaggtgatgatttcacgaattaaccgactaatctaacatccagggaacaggatttccacataaactagctcttctctaagacactgaagtctgggagaagccacagtgactctttgggagcaccatgaagagccagga

SEQ ID NO: 12151 - DNA, 1950 bp, Artificial sequence
  DNA replication origin
cgggcgtcggacggacaatcccagcctcacccctgcacaacctgctctccccactgcctggctctgtggggtgagtaaaccgcaggactctgagcctcacttgcccttctggaaagcagcagtgggagggttccctcatgtttaagctcctcccacggtttttgtgacagtcacacgtggtgtcagacatcggagtgtgtgcataaacgcaaatcgaggctgctcttgctgctgttaggacaaggttttggtcctgaatgctctgcacttttgattctgtgaatgaaataatccactttaaggattatctgtagtgaagcccttcgtaccctgaacatttttgtgttcttctggcagcaccaggctgctgcctcagcccagggagggaaaacgcgttttaataatagcctggggcatatactgttaggcgcttgcaccggctgccaaagagcatctcagggagcgtcctgaagccagcgacacccgcctccgttgcctggtgcatggtggccagtgtctcttttcctgttggtgggacggtggttgcctggcgcgtggtggtcagtgtctcttctcctgtttgtggacggtggttggctggtgcatggtggtcagtgtctcttttcctgtttgtggacggtggttgcctggtgcgtggtggccagtgtatcttttcctgttggtgggacggtggttgcctggcgcgtggtggtcagtgtctcttctcctgtttgtggacggtggttggctggtgcatggtggtcagtgtctcttttcctgtttgtggacggtggttgcctggtgcgtggtggccagtgtctcttttcctgttggtgggacggtggttgcctggcgcgtggtggtcagtgtctcttctcctgtttgtggacggtggttggctggtgcatggtggtcagtgtctcttttcctgtttgtggacggtggttgcctggtgcatggtggtcattgtctcttttcctgtttgtggacggtggttgcctggcgcgtggtggtcagtgtctcttctcctgtttgtggacggtggttggctggcgcgtggtggtcagtgtctcttttcctgtttgtggacggtggttgcctggcgcgtggtggtcagtgtgtcttctgtttgtggatggtggttgcctggcgcgtggtggccagtgtctcttttcctgtttgtggacagtggttggctggtgcatggtggtcagtgtctcttttcctgtttgtgggatggtggttgcctggcgcgtggtggtcagtgtctcttctcctgtttgtggacggtggttgcctggcgcgtggtggtcagtgtctcttttcctgtttgtgggatggtggttgcgtggcacgtggtggtcagtgtctcttttcctgtttgtgggatggtggttgcctggcacgtggtggtcagtgtctcttttcctatttgtgggatggtggttgcctggcacgtggtggtcagtgtctcttttcctgtttgtggatggtggttggctggtgtgtggtggccagtgtctcttttcctgtttgtggacagtgtttggctggtgcatggtggtcagtgtctcttttcctgtttgtgggacggtggttgcctggtgtgtggtggtcagtgtctcttctcctgtttgtggacggtggttggcacttactgcattttgggatgtgttcttcctttctttggttctgaaacattcacaggcatatctgtctctttgtttatgctctgctcttggcagacctgcactggtgtgtaagttctgggagaggagatggcattctcagggtgctgtgctccacggggcagactcatccatgcgtgagggctggagaggaggccacacccaaggcacctctcaggcacatgaggatggacgggaagtgctttgctcgcaagcaaacaaacctaccctcgcagacttgggttcttctgccgccccctcc

SEQ ID NO: 12152 - DNA, 877 bp, Artificial sequence
  DNA replication origin
gaggggagaggagaaggggggaagggaaaggggagggggagggagaggaatgaggaggggagggggaagggaaagggggagggggagggagagggaatggggaggggagggggaagggaaagggggagggggagggcagggtggcctccgggctgcctgcagctgcaggttcctcggaatctgagccaggcccacaggcctgccttcgaggccaccgaacaagtgctgtaaccaggggacaggctttcctccctcacgactgaactgaactcacttccactgcttgcttgttttgttaacattttagctgttttaaactgtaactggaagatcaaaaagagtttaggggaaaatccacggcacctggaccagccctcctggcactgccctcgcagtgcggtttcacaggggctactgggaggtgcgtctccctgcctggaccgagaccgggaccaaacagagaagcctgcagggccaggagttctatggagatggctcctcccagacggcagtggggaccctcagggttggccacaggctttgggtatgtgccacgtgttcccaagggcaggctggccatgggctgtacagggttccacgtgggccacagtagagggtgtacagaagtactggtttgagtggacgttggatgtttggctgatgtgtgccaatgttggttcttccccaccaaaaatgcgccaacagtgatgtctgcagataagatgagattctccatgtggtgttcaggccgttttcgtgaggaataagtgaaaagcgcctcacacatgctgggtgagctgccatttggcttcaagacagtttggctcttgggggcaggactgtaggtgtgggggaaagatggcccttcacgcagggt

SEQ ID NO: 12153 - DNA, 1465 bp, Artificial sequence
  DNA replication origin
tggatggagggatggggtggatggagggatgggatggatgggggaatggcgtggatggagggatggggtggatggagggatggggtggatggaaggatggggtggatggagggatggggtggatggagggatgggatggatgggggaatggcgtggatggagggatggggtggatggagggatgggatggatggagggatggggtggatggagggatggggtggatggagggatggtatggatggaggaatggggtggatggagggatggggtggatggagggatggggtggatggaggaatggggtggatggaaggatggggtggatggagggatggggtggatggagggatggggtggatggagggatggggtggatggagggatggtatggatggaggaatggggtggatggagggatggggtggatggagggatggggtggatggaggaatggggtggatggaaggatggggtggatggagggatggggtggatggagggatgggatggatgggggaatggcgtggatggagggatggggtggatggagggatggatgtgatgagtgtaggcaccaggagggtggtaggacttgggggtaggattcgcgatgggtgtggcccatgcattctgctgtactctaattctgtgggaagagcagggctgacgaacattttggtgtgatgaactgagcgttcaaggccgtcctctccaagtgctctttcccttcctctagtggggtctggaatctggctgacctcgtgtgctggggattaagaactgccaatgtgggcagcccaggatctcctggtgtttctcctcccagtctcctggcgagggcctcctgcatcccctcccatccggacaccagggtctgtgcttgctgtttgtcgggttcatgcttgagattccagagtgaaatttgatgctggcttggctcgtgggacgctgtcttcacctggagcttggatggttctgctcaagtcattctgtttctccttcagtgggttttctagtctgtgaaatggtgatgcggatgtaacacttcatgtttcgtagaatttctgaccaaacttggaccggaagaaggatggtgctgccttgcaggaaggaggcccgtgtagcacagctccaaggggaccatggattcttggactgggacccaaatcctcttccaataaaacaggcgtgtgcagtgactggcagggtcgggtgcccaagggctttgtgcttggagcatccggtggtcacagtccccacttgtggctcatggttctggtggcctaggcctctttattaacatctgcaaaatgtagctcacttgtgtataaagcagggacagtaaaatcccaccttacacagtgagtggggccctgagatggtggggtgcacagcaggcactcagcattggtggcaacgtttcccactctcctggttccaggtgtgctcagcgctgactctc

SEQ ID NO: 12154 - DNA, 1693 bp, Artificial sequence
  DNA replication origin
aatatgtgtggaaaaaaagaaccaaacaaggactcaatacctctcctgcctcttccatgaaatcattgttttgattcgagaataaaagatgtttggattaaaatgtttcttgaatttttccattcctagcctcttgcaagatcattgtgctagattttgaatgacctacttttccttctcaggcccaagacttcaagagactattgtggtaacggagccacaaattaatctttccattttctgaaaatagaattctacttacataagtttaaaaaaaattgttggtggttagaacaatatcattaatatcatttttatttttcaattaaatgattccaactgtcttcatgataattatttatatttatagaacatcttaaagggtacatttcacacagaaaaacaccacgtccagtctctgtccagcccatggagggcgaccagaggtgatggttggcgtgggcagcaagaagccagggaggaccgagcggggagcaggcggggaaggcagaaggggcggcaggagggatagggcaagccgtggggaggcagccaccccgtagcaggagaggcagggaacgccacgtcgctggtacaaatggaacaaactccaacgcccgtctagagttgaagcttctgggcagaagggagctttatgatccacgcccaacccataggcccgctcccgccatgccccctcctctgggaaagccgcctggagtgtccaccgcagaacgagtgctgcgctcagcagcaccaggacccgcagggcccgcactcccctccgcacgaagctcactgtccacgaggaaagacgaggaaatgcggggaaaggagggcacgggacaacacgtccaactgtgtagaggaaagggacctgcgtgggaaggaaggggcaggggaggcttcgagaaagagccaggaccgtgtagttggacccttggagggagctacacgtggccaagggtgcagggcggccccaggctggggaacagcaccggccaagctcggggaagggcgtggacaaggccggcccgtggaacggaagggagcatcgcactgttaaaaggtcatgaaacgtccgggagcctcagcaggggaggccgagtgtggaggtttagaggaaaggaatgaggctgaggctgccaaggaaaagcatggtgtggggggacccggaggccccgcggtgggaggagcgtggtgtggggggggaccgggaggccgtggggtgggaggagcgtggtgtggggggacccggaggccgtggggtgggaggagcgtggtgtggggggacccggaggccgtggggtgggaggagcgtggtgtgggggtacccggaggccgtggggtgggaggagcgtggtgtggggggacccggagaccctgcggtgggaggagcgtggtgtggggggacccggagaccctgcagtgggaggagcgtggtgtggggggggaccgggaggccgtggggtgggaggagcgtggtgtgggggggacccggaggccctgcggtgggaggagcgtggtgtgggggggacccggaggccgtggggtgggaggagcgtggtgtggggggaggagcgtggtgtggggggacccggaggccccgcggtgggaggagcatggtgtggggggggaccgggaggccgtggggtgggaggagcgtggtgtgggggggacccggaggccgtgg

SEQ ID NO: 12155 - DNA, 1381 bp, Artificial sequence
  DNA replication origin
tgtggggggacccggaggccgtggggtgggaggagcgtggtgtggggggacccggaggccgtggggtgggaggagcgtggtgtgggggtacccggaggccgtggggtgggaggagcgtggtgtggggggacccggagaccctgcggtgggaggagcgtggtgtggggggacccggagaccctgcagtgggaggagcgtggtgtggggggggaccgggaggccgtggggtgggaggagcgtggtgtgggggggacccggaggccctgcggtgggaggagcgtggtgtgggggggacccggaggccgtggggtgggaggagcgtggtgtggggggaggagcgtggtgtggggggacccggaggccccgcggtgggaggagcatggtgtggggggggaccgggaggccgtggggtgggaggagcgtggtgtgggggggacccggaggccgtggggtgggaggagcgtggtgtgggggggacccggaggccgtggggtgggaggagcgtggtgtgggtggggaccgggagaccctgcggtgggaggagcgtggtgtggcgggaacgggaggccgtggggtgggcggcagcacaggttgtggctgagctcggggccggggcagcggcgcttgcccttgggagggagaaaacaggcaaaggacaggatgtggtgagcgtcggcccgcgaaaccccgcggccacagcctgaggaagtctgtagacaacaggctcggcacgaaggagaaagagctgacgtggctgtgaggtgccgctggtgggagcagagctgggaagggagcctgggtgtgactgtggggctgggagtgagcggggagagggacaggagacgggaaggggctgctggagcgcaggaggacggccagaggtgcgcgggcccccaccgcagccccagctcccagatggtgcacggaccaaccactcaacaatcagcctgtgagttttcggaagaacagagtcttgggccacggagccaacaggttcctcctgcaggtggccatttacgctacactcaccccaaggccccagccaggagcgtggcctcagtgcaagaagccacggggcctaacacgagccacaccgagaggtttctgggcctgcaggtaaccctgctgtacccccctagcctctggcataagtgtttgtgaggggccttcgggggctggtccccgtgcaggctgaccgcggtggagtttgctcagtgtgtgatgaggcacatgtgtgtacgtaactgagcccacgtgtgagggcgaggaccatccgtgccggggcctcctgttgagcagccacgagacatcacctcacccggcacatgggcggccgcttcctcttgggcctggaatcctgacagccaaggctttggggccg

SEQ ID NO: 12156 - DNA, 1990 bp, Artificial sequence
  DNA replication origin
gctccgtgcaacctgggaatgactctgaactcgtgtgcccttgagggtgggagcagggactgcagaggctcctggctggggaaggacgtcagtggctctggtggcagatcggttagagccccgcggtggagacaagctgccgcccagagaatcgtgctgcctcatgctcccagcagaggcgggcgtgctggtgggaggattccccgtttattccagacaccctccgtgggctcatcttttccacaacacagcccaggagggaaggaaatcgcagttcatgctatagacacgaaagagatcgtgacagctgcgatacgaattcctagttagccaccttgctggtccaggaaagacagcagaaacagaataaaggaaagctagaaagcaaacaaaacaaagcaatgtcaagcccgcagttggctgttgtgagcttctgtggtgccattgtgagctgcgtggtgccgttgtgagcttgtgtggcgccgttgggagctgcgcggtgccgttgggagctgtgcggcgctgttgtgagcttgtgtggtgctgttgggagctgcgtggtgctgttgggagctgtgcggcgctgttgggagctgtgcggcgctgttgtgagcttgtgtggtgctgttgtgagcttgtgtggtgctattgtgagcttgtgtagtgctattgtgagattgcattgcattgttgtgagctgcatggtgctgttgggagctgtgtggtgcttttgtgaagtgcatggttctgttgtgagcttcatgttgctgttgtgagcttgtgtgctgttgtgagcttgtgtggtgctgttgtgagctgtgtggtatgagcttgtgtggggctgttgtgagcttgcatggcattgttgtgagctgcgtggtactgtcgtgagctgtgtggtgctgttgtgagcttgtgtggtgctgtcgtgagctgcgtggtactgtcgtgagcttgtgtggtgctgtcgtgagctgtgtggtgctgttgtgagcttgtgtggtgctgttgtgagcttgtgtggtgttattgtgagcttgtgtggtactgtcatgagctgtgtggtgttgtcatgagctgtgtggcgctgttgtgagctgtgtgttgctgttgtgagcttgtgtggtggtgtgagcttgtgtcgtgctgttgtgagctgtgcggtgttgtgagcatgtttggtgctgtcacgagctatgtggtgctattgtgagctgtgtggcgctgttgtgagcttgtgtggtgcagttgtgagctgtgtggtgctgtcgtgagctgtgtggtgctgtcgtgagctgtgtggtgcagttgtgagctgtgtggtgttgtcgtgagctgtgtggtgcagtcgtgagctgtgtggtgcagtcgtgagctgtgtggtgcagtcgtgagctgtgtggtgttgtcgtgagctgtgtggtgctgtcgtgagctgtgtggtgttgtcgtgagctgtgtggtgctgtcgtgagctgtgtggtgttgtcgtgagctgtgtggtgcagttgtgagctgtgtggtgctgtcgggagctgtgtggtgttgtcgtgagctgtgtggtgcagttgtgagctatgtggcgctgtcgggagctgtgtggcgctgttgtgaactgtgtggtgttgtgagcttgtgtggtgctgttgtgagctgcgtggtgctgtcgtgagtttgtgtggtgttgtgactgcccagggtgacgcagcgttgaccgatgatgaggcacctgatacagataagtcctaacatattccctggtgcaatttaccagaaaggctgaaaggctgggccgcactgcagggtccctcaccaagggaaaatctccccagggcatggatggggtttccggctgtgtcacgtggctcctgccaccactcagtgaagccctaagggtcctctggctttagagtttgataatttgctccgattgcctctaacagagggcctgtctccatccaccccatcaccacaggtgggtcagtcgctc

SEQ ID NO: 12157 - DNA, 1034 bp, Artificial sequence
  DNA replication origin
ctgtcttaggagcttttcactctggagaggtggcattgcctcagcagatgtgaggccgtcagctggggtaacagcgagttgacacaagaatgctgtcctggggaaatcagcccagaattgagacccgggaaggggtgggccttttaaccgctgggagaacctggcctggccgccttgttccctcacaatccccaaagctccagggcccgcactctgttcccaagctggggtcacatttactgctggctccaggccagactgggccacaaggacaagttggctgtggaagaggccacgactggctcaagagatgtgtggcctccggagggagaaagaaggctgggctgaggtccccatgctcattgagctgcagagaaggaaggggcctctcacaactgcagaggtgctggcagggcaaggacagtggtccttagaacacagccctccccagagcggaaccctggagacctcacaggggaaggtctggcccgaccttcggaggggccgtgcgcagggcggcatggaggaaagggaagggcgagtcagaaggggagtgactgcagcctctgctgcaggaacaagcgcagggggctggacaacagcccgaggccaagtgccctccccggtcagtgcctcagtcatggtggccgacgttctgagggggaccaacctctgtgcctcctcacctcctgcccaggggctcattttcccaaggggcttggccgactgcccacaggctggagatccctggacccccgagagggtgctggccaggtggggagcctttccaaggacggcagcaggcaagagcatgcccttctctgagaagagccctcagtcctatttccaccccttcgaacatggaaggcagcaggcaagagcatccccttctccgagaagagccctcagtcctatttccaccccttcgaacaccagccctgcctcccctccagcccaggatgggtagacgcaggcctgcagtgcctggctcagatgctcgtggagtccagtctcctgcccacaaattgctgtgt

SEQ ID NO: 12158 - DNA, 1125 bp, Artificial sequence
  DNA replication origin
tctaccccaggttccctgggagaaaggcaggactgagctcccccagccctgctgaaggaggcgattatcctgcagctgcgggtgtgagcacagcctcccacagaccccattactgtgccgtccgtccgcgtctacaatgaagggaagatgtgatttagaggctctgagaagaaacacgttcagagccttccccatcaacgtgctcgcagctgacctcaggagcggctgagcgtgcacaggctgctgttccaggggcctttgtgattgtcagaaaattaaagctcaggcttcctagtaaaagcattggaagagcatcaccagttgctggacttattagtcagaaggagagctgcgaagatggagataaaaagcagaaaacagtttaatttgcagagccgagccccagggcgcggagaggcgcctgtaattacagtggcggccagccctcctggaggtggctccaggctgcctgcgcggagggcggctgggagggcccagggctgggagggagaggaaggcactgggaatggtctgaaaaaggaccagaaacgaagctgtaggtgccgaggccttggttctgaacggattagggcagagccttcccagacacagcctgcagggttaatgcactttctcatcgacggagacgcaaggtgctcataaatgatgttcagagagaaatagcaaggggagatttataacaattcaagggaataatcaactcggggagaatggctctgtcttaggagcttttcactctggagaggtggcattgcctcagcagatgtgaggccgtcagctggggtaacagcgagttgacacaagaatgctgtcctggggaaatcagcccagaattgagacccgggaaggggtgggccttttaaccgctgggagaacctggcctggccgccttgttccctcacaatccccaaagctccagggcccgcactctgttcccaagctggggtcacatttactgctggctccaggccagactgggccacaaggacaagttggctgtggaagaggccacgactggctcaagagatgtgtggcctccggagggagaaagaaggctgggctgaggtccccatgctcattgagctgcagagaaggaaggggcct

SEQ ID NO: 12159 - DNA, 1633 bp, Artificial sequence
  DNA replication origin
catggccagggtcagaagttacacggagaggagcgcatgagcctgcttatgccgccaggaagccgaaggacttggccacaacaggagcagctaacatttgtcccatgttggtgagctgggccctggccagattgtcctgcattccgtgagccgggcccttgccagagtttgcctccattttttatttcactgctgagaaaacacaggggccaggtacttcatcaagcccattaagaagatacagacttgagtcagaggaggagtcaagggctgaggccgcaaagctgtggccaggacttgaatccaggccggtggggtgtagccggcaggttcaatcacgtgctcgtcccggcctgtctcacgtgggcccggaaggccggggtgagaacaagatgtctggggctttgaggggtgggaggaatccgcggggtggggcttttgccctgcccagggctgctgtgtgacgtgggacaccccaggggcgggagaaatccatggggtggggcttttgccctgcccagggctgctgtgtgacatgggacaccccaggctaccaagcgtgacttgggtcatgggaccggacctctccctccagcagctgcagatctgagagccacacttccctggtagtgccaagcaaggggtcctagcagagggaaccgtggcacctcaaattccacagtccaccctacccgaggccacctctcaagtcagcttgccccatagggtgcagccatgaccacacagacacaccctctccctcaccagacctcgaaggagaggcgcacagcctcatatggctcccatagatgtagaaagttccagaacacaaatcacacacccggagaccattgctgggtgagcagtggaagctactctaggccagcggtttccaaaatgccctgtgaatttcctgccacctctcagtcaccgcggagcttcgtagagctgcagactctacctccacatcccacacctctgctgcccaagggtcagcactggccagctggaacttggaattctctcatttcagaaacgtttctaccttagaaatgatggcttcccaccgagaaacaagcagtgcgcaccacagctgccgtcttcctccgcacgaatgtgcacgaaacaaaggctaataaaactcacatgtccgtgggcactgtaagtacttccgtcataaatgctacacgttccacacatccgaccctttgctttcctctttatctagatctaggacctgcaaacttgttctgtaaaaagccagagagcgtgagcctcaggcttcctgggcagacaggtcggaggggagggagcgggcagcgtccagtgaaacttcatttacagaaacggccatggccaggtttcgccctagggccgttgccgacccctgaaattgcgggaagcttttttcctccgtttgctggagacgcctttccctcaagacaaggtgaagattgcagtgcaagctgcgtcttccttcttggtctttggaggagggtgagaggagccccactctctgccagctcctccccttcctgccggagccggcctttctgacccgagcctccaccgcacacatctgtgccctcagatccctgcctgcctcctcccatcacggcccctcccgctccca

SEQ ID NO: 12160 - DNA, 1002 bp, Artificial sequence
  DNA replication origin
agagcagggagaggaggggagaccagaactctccttttgaactcctggtccctctggaagcatttggagctcactgggaccctcctcatttttgctgcaggttcccttttgttcatttgttttgtgttgtttttgcacccggccctccctgcctgtgccatagactctgtctgtaacgtttttgatccacatttttgccactcctacattgggtctgataagacaaaagtgactctctcagaaaagaaaacgggcacagtctaagggtggtgctcattttgtgatgaaagccccatcttgtcttttttttcatcaaggtggtctgaccagcctgccctgtactgaccttattgtcattcttttctagacaccaaagccatgggccccagtgtgtgggaggaggactcacatcagccagggacttccttgcagccacaagcgtgggtgcagtggtgataagcacactgcggagggtgaggtgtgtaggagggtgaggtgtgtaggagggtgaggtgtgtaggagggtgaggtgtgtaggagggtgaggtgtgtaggagggtgaggtgtgtaggagggtgaggtgtgtaggagggtgaggtgtgtaggagggtgaggtgtgtaggagggtgaggtgtgtaggagggtgaggtgtgtaggagggtgaggtgtgtaggagggtgaggtgtgtaggagggtgaggtgtgtaggagggtttggtgtgtaggagggtgaggtgtgtaggagggtgaggtgtgtaggagggtgaggtgtgtaggagggtgaggtgtgtaggtgggtgaggtgtgtaggagggtgaggtgtgtaggagggtgaggtgtgtaggagggtttggtgtgtaggagggtgaggtgtgtaggagggtgaggtgtgtaggagggtgaggtgtgtaggagggtgaggtgtgtaggagggtgaggtgtgtaggagggtgagaggtgtaggtgggatgaggtatgtaggtgtgtcctggaaggttcagca

SEQ ID NO: 12161 - DNA, 1638 bp, Artificial sequence
  DNA replication origin
taggttctgaggcagcagtgcccagcagtgcccgccccaggtgccccgtcatgatccctgggtccccagccccacctgcccatctctctccagctccggcttcactgtgtactggggattatggagatgatgtcacggaactttctgggattctcccgtgaattgccagaggcagcacctggatcactgtgtacactgatggcagagtttgcagctcctccagcagctgctgcccaggccgccctccacccacactcacccacatgaggggcctgaggactcagggagggattcctcctccccagaagccactgggaagtgagtgaggctctgtctgcattgcaggtagtggaggggcggctggcagcaggcttgttggcaggaggtgagcctctgtctacactgtaggcagtggaggggtggcaggcagcaggcttgttggggagggtgaagatctgtctacactgcgggcagtgcaggggcggcaggcagcaggcttgttggcgggggatgagcctctgtctacactgtaggcagtggagggatggcaggcagcaggcttgtggggggggtgagcctctgtctacactgcaggcagtggaggggcagcaggcagcaggctggtggggtaggtaagtccctgtctacactgcaggcagtggaggggcagcaggtagcaggcttggcggtgaatgagcctctgtctacactgcaggcagtggagggacagcaggcagcagactttttgggaggggtgaagctctatctacacagcagtcactggaggggtggtgggcagctggcttgtcaggtaggtgaggctctgtctacacagaaggcttgtggtggggggtgaggctctgtctacactgcaggcagtggaggggtggcaggcagcaggcttgctggggagggtgaagctctgtctacactgtaggcagtggaggggcagcaggcagcaggctggtggggtaggtaagtccctgtctacctgcaggcagtggaggggcagcaggcagcaggctggtggggtaggtaagtccctgtctacactgcaggcagtggaggggtggcaggcagcaggcttgttggcgagggtgaagctctgtctacactgcaggcagtggaggggcagcaggtagcaggcttggcagtgaatgagcctctgtctacactgcaggcagtggagggacagcaggcagcagactttttgggagaggtgaagctctatctacacagcaatcactggaggggtggtgggcagctggcttgtcaggtaggtgaggctctgtctacacagaaggcttgtggtggggggcgaggctctgtctacactgcaggcagtggaggggtggcaggtggcaggcttgtggtcgggggtgaggctctgtgtacactgcaggcagtgaaggggcagcaggcttgtggggtgggtgttgtcccacgccctgcccttaccctctgaggcctttttcttgcgtgaagcatgaagggcgactttgcggctggagcctggtcccgcttcttcccatgagtgttttgttttccctcctgcgtggtttttaaatgaaagatgagtagacatgtgcaggcagcagcttcctgagctcagtctgcattcctgttggtcttggtggg

SEQ ID NO: 12162 - DNA, 1252 bp, Artificial sequence
  DNA replication origin
gccagctggtcagagcccgagctccaccccagggcccccagagcctggcacacatggtcccgagggctcccgtcaggccatgacctccccatgccagattccctcggaggcacttcctgcctgcagcaacaccatagcaaacactgaggctgaggctgtgcccaccccacatctgcagcccctccagagacctctctggttccggctctgccagcaagcagcgaggacctccacaggtgagccacagccttgtggcccgaggccttcacataagggtgaccctctgagctggtctcatgctggccctcaaatgtgtctctgtgtgccacggagtgagagaatttcatacagatcatccagaagaatgattaggaaaagccccacacagctttgggccctgcaatgtggggagagcatcctgcatggtctgctgggcccaatataaccccaagaccctcaggttgtggggggcatggggaccagagatagatggtgggagaggccaacccacactgctgggtcacagagagatggcgggagaggccgcctgagatgctgggtcacagagagatggcgggagagggcgacccgcgctgctgggtcacagagagacggcgggagagggcgacctgacatgctgggtcacagagagatggcgggagaggccgacctgagatgctgggaccagagagagatggtgggagggggcgacccgcgctgctgggtcacagagagatggtgggagaagccaacctgagacgctgggaccagagagagatagtgggagaggccgacctgagatgctgggaccagagagagatagtgggagaggccaacctgagatgctgggaccacaaagagacggtgggagagggcgacccgcgctgctgagtcacagagagatggcgagagagggcgacctgagatgctgggtcacagagagatggcgggagaggccgacctgagatgctgggaccagagagagatagtgggagaggccgacctgagatgctgggaccatcaagagatggtgggagagggcgacccgcgctgctgggtcacagagagatggtgggagaggccaacctgagatgctgggaccagagacagatggtgggagaggccgacctgagatgctgggaccagagagagatggtgggagaggccgacctgagatgctgggaccagagacagatggtgggagaggccgacctgagatgctgggaccagagacagatggtgggagaggctg

SEQ ID NO: 12163 - DNA, 1280 bp, Artificial sequence
  DNA replication origin
acgcccccggaagggccgcccacctgcctggccacgcccccagaagggccgcccacctgcctggccacgcccccggaagggccgcccacctgcctggccacgcccccggaaggcagcccacctgcctggccacgcccccggaagggccgcccacctgcctggccacgcccccggaagggccgcccacagacatccttttggctgagttctgctgcctgaaaacttctgtcaaaacacagaatcgtttctggaagtgagacgattgaactggtttcttgccaacaggtgtcccagaaggagcgttcgcagctccctggaggcgggaacggagtcccccggggagagagtggtccagggtttgccctcaggcgtccacactgtccgccggcgaggctggtcctgttcccagcacccacgctgctagagccaccggatctcccaggaggagacccagctgcactcagaagaatcacgctggcctaggagatggacggcggcgtgcggggtgaggaataaaagtcctgctggtgctgcccgaggcccgggttgtgtggacggcggggggcggcaccggtctctcagtgcccgggttctgtctacgttctgccgcctccctggccgtacccgtaccgctattaagagggatatgttcaccgctgccccacccatagaaaacagactctgtggtgcccgtgaaaacacacgttggtgagactggcacgcccatgtcacgtggcctcatgatcactccgggctaggcccaatttccaaataagggtgtgcccacgggtgctgggtcaggacccctcgattgtcacccaagaagccgtgccgggctctggcctatgcgacctgtggtcgtctgttacagtagcgggaagcagcctggggccgtggagctgtgcgggggcagagctggctcctggggtttgagggaacgagggcctcagagggggtctgtggaagacgggatctgggcagccccttgctggacgctgagcaacgtcggactgcagcttcctgccgggacctgacatgcaaacagcagaaaccatgggggcgcgacgcacttgctggggcaggcggggtgggcagcctggcgccaatcacctcggctctgcagcctggagcggacggggcagggggcttctgctgcatccgagggccgagcgtggctttccattcccagccaacgggtctggaaagcagaccgcacgggtccaataatcaatcatccacttaatcaattaggagtatgctaatgcaggaggatggcgggc

SEQ ID NO: 12164 - DNA, 859 bp, Artificial sequence
  DNA replication origin
gatccggtggctctagcagcgtgggtgctgggaacaggaccagcctcgccggcggacagtgtggacgcctgagggcaaaccctggaccactctctccccgggggactccgttcccgcctccagggagctgcgaacgctccttctgggacacctgttggcaagaaaccagttcaatcgtctcacttccagaaacgattctgtgttttgacagaagttttcaggcagcagaactcagccaaaaggatgtctgtgggcggcccttccgggggcgtggccaggcaggtgggcggcccttccgggggcgtggccaggcaggtgggctgccttccgggggcgtggccaggcaggtgggcggcccttccgggggcgtggccaggcaggtgggcggcccttctgggggcgtggccaggcaggtgggcggcccttccgggggcgtggccaggcaggtgggcggcccttccgggggcgtgggcaggtgggcgacccttggggggcatgggcaggtgagtggcccttcaggggcgtggcatgtgcaggtgggcagcccttccaagggcgcggccaggcagttgggcggctcttccagggacatgggcagatgggccacccttggggtgcatgggcaggtgagtggccctctggggctgtggctcaggcaggcgggcagcctttccagggacatggcactggcaggtggaatctgttgtctaggcaggtggacctgggcactcctgggcctgctcctgtgtgggggctgccctggacaggccagtcagagtccattccacagttaaagctcgaacttcccgaaagaggcagctcttctcaggacaggccacgactcctgcaggctgggctg

SEQ ID NO: 12165 - DNA, 858 bp, Artificial sequence
  DNA replication origin
ggctgcgcacgacggggcacaaacgcggcgttaggtttccacgcaccgcgattcccgcgtgcggagcgtcggtccccgccctcgacagctggagtggggccagacggccgggaccccagagttcagagggccactgtggcccacccgacagccacgtattcacatgagagggtgcgggtttcacctctcaaggcgaaggagcctcgcccgacgctgggtggtgagcacgttgaagatgaaaacatctgagagcgccgtgcaagatgggcgacgtaggaaaagcaaggagcgcaattccgcctcagatggcagaggggcagccggcagcgggggaggggcagtcggcgggggaggggcggcctgtggggggaggggcagtcggcgggggaggggcagccggcagcgggggaggggcagtcggcggggggaggggcagtcggcggggggaggggcagccggtcgggaggcatccagggggaacggggccctcctcgctgcctgcctcttggacagagcccaggcggccggtttcagctctgagtcccacagccaccaccctctctaggccacggacatggtcctcttgaaggtttcctgcagcacccacacccctggaccttatggctgctgtgcctccccagagagacgctggagggggaggcagccccagggagtcctagggacagaaaacgagagcgacctttcaggcgcaccacagatcacgccactctccttgtgagatctgcgctgctgtttgtcgctacttctagaacaaaatccagagctgcagctgcccccaaggtgctgagacccacccgcgcccccaggcccactacccatgcccttggctcatggatg

SEQ ID NO: 12166 - DNA, 1369 bp, Artificial sequence
  DNA replication origin
tctagcagtttggttgcttaatggatttagtaataggagttttttaaataacacacaatcagatgaaacacaatgccaacatatcaactggtgccaagcacaaatatttgtttagtgaacgagcaagacacatgtgggaagcgtgcgctgcctgatcccagggtgctgttcagacgccgcctctcgctcggcctctaatctaggctgttcagacgccacctctcgctcggctgctaatctaggttggaagattggtgttcaagggaagaaagcctctggtgcctttgttcactcgttaaacagacgggcatcacgtgtcagttccatgcctggcaccgtgctgcgtgctggggtcacctttgccccaccccgcaagcttggttccaaggagagcagctgatgcagggtggggttgggtgctggatggggctggggaggacagctgggtggccctgtcctgggtcatgtgctggatggggctgcaagactctccagaacccattcagggcctggccggcttccgggctgcttggaggaggcgctcatattacaaacctacaaggatggggcgcgggggtgcctgcctcaggcagtgtggaccccacgcgagtgtaccggcctaagcaaacctgcatgggcccagccagggaagccccacgccatcagctactgaacaccagctccagctcgctgggttcctgagggcacaggatcctagccgtgccagtcacctttaccaggaaatgtgtcattttgcctgtggcagcccaaatgggtcctagacgaaggcaccctgtcttctcgtttgcagacctctgctgtgcacagtcatctgaatctccctccccacacatgcacagcaggaaaacaagaggctacatgattttagacctggaaaggaccccactctgcaatcctgctacacttgggagagaagaaacgagacagaaaacaggcccagagaggcctgggctgccctgcccgtggccaacatggccctggcagagcccggcaccctcctgcctacccagaattctttctcctgcatccagtgaaggggcagagccccaggagcctgtgcctgctgagtaacggtgggaagattgtattcatacacctgcaaaggcgacgcccgccagcctcaggacgcgccagagagaagtccagccgtgtgtgtgacacagagggctgtgtggctcaggcctggatgccccggtcgcctctggtcaggcactcactcttctttgagcacagacagacctgggatgcggtgttgaacaagtcgacagtcaacgaaagccacggctttgcgaagtacattccaacttattaggtgctagtaagaaacaaacagcagcttctgggcggg

SEQ ID NO: 12167 - DNA, 1097 bp, Artificial sequence
  DNA replication origin
accccaacccccccactgacgagctgtgacttatagcaatccacttctgtcctctgggcctcagtttccccaccagaacatctctacagtcccaagccccccgtggctcaggaagccccgtccctgcgcgcggtccgtgttcgtggacgagtgagccagcggtgccttcccagagactcacgctctgtgcagtagggccctttccagccagggttgcacactttctccccacgctccccacaggtgaagtggccgaaggcatcgtcccggggacggcagaaaacggagcagccctctccgtagtagtgttcgtcacacacgaagcggtaggagtacttgaggtccgtgcggccgctgctgtgcaggtcctgggaccactcctcgcccaccgtcaggtgcctctgggtggccaggcggctgatgagtctttctgggttttctacggggagaagatgctcctggttggttctgaacgagaaccctgtgactcgggacagagcgggggtgggccgagacattcagcacgggaaggaggcccaagctgctccaccctgaactttctggggcacgtgcagaatgaaagctgtccgggtttggctgggggatgggtgggcaaagtccaatgctattaactggggaaagcagttttggggtttgggttttgtttttacctgttgcgaggtcatcaggagaatctgtgtggagagcttcaataatcagagagaaggtgccctgggagagaggggagaagacgttagacaacccagaaaggtaacgaaaagaaaacggcaaaaagcagtcattcctaacagccaggtcagcaacagaggcctgaaggctgcaggtctggggcagcgtgtctggagagggtctccacgcacctcctgcctgctctcaccttccctaaggaaatggaagaactttttaaagagtggtttcctgacgtgttttttcagcctgtactacaggatattacgttgtttttttaattagagagagagagagaatgcaggcaggatggggtggaagaggcccgagggcccttgtcatttttcttgggggatgggcacgctccgggtggtagcggtcgcgctgcg

SEQ ID NO: 12168 - DNA, 944 bp, Artificial sequence
  DNA replication origin
tcccgccgctcaagtggggcccgcagcgccgccccccgcgtgtggccgagggtctctgggcgtctgtggcccgggagggcgtgcggaggggacggggcggcggcaccagctccagaagcagggggattcttgcggtgaacattttgcaggaatgtaaatgagtgcgttttgtgtggtgagggaggaagggggggctgggggcgggggcaggggaggactgggggggcggggaagggtgggggcggggaggagggttgcacattttacagctcactgaccatttggcgatccattgagaggagggtttggaaaagtggctcctttgtgacagctctcgccagattggggggctgctgatttgcatctcattagccatgcgggcggccggctgaatataagggcggcaggcgccggcgagagccagatcctctgcgcgcacccgcggagacccgacccggccgagggcagagcgcaggggaacccgggcagccgcggcgcagagcctcctcccacggcccggcccctccggtcctgcgcgtgtgtactggatggcattggctggattcatcggaaagacgcggatctttgctgtgacaccggagatcggagcccggagtgctcccggaacgaccgccgccgccgagtgacaccgggccgcgatccgcaggggccgccgcgcacacccgccgccgccgaccgtcccctcagcgcgcgccgctggccccggattatcgccttgcccgtgggatttccagaccgcggctttctaatcggctcgggaggaagctctgcagctctcttgggaattaagctcaatctctggactctctctctttctctttctccccctccctctcctgcgaagaagctcaagacaaaaccaggaagccggcgaccctcacctcctcgggggctgggaggaaggaggaaaacgaaagtcgccg

SEQ ID NO: 12169 - DNA, 1465 bp, Artificial sequence
  DNA replication origin
attctcttctttttttacatttcttctgctcctgaaaccctttcacctaccctcacccccacccccagcccccagcacagggaacagctcctgtgccttagggaagcagaatgctccgaagtcagcttttggaggaaacatcaacctagagaaaaaaggatcctgacactaggtggcaagattaaattaggatttgagctggcccctccctgtggcgacagcaagtccctatagagtccaaaaaggacaccatcatgggggtggcagcatcttctgaagcctccatttgctctgaaccaaacagtagggggttcacggtgatcccagcctgcctttctcacctggcactaaacatcatatgcttgtttcttgtggttaactcttcgctattccatgaggcaacagtggaaaacctaaagtggacatctctgttgatcctaaaactttacaggtatttgggaaacaaggtagcaggacacaggctgggtcacttgaagaggagccgcagagtagcaattccagctgcgtagcagccggagggcctgccctggacgacttcaccacgtgaccttcagatttctggctgcagtggttgtccttggtgtttgaagactttccctctgcttagacactttgatcaagacatttgccgggatgaaagtctcgttctaccttgacggtgccctgttctcaccaataaggcagctctaacacacctacagtgaggacactgtggccaggctgcttccttggggctgagctacaatcaaagggggcactccaacactcacctggaaccctaatgaagctacggaggtgttgggggtgggcagggatccacgggcgggatggtaaagagagggagaagtgcaaagctaggtgccagagtaggagtctctgccccaacttacttctccatcgtgcctaggagggcaatttagataattcattgtgtcatacgtgtgttctcggccctcccaataaactcatttccctttaaaaaatgaaaacaaaagttctagtgtctgatggacgtgtaaaaacctaataaggtgacggttgtgtaaaggttgtgggttgggggccggggctggaggggctttagaacatgcgccggacattgttgcagaggccgcggcgcgcgcggaggggagctctttctctccgcattgtgcggggagcaggtgctgtctgcattaccatacagctgagcgcacaaagagccactgattcagcctcgcacaataacaggctgccttaatgacagccacgcgaacgacacacaccaaactcacttcttaccaggcggagggaggccgagggggatacccgggagagaggggccgagacccggggaaggtggcggcggccgaggatcctgtgggggagggcgcgtgtctgtggggggagttgaaggccaggttctcctggctccggggatatgctgtccggcccccgggcccct

SEQ ID NO: 12170 - DNA, 948 bp, Artificial sequence
  DNA replication origin
tggcctcggccccgggctccacgcacgcgagaggtgggcgtctcgcgggcccgtggcgcggttcggactccccccaccgcaaaacgaccccccgacacgaaccaggtggggttggagcccgtcttcctgttctctgcacggccgcggatcctgagaaaggaaaagggcgtgtggcgccgggacccggccgcaccggggaagtcactcgccgggtctccagcggcgcagccgcggccagcggggaggcttaggagccgctgcggggctgattccttcgcccccggctgctgttcttgtgcccccaccgtcgcccaccttcgcgcagagctgcccgcgccgggggtcgcgctcctgcccgctgtggaagcgcggctgcctgggggccgcgcgccttgtgtgcacgcgggcggcgctcacctccttcctgcctgcgccagcgctggtggagcctcgaggtccaaacataaaccagatcgatgccccctcccttttccaggctgtgacgaacgatggcttcgtgggcttgtaagtccacgcgcggcaaccgagtgtgaacacatctgtgcacccacttgggtgggcgtggctgggcaggggacatggcccagtgagtgtgtgtgttggggggtaaggtctatgttcacgtgtccaaagacagctttaagaagtaagcagcaaggaagtaaccatgatagctccaggacacagaggcttcgccacggacgcctctgagaacttcccgtgtggcagccagcaggtccattcctctgctacgttaactgctttcagattccaaaactgacggaaggagaatgggcagagggtggttggtgcagatgtgataccaatactaattaataagcatggtctacgtccccttcttcttcttctttatttcaagtaagctggcatgtttgatcaacaccagatttgctgcctggaagtttt

SEQ ID NO: 12171 - DNA, 1150 bp, Artificial sequence
  DNA replication origin
ggtcatccctgggccactgcgagggcggagggcggcgccagggccctcccggtggaccccagtcgccgtcgtgacggccccacgcagcctcgcgcccggccgccgcctcgtgcgggactcgtgcccgcattcccacctcaccgggtgcagccggcccggccccgggctgtgcgaggcgacggcgcacacctcggagccctgggggccggggtcggcgggcggggccggggcgcgccctttgtgcgctcttagcggaaaccgcgcgttcccagaggagcgcggcccgccgagaccccggatcccgacgccaggaggtgctgcaggagcccgcgcggggtgggggtctccggcccaggcccctcggtacgggccccctgcggccgccaccctccgcctccgcgcggcggctcctttccggctgcatccggggggtcgaggcgtcgcacctggaaatcgcagcctgtgactttgtaaaaaagtgaatggggaagaaaaggcgctgagaggggcgatgggcggacgggccgtgcccaccacagggaggtcgcggcacctgtcgctcctggttcccagggcggcctgtcaatcacccacgctgggctcagcttgccgggagcgggggcacgcggggggcttcaaggcccagagctcagaggctcgcaaacaataaactcagaaacgtggcgcgcacccgcagggcctgacacagcctctggagtggcccctgggcctgtctggctgcagggttggttggccgtgggcgtgtgcggctcagggtttcctccacgccctttcacgaatgtccccacgggaccccgcgtccccccaggctgctccagaggagtcccggagagcgcggccgtggaagctttcgaacgcgccgtgcttccccgccgcccccgcctccctttctgtgagcatctgccggggagaacagatgtgggcacctgcggtgaccggctgcgtgcgttccatcccattcacaggcattcagacgtggccacaatgagcggcctttgtgtgcacagagtcactaaatatattaatctgtactccccagagcaccgggctgtttaatttttcactagcaataacatctgatctaatccttaaatcggctcccaaagccttccctccagcccaccccgcc

SEQ ID NO: 12172 - DNA, 962 bp, Artificial sequence
  DNA replication origin
cgtcgtgggttgggcggggagagaggcgcgcaggcgcggacagcggacgcggcgcgcaggcgccggcggcgtgggacgccgcggcctgttgccacagcaactgctctggtgctggcggacctcgggtcgcgcagtcaggtagctgcccgctggcgtcgggcgggtgccgcccttgaacctctttgttcatacactgtcctgcggcccggacggtgtcttgacgctgcatgccggtctttgtcctgccggaggcactgaggactggcggctcccggggcctcaggccgaagttgtgcgagcgcggcccaggcgggtggccctgaggccgggagcctcgcctgggccggaaacggggacagcggggggctcctgcacaggggacccgccgcgcgcttccccgccacgtttggggagggagcggggacgtcctggcgttcgaccctcgcctccgtatcgggacggcgcggccccagtcagcgctgagcacttctcggccgggtgttctgaccgtcaccattgttgctctggactactcttcagctgaaagttgtttcaggcaggtttgctagtccggaattgggtgggagagaattccaaggagagagaggaaaggcagaggcaatggcagtgagggagcaggatgcttcagaggaattccagtggctgctgtggatacatggtggcggggacaggggaacaggtgccacctgatcgtgcaggtccctgtcgtcatattcaggagtttggactctgcagtccacaatctcagtcttatttctgcagctgctctaagatggcgaaactcaccttcaggacatgctcccttgggctaggagatcaggtgggctccgggtgatgcgcaagtccacccctctagctgcagttccgcctttttctctacaaccaagcaaacattttggcaggcacgtgtgagtgacgaccttgaaaccaatctgatttat

SEQ ID NO: 12173 - DNA, 1281 bp, Artificial sequence
  DNA replication origin
tcgtcatccctgtccctgcgcagaaccctcctgccgagccctggtccgcgtcattgcgtgctccccgacctcgcgaccgtcgccttgcctgccccatcttgaggtcacctctgacccctactccctcccttaagatgtgtgtttggctcctatatgtcatttttgggtcagagctgttatccttcgtagctgcacgacttttctggtcgtctctagaagagagaggcatcctctgatctcttcacttttctcccatcatctgtgggctatccctgaatcagggccccagctcttgggggaaagacagacagaaagacagggttccctgccagcaaggagtttgcagacccgtgggataacactgagcgtcaagcagatcccacaatgtagaaagaaaagggtccctcgagggtgatttgcccaggagggtccaggaaatttccataaaggttggatttgagcagagttttaagtaggagttgggagatgaacgagagttgagagcctattcctggcagtaagaacataaatgtttaagacatgaaggtttcagagtcttgacatatttggggaactaggagttgagcatttgtgagacaagaaatgttggttagggatggggaatggcaggaaggaagctaaagagaatgtggggcaaggaagtgatgtgatcagatcttagcgttaaagagattcagtctggcagatataggggtggggatgagggtgactgcagacagacaaaaaggcttttgtcgtcgttcagggactggaaaccccgaaatggtagtggagagaacctggaggtaaagaagtgagagggtagtctttctgatggcttgagcccttgaatagagaagtgccgagagggaaaagcccagaatggggaccatatctggagcagcagggtcctaaccaccatctcctgagtatgtgagagcatcttatccgcagctgtactcccaagttcctccgtgtctagtgtcatgcttttgtttttgacctttctctggcctccccttcacataggctctttgacctgcccatctttggactttgctgttaggagccaccctctgccaccactacagccttcacactctgtgttctgataccttcttcatcccatttctgccatctcccagctccatcattagtgagtgtttcccctgactttgccattccttttgttttggaactctaattgagccttcttaccagttgtattcttgaaaagcaccaacaccatagctgggtcggggtcttcactgctcatcttca

SEQ ID NO: 12174 - DNA, 1543 bp, Artificial sequence
  DNA replication origin
tgaggattcctggctgcgattcagcctcagcacgcagctctgtgtgcctggctgttgttaactgtgcagtgctctggttaagcgaggctgggagtggcactggcgtgttagtaatccgcactcaccagcaccacgcgggctccccggcctctgtgcctctcggcaatgccgcacccatgggaagggaggagaagctcccgcccaccctccatctgtgcccgtgtcagggcttacgggaacatatgctgcctgttactcactgaccatctgttcacagagctgatgaagtgtcccggttaccctggcaacgaagcccttgattggcggcggctccacaaacatttgctgctcaggtttcacttttatctgtgctctggaatggggctgggtgggggatgctgaggcctgggggctggggatcagcaggctggggggtgggctggaggctggggaagcaggctggggtggtgggctgaggctgggaggtcagaaggctgggggatgggctgggtactgggggtcagcaggctggggggtggtctggggctggaggagcaggctgggggtggtctgagggcctaggggtcagcaggctagggggtggtctggggctgggggagcaggctgggaatgatctgggggctggggggtcagcaggctgggaggtggtctaaggacctggggggacagaaggctgagggatggtctggggctgggggagcaggctgtggggagcaggctgggcctgggggttctgcagctgggaggccaggctccccttctccattttcctttctcacctctctcccacctcctttccctcagcactcacccacctccagtccagcccttctccccaaagttcagagcaggtagagctgggaatatggctgaccagtctgagagctgggtgggggcttgttcttgttcacctggtgccacgttcttgttcacctggtgccactacctttttcccaaattgcaggctggagtctaagggctgaggattctcagcctcccagtccagggcagcagctgcccagaagccacctcacggcagtggacatctgtgcccccgttttggagacctggtgtgatgaggacacatgggctgcaattagctgttagcagggccgtccatggaccacagtcccaggaagacgttctgctcagttgctccggaagggacctagggtgcactgcaattgcggaggggtggttgctgctgatcccagaccccagagggagttcctgagtttttagcttgagttgaggagctgataatggaagctgcagcagcccgttcatggcagtcccaaaaggaggcaaaccacctcctctccgctaaggacatcggccaagtgctgaggccaaaggcctgcagatgaaccctagtgtgagatggacaggctgaggcacaacactagtgccaaactgagccttcgttcttttctttagcgagacctgggattgagcgtcacaaagtctagattctatttattccaccgtctcacagtctggtagcacatgtctgtggggagcc

SEQ ID NO: 12175 - DNA, 980 bp, Artificial sequence
  DNA replication origin
ctccagaacctgcagggctcagtccaccaggagggtgctgctgaagcctcgccatcccccccggaggcactgtcccctgcctgggcctgcgcgtgggctgtgctgggaccctccacatgcacccaccctccccagaaaccctgcaggacagggcctgggatgggcaggagcccggtcacatcccccctgccacctcaatgcctgggaccccctcagtaggcacctgggccctgcaccctggtagcaggtggacggcagcatcctgtgcctgtttctgtcttcagtgaatgtttaaaaagctactggaaccacatccacgggtgcacccagcaggaccagggcaaggggtcccagccccgagtcagtgtcacccccactctcactgagaatgcccagtcccccggggccaagagcagacgcagcctgacagagttggcggcagatttaggcaaagtctgacacctgcgaaggctcttccttgatggggcctggaagagtgtgtgagagtgtcagtgtggggtgaggctgtgtgtgagagtgagtggaacagtgagagtgtgtgtgttagtgtgagtgtacgtgggagtgagtgtgtgagtgtgtgtaagagtatggaagagtgtgtgtaagagtgagggtgtgtgttagtgtgagtgtatgtgggtgtgagggtgtgagtgtgtgagtaggagagagggtgtgtgtgttagtgtgagtgtatgtgggagtgagggtgtgagtgtgtgtgtatgtgtgtgagggtgtgaggtgtgagtgtgagtgtatgtgtgtgagtgtgtgtgagggtgtgaggtgtgagtgtgtgagtgtatgtgtgtgtgaggtgtgagtgtgagtgtatgtgtgtgagtgtgtgtgagtgtatgtgtgtgaggtgtgagtgtgagtgtatgtgtgtgtgaggtgtgagtgtgcatgcgtgtacacatgtgtgagtgaggagcccaggatcccggctg

SEQ ID NO: 12176 - DNA, 898 bp, Artificial sequence
  DNA replication origin
ttgtgggactcctttgtctagagtcatacacctgagcagcctccctggtcccatgaaggtactactccatcacccacccttaattcctagccctgctctttgtgcctatttctaatgaggaccaggaggtaaggaggagaggagaaggaggtgaggaggagggggggaggagaggaggagaggaggtgaggaggggaggaggaggggaggagaggaggaggaggggaggaggggaggagaggaggaggaggggaggagaggaggaggaggggaggaggggaggagaggaggaggaggggaggaggggaggagaggaggaggaggggaggaggaggggaggaggggaagaggaggggaggaagagaggaggagaggaggagggcaggaggggaagaggaggaggtgaggaggggaagaggaggaggtgaggaggaggggaggagaggaggagaggaggtgaggaggtgaggaggagaggaggaggggaggagaggaggtgaggaggggaggaggagaggaaggtgaggaggatggtggacatgtgagtactgaggctcccggatctcagaatccatgaaaggcggatttgtagctgctcctcttcctcacacctgccagtcaccatgtcctgcagatctgcctcctaagcacctctcaattcaccacttttctccactataactctctttttaatatttatgtatttatttatttattttgagacagggtctcactgtgtttcccaggctggagtgcagtggcgccaccttggctcactgcaacctctgtttccctggttcaagcgattattctgccccagcctcccgagtagctgagattacaggtgcgtgccaacacgcctggctaatttttgtatttttagtagccatggggcctc

SEQ ID NO: 12177 - DNA, 2664 bp, Artificial sequence
  DNA replication origin
gagcatagaggttgccagacggctgttcctgctcctgctcttttagtctctcctgctgagccctcagatgctggtgtgcccaggttctttatggctcttctctcttccccaggaatttcacccagacccaagctttaaatctacaacaattcagcacctaaatggctgttttcagtctattaatctgccattcacttcctctttcatttattaaataaatcaccaaagatttatggggtttcttgcataccaggaaagaaagggtaggaaaaaaagaccacatataaagtattgaatagtctaatgaagagaacagaacaatcacataagcaacaacagaaagacactaaatgccataagcaagttacatacaagatctgtggaagttgggagaaggcagaaattgttttatcggtagcatcaggaagggtttcttgaagagggaagttcattcactcagcagaaatttattggacacccactatgtcccaggcacacaggcatttaggagggacccaaaagggtgaatcgaattttgactgggttggaggaactacagaggggtggtgaaaaggaggatggggttggaggaattacagagcggtggtgaagaggaggatggggttggaggaactacagagcggtggtgaaaaggaggatggggttggaggaattacagagcagtggtgaagaggaggatggggttggaggaactacagagcggtggtgaagaggatatggggttggaggaactacagagcggtggcgaaaaggaggatggggttggaggaattacagagcagtggtgaagaggaggatggggttggaggaactacagagcggtggtgaagaggaggatggggttggaggaactacagagtggtggtgaagaggatatggggttggaggaactacagagcggtggtgaaaaggaggatggggttggaggaattacagagcagtggtgaagaggaggatggggttggaggaactacagagtggtggtgaagaggatatggggttggaggaactacagagcggtggcgaaaaggaggatggggttggaggaattacagagcggtggtgaagaggaggatggggttggaggaactacagagcagtggtgaagaggaggatggggttggaggaactacagagcggtggtgaagaggatggggttggaggaactacagagcggtggtaaaaatgaggatggggttggaggaactacagagcggtggtgaagaggaggatggggttggaggaactacagagcggtggtgaagaggaggatggggttggaggaactacagagcggtggtgaagaggatggggttggaggaactacagagcggtggtaaaaatgaggacggggttggaggaactacagagcggtggtgaagaggaggatggggttggaggaactacagagcggtggtgaagaggaggatggggttggaggaactacagagcggtggtgaagaggaggatggggttggaggaactacagaggggtcgtgaaaaggaggatggggttggaggaacaacagagcggtggtaaaaatgaggatggggttggaggaactacagagcggtggtgaagaggaggacggggttggaggaactacagagaggtggtgaagaggaggacggggttggaggaactacagagcggtggtgaagaggaggatggggttggaggaactacagagcggtggtaaaaaggaggatggggttggaggaactacagagcggtggtgaagaggaggatggggttggaggaactacataggggtcgtgaaaaggaggatggggttggaggaactacagagcggtggtgaagaggaggatggggttggaggaactacagagcggtggtgaaaaggaggacggggttggaggaactacagagcggtggtgaagaggaggatggggttggaggaactacagagcggtggtgaagaggaggacggggttggaggaattacagagcggtggtgaagaggaggatggggttggaggaactacagagcggtggtgaagaggaggacggggttggaggaattacagagcggtggtgaaaaggaggacggggttggaggaactacagagcggtggtaaaaatgaggatggggttggaggaactacagagcggtggtgaagaggatggggttggaggaactacagagcggtggtgaagaggatggggttggaggaactacagagcggtggtgaagaggaggacggggttggaggaactacagagcggtggtgaagaggaggatggggttggaggaactacagagcggtggtgaagaggatggggttggaggaactacagagcggtggtgaagaggaggacggggttggaggaactacagagcggtggtgaaaaggaggatggggttggaggaactacagagcggtggtgaagaggaggatggggttggaggaactacagagcggtggtgaaaaggaggatggggttggaggaactacagagcggtggtgaagagggggacggggttggaggaactacagagcggtggtgaaaacgaggatggaggggctgagggaatagtaggtaaggcagccagcaaagtgaattggttctatcttctgacaacagggccctggttgtcctctcagaaactactgcttcct

SEQ ID NO: 12178 - DNA, 917 bp, Artificial sequence
  DNA replication origin
cggccgcgcccagccatgccggccgcccgcccaccttgctggggaactgctcgctgcgcagtcgccacgccggcgccgactcggcgaagcccagctccacaggcctggccccggcggcagccatgcggggcgcgggctggcgtggggcgcagcccacagctgggtcggaaggcggaaatcgggcgccgggccggaaggcaagaggcgggcacctttccggaggacaggaggcggaaacgcgtctgacgggagcggttgcaggaccaatgcgagggaacggggcagaggaaacctctcggcatcagccccgcccctggcgcctctgcctccgagccgctttcctggtgcctccgggtgctctgggatggttctggtctttgggagagtggcagctggtgacggcgctccgctcacctctgcacatgtcttgctgtgggcctgcgggtggccgccagggaggcagagccctcccgcaaaccttccctgctggtgtccacctcagggtgtgggaaacctgtgcgctggccgagtgctaaccaagagtaggcagtgaaagacaaatgaaggttgaacaggtaaagtgaggaccctacagcggaaaccaagaatcctgtgtgcctgagagtaatgaagaagcctctgcagaagagtcttttctgtcagtcttaaggtctctgttttaatgttagtgctggcttgctgtacctgaattccaagggaggagtgtataatgaggcatggccaacccccacttcccatcattgcctgaactagtttttcaggttaacttcagaatgcccttgggcaagcagagggtccatcagtcggttggagggtttagaattttactgttggtttgcaaaggtctgaaagaaacatgtaccacctgttctctttaaggagttctacttaggagg

SEQ ID NO: 12179 - DNA, 1063 bp, Artificial sequence
  DNA replication origin
ggcgctgccggagagctcaggagcaggggcctgggcctgctccggggggatccgcccaccccaccacagcggcctctcctgaggttccctagtggccgcgaagggtgggctcagggtgaggggtcaggccacaccagtgggtgcagggatggctgcggccacgggagggcgtccagggaggaggccggagctcaggcccactctgcacacccagcccgccacctcccccggctctctcttccttcgtgcacattctggggctcatgcttctgctgtggtcccatttagccaacctggccagcctttcatgcctgcttcatgggtgagacgtggaggccaggtcagccgcagagcccggggcacacgccgcagccagcacagcagcaggtgggcgtctgcggccggggccagcgcggggcccactgggcctcggaggggcctccctgccgactctgcccccgtcctgtggccgtaagtccacccggagcgctcgatcttccgtccaccaggccagggatgcacgcagagtaaggatgtgtgtgtctacgcatgtgggggtgtgggtgtgacggggtgtgtgctgtgtgagaacgtgtgtgtagtgttcacatgtcctctgtgcgtgagtccctgtgtgtgatgttgtgttctcggtgtgagttcatgggtgtgacggggtgtgctgtgtgagaacgtgtgtgtagtgtccacatgtcctctgtgcgtgagtccctgtgtgtgatgttgtgttctcagtgtgagttcatatgtgtgacagggtgtgctgtgtgagaacgtgtgtgtagtgttcacatgtcctctatgtgtgagtccctgtgtgtgatgttgtgttctcggtgtgagttcatgggtgtgacggggtgtgtgctgtgtgagaacatgtgtgtagtgttcatatgccctctatgtgtgagtccctatgtgtgatgcccgtgttctcagtgtgagttcatatgtgtgacagggtgtgctgtgtgagaacatgtgtgtagtgttcatatgttctcggtgtgagttcatgtgtgtgacggggtgtgctgtg

SEQ ID NO: 12180 - DNA, 1236 bp, Artificial sequence
  DNA replication origin
accctccctgtgtgggatagaaacacacatcgtcacagccaggaggtcagtcgggtgagggtctgctttgcttacaaggtccagaaacccagcagaaaaccctcgaggccacatcagtgaagagtaacttatttcagcaacatttccatgtgtgacacaagacacacatttcctgcatccacctttaaagtcaagaagttgaagctgaataaagccagcaggcagcgaaaatcacctgcactcagttcagttgtggcaggaaagggaaagagccatgaagaaaggagagggggatggagagggagaaaggagagggggatggagaggagaaaggagagggggatggagagggagaaaggagagggggatagagaggagaaaggagagggggctagagaggagaaaggagagggagatggagagggggatggagagggggatggagaggagaaaggagacggggatggaggggggatggagagaagaaaggagaggagggtggagagcgacagctgcagagggaggcagggaggctggctgggcgtggacagctgcagagggaggcaggggaggccggctgggcatggacgctgcagaggggacacagccactctgggaacagcagccagtggcggatctgcctggaatgctgttccctcctgtccaggatgggcctgtctctgcagacaggggccctccccttcctggcctggctgtgcacagcctatgtgcatggtggaagctctgcagaggccgttctgctccagagtggggcatagcctcgggcgaggttcacagcttggggggctggtcctgccctgtcccacatgtggctgtgtgggcagcatggatcttcttccgcggtgaccctgtatgcccacccccgccaacttatgcctgcttcccaaggccatgggcctcaccctcagacttcacttttgtgtatatggaaagacacaattatcgggacagaaacagatcagtatttgccagtgggtgagtgaggggagaggagtttactaccgaggggccgaactggggccatttttgagggatgaaagtcttctgtgtggctctacagagttgggtacgtgatgctgtgcttgtcaaaccccacaggactggacctcactgtgggaacaacaagatcaacaagaggagcaagaacaacatcaagagtcagggcccgggggtcctgacgggtacaggatgggtacagacccacacaggaatccc

SEQ ID NO: 12181 - DNA, 1935 bp, Artificial sequence
  DNA replication origin
tcttctaagagtggttttgtatgaatccattaatatgctgtattacattgattggcttttggatatcaaatcaaccttgtgttcctgggataaatctcatctggttttgcacataattctttttatatgttgctggatttgatttgctagtattttgtggaggatttttgcatttatattcttaaggatattggtctgtggttttcttgtaatgcctttcatctcaaagtattttctaatttccgttgtgatttcttctttgatctgttggttatataacagtgtgttgtttattttacacattttggtgaatttctcaaatttccttctgttattgatttctaacttaattccattgtggttatggagcccactttgtatgatttcagtcctttgaaatttattgagactttctctgtggcccaacatgtggttcttcctggagcaagctccagcacacttgagaagtgtgtgtgctctgcggttgctgggtggagtgctctgcggatgtggttgctgggtggagtgttctgcagatgcggttgctgggtggagtgctctgcggttgctgggtggagtgctctgcggatgcggttgctgggtggagtgctctgcggatgcggttgctgggtggagtgctctgcggatgcggttgctgggtggagtgctctgcggatgcggttgctgggtggagtgctctgcggatgcggttgctgggtggagtgctctgcggatgcggttgctgggtggagtgctctgcggatgcggttgctgggtggagtgctctgcggatgcggttgctgggtggagtgctctgcggatgcggttgctgggtggagtgctctgcggatgcggttgctgggtggagtgctctgcggatgcggttgctgggtggagtgctctgcggatgcggttgctgggtggagtgctctgcggatgcggttgctgggtggagtgctctgcggatgcggttgctgggtggagtgctctgcggatgcggttgctgggtggagtgctctgcggatgcggttgctgggtggagtgctctgcggatgcggttgctgggtggagtgctctgcggatgcggttgctgggtggagtgctctgcggatgcggttgctgggtggagtgctctgcggatgcggttgctgggtggagtgctctgcggatgcggttgctgggtggagtgctctgcggatgcggttgctgggtggagtgctctgcggttgctgggtggagtgctctgcggttgctgggtggagtgctctgcggatgcggttgctgggtggagtgctctgcggatgcggttgctgggtggagtgctctgcggatgcggttgctgggtggagtgctctgcggatgcggttgctgggtggagtgctctgcggttgctgggtggagtgctctgcggttgctgggtggagtgctctgcagatgcggttgctggatggactgctctgtggttgctgggtggagtgctctgcggttgctgggtggagtgctctgcagatgcggttgctgggtggagtgctctgcggttgctgggtggagtgctctgcagatgcggttgctgggtggactgctctgtggttgctgggtggagtgctctgcggatgcagttgctgggtggagtgctctgcggttgctgggtggagtgctctgcggatgcggttgctgggtggagtgctctgcggttgcggggtggcgtgctctgtggttgctggtggcgtgctctcatgctctgcagatgccggccaactgatccaatctgacatttctttgttgatcttttgcctacttgttctactcataacgaaagtgtgttattgaagtccccagtttgttgctgaaccgtagtcttgcctttttcctcagacttagaatctgtgtcgaaacttcttgatgggaaacatgtgattggctctcaggtctcag

SEQ ID NO: 12182 - DNA, 1482 bp, Artificial sequence
  DNA replication origin
caccaaaacatgactttataaagaagagttatttctcaaactgggagaaatcactgcatttggtcaaacaattatatatatatatatatatatatttttttttttttaacacagagtcttgctctgtggcccaggctggagtacaatggcgtgatctcagctcactgcaacctccgcctcctggattcaagtgattctcctgcctcagcctcctgagtagctgggattataggcgcgcgccaccacgcctggctaatttttgtaattttagtagagacagtgtttcaccatgttggtcaggctggtctcgaactcctgacctcatgatccacccatctcggcctccggaagtgctgggattacaggggtgagccagcacgcccggcggatttatatttgtaaaatcagctctgctctgctaaacaaataattaaagaaaaggtgaacacaagacagtgtagactgtttaggtggcaccaagagaaccagggccaggggttgagccaggatgaacaccaggggtcaaggccacagccaggagggccaaggtgggtgccagctgttgtgggtgaggccaagccggagtgggatcaggggtgacactaatccctggaggagagacaaagagggggatgggggctcagggagttgggccttgagggacttgctatctgatgaaaggacggacacgacccaccagatgaggtggacgggcctggtaagtgcctgtcaagggtggtgtggaacagagagggggctcctgtctcacagtgggcagcagcccagcgtctttgagacggcgtggagatgggcctagatcctagatgctgagaggaggcgtccacacggctgagggaggccaggcagaggccatagtgtgggtgaaggccagagaatgggcgagctcagggaactgggggcctcggggcagagcccggagcagaatgatgggtgtgggtgcaggtggggcacaggctggaggtgttgggaagaagcctgcgagcctggtgctgagtgcctggctagcaccgagttcacccgaggagctcctgagtgtggaggggagatggggctggaccgggacactggtgagtccattcctggatgggcagaactcagccacagagaccagccagcaggttatgggaaagagcccctgtggagggcaaggagggcgagggagggaaaagggtctgcttcgctttttcccgaggacgttgaaggaagggagagggcttatggagaagagcaggcctccatgtccagagcaggaatccgaaagtggaatgtgtttgccagatattctctctcctctgtctctcccacttctctctgcctgtatctctgtctcctctttgtctctccctctccctctctgtctcctctttgtctctccctctccctctctgtctcctctttgtctctccctctccctctctgtctctgttctcgctgcaggagcccgtccatatccctcatcca

SEQ ID NO: 12183 - DNA, 1036 bp, Artificial sequence
  DNA replication origin
cagactgtgctcaacactccaaccattatctcgtttacctcagaaacgtccctaagctgcgggcaggggcagtgtcgtggtgaccgttcctcccttttccaggcgactaacctggggttccagaggtcggcccttctttgtcctggtggacggcctaaggccgaggtgtccgacccgggaccgagtgtccctgtcacaggagactggctgacacctgcatgcagtttattccagccaagacagccacgccaaaggaccacgccgacgggaggagaggtgggttgaggtgtgccagtcaggtgagactcaggtggcaactccacaaaatgctggagttaacagcgtgactcacagatccagagagaagagggcagccccctcgcagggctggtggtgggaacggggcgctgtcttggacgcacacagccagagggacaggggctgtggtcaaagccttcactggggtccagggtattgcccaagcaggttcccacaggaagctctggtgggtgcactcagccagtgggccacagccccacgaggtcacactggaactgggaggggtctgctgtgggacagctacacagtccttgcagggtgtggggtctgggcgagtcctgtgggctgtcccatagcggggtggtcaccaggagacgtctgagtaaggcaggtgtctggagggaccaccctgagatactgggggaaggcagagaactggaaactgtgtcaagggtgactgagccccgattctgggaggacaaagccccaaatgggtgctgagggaacacgacatcgtaagaattccgcacagacgcttcagtgctgctgatgagagagggcgtcaggctgtgagcgtgtcagagtctggggggtgtaaaattattgcacgtaaataatcaggaaacagctgcctagaataacctttatattggaaagtgtgctttgaggtcattatgccagattttatggccatttcttggctgagccctgggatggcttatgtctttgcagaaaggcatcatcacattttatgaat

SEQ ID NO: 12184 - DNA, 2223 bp, Artificial sequence
  DNA replication origin
gccctgcacctcaacagccagccacaccaggcatggccgtcacctacaggtgaagctacaaatttaacctcatataagggaatataaccatggccaaggagcgaggcaaggctttttaaacaacatgtcaacagcacaaatcagaggcaagtgagaaccaagttttaaaaagatgaatgtggtataatcagcattaaagtttcctgttcggtctgggactccttggaccaagcattactgggaggcaacctgaatgccctcggtgtgagcgtggaaagatggcagcttcaaggctgggctccgcagtggggcaggccccgccctggacgagcacgcggccacacagagggtcctcttgagcacggtgactcccgtacccgtaacagtcaggccgattcttcaagaaaacatacaaactaaaagatgtcaaacacagcaaattggctgcccatggagaagggtgggaaccaagagaggcactggcaggaaaggggaccagtcggtgagtggagagaacctgagggtctgtggggccagctttcccaggtgctaaggaacaggacctcagatctctgaagctaagggctgggggagcagaggagggaagatgggaaagagggagggaggagtagggagggagtgggaggtggagaggaagggaggagggaggagggaaggagagaaacggagggagggaagagggcggaaaagacagggaggagggaaggagaggcaggagggaaggaggggggaggaaatgcaggaaggaaggagaaggagcagggaaggagagaggacggagtaaaagggaggagaaaaggagaaggagggagggaaaggggtggagaggggcaggggaagggcagggaaaggcggtgataagaaagggcatgcgaacctgataaagccagaccagggtgtccgatgtgcatccatttcctctgataataggctcctccccaatagcacaaacaataaagaggaaaaacacgatactattttaggaatggaggtaagtacgtgagtggagattccagcatcatttgaagatgaccaggcagcccgcagcagtggggacctcagcggccctctgtgaacccagggtcccaaacacgcatcgggagacccagcagtggatcctgacaggtacatcacacctggagtgggaaatgcctctctcttcaagaagccgtgaaacctcttctttaacttgaacttatgtcaaatcccaagaacacttagaccatattctccagccaaaatccacaaaaggaagaaaataatagcaattgtagaagcagaaaccctaacatcctgaataacaagtaagcaaacaaaatgcctcttgaacaattcttgggtcaagtgggacaacagagtccaaatttcagaaccaccacaaataacaattatggaatatgatctatcagaacccgaacaatgtgactaaaactgtctcagagaaaaattcacagcgataacaattacgttagcaacaaccaaatacaaacaagtaaattattcattcaactgacaaaattagactcaagaaaataaaaagaacaggataaatgtaagaaccaagaagaagaaaataagatggtaaaagtgtgtgatttgaagcaggagactcaaaagcgtgctcgtgtggtgggcctttgaaattcaccagtgaataagcctgtgtctaccctaattcaggaactgtgaggacggcatggacacacacgtgcacacgagtctaacgacatgggaaacagttacgacagaagcacacacaagtgcataatttacagattccatgcaaatactttaaattctaaataatatgggtgattatcccaggcaaatatgaattgccccaactaaccaaaaggaaacagaaaagtaagcagactattattaaccgcagaagaaattgagaaatctattaaaacccagcccactcacctccgaaattctacgcccagataaatcacaaattcactaattcaaaatgctggtgcaccaatctttacaatatgattaaaatttcctattcatgagcataaagaaagaaaaccctgtgttcttcttaggattccagcataatatttgcaccaaaacattgaaaagttgcacatacacatgaaatgaaacataccagctatggtaataacgtcctcacacattacttcatgtggcagattaaagactcacacgtgtaacgaccacctctcggct

SEQ ID NO: 12185 - DNA, 1086 bp, Artificial sequence
  DNA replication origin
gtggcatgaccgtgtgccacacgccgctttgttcactgaggcggactcagaattcctgtcatcgtcctctgctgctcacctggccgtcctcggcacctgggtgggaatggaatttgaacactggcgtgattgtgggttggtatctcagtctggggttctagaagcaaacccaagacgaggatttgtgtggaagcagtataaataaatgatgtgttccctggaagacccctttgtgggaatggggggtggtactgggtggggaggaggccgcacgctgtgggggtcactccggctccatctcatggaggaactgggaggctgcttgtcactgctcacaggtgtgccctttggtttggggggtgctcaggtgctctatgtcttatctgtcattcactgtctgagggttataaattcccagacagcgtagccctccaggagctcagcgaaccccagggaagaggttcctgtggccagagggcagcccctgcaagattcagaagccggatgctgggactgagagacctggggctcgggggcctgcaagattcagaagccggatgctgggactgagagacctggggctcgggggcataaaaatggtcagtggatacagagaaatgtgggcagagtcctcacggcatctgctacgaataaagtctgaaggcgccacagcactcagaagggccgggtgtgattctctcctgggtaagtgtgtgctctcggtggggtcagctgacggagactgggacagaagcttagtggccgctcaccactgtttcgtcccagccgcgttcacctgggtgtcagctccagcaacctgggcaaggatgggggaagagcattctgtcccgtgggtgccgcatatgctcaggccatcagctctaccccagtgggtgcaggctccctcctctgcactgagcacctcgccccgtcgtcctgagccctccatcgtctccactttgggcaaaggccaggggctgcttggcagggtcttgagcaatggaaagggaccagcaggctgatcgctttccctcctccctaccttagaacaactcaaggtgcaggggccccgacggcctccctgag

SEQ ID NO: 12186 - DNA, 1410 bp, Artificial sequence
  DNA replication origin
ccgtccgctcccttggcgtcgtcttgggccgcgccccgaccccttctgtttacgcatgcgcaggagccgccctgcgcgggtggggggctgagcccctgtggcttcaggtttaaaggcgcgagcgccacccacgcaggcacaagggctcctagtcgttttatttttagcgtaaggttttcctctttaacaaggaagtaaaaaaaaaagttgtgcaataaatattaatcgtccttatatgtactcgggaacgttcgtcctttaggttttctcctggcgcatgggcgccgccaatcatttcggggcttattttggttctaaagcccggggcagccaggcctccctgcctggcctcggcggggacgcgggacctggggccccggaccgggcctaaccgccctggccggtccccactgatggtggcggtcggtcctgatcgtcctgatggcagcgaccaggctggactcgggctgtgcaggggcgaggggagcagggcggggtgacgcccggagagcggcctggagagcgcgtgcttcagaaggcgtgggcaccctgtcccctttgcagatggggatgcaggccctggtggcggtggaggggagatgggggcagggacgttgccgggcagaggaagctgggtgagtgtgcacttggtcccctttgctcctccctgggactttgggctctatagggcagcctccgaggcccacgtgcacactcggtgaaccacagtccagacacaggcagggcggcaggccagggaaggagaggccaggtgttggtgcatggagaggccaggtgttggcctgggggtgctaagtgaacccccaaggtcgcggagacagtagggcaacagcaaaacgagctctgccgtccagggcgagggcccggagtcctccccaggggtgggctgcagagaagcccctgtccaggccctgctcacctgcaaagtgctcccgagctcctgtgcccccagcagcaatcccagccccgctgacacccaagcttgtcacccgctgggtttcttgaggtctgaggaccgtggctgagggtgcatgggcgctgggatggagggggatgtcctgtcccagtctgtgcttattaattgttaaagagggcaaggctgcttttattcaaggtgggggggctgctaaagcgagatgttgggttaggggaggcagatccggctcaactccagatagaaaaagtgggaattgacagcccaggcgtagggtcgggagtggagagaaaattactaagaggaagggtcaggggcaaggcgggttctagctgcatagacaggatttttgctgaaaaggcaggcagtgtggtcacagaccgagggtgggagttgaggactttgatcagggaccaagagtagacgattttcactaaaccgactcagcaggattc

SEQ ID NO: 12187 - DNA, 933 bp, Artificial sequence
  DNA replication origin
gtggttgtacaggcccttgatggggacagcttcaaacgctgctgtcccacgcacagagctgagactttatgtaaattgcgagatggcagcagtgcccgtaacggcggttttccttgtctgttgctgctcagcagatgaccctggcctggatcctgaacaacaggacgacttttttctgtggccgggcggcctctcccgactgcgtggtctccaagctcactcgcatggcggctggtgggattctctcctggggctgccggcactgcctggggttcctgctgcatgcgcctctccgtggggcccctcacttctggatactccccagaggacgccagcaaaagggtaagacaggccacaggtgtcccagcctcagcccaggggaggcaaggcagcctcaggccacccccgggacaggctgcatggggtggacaccaggacatgggctcacatggccgacatgcacatggtctgccatgcgccccagatgcccactgatggcagagcgggtgcacagcctgtggggtacacacaggagaatctggacaggagtgagaagtgaggaccccgccactctgacatagctacgacaggacttgtctcagccatgatgctgagaccaaagggcggacccaaagaggacctgtccatgttccgtttgtagaaaatcctacagcagccgaaccaatccacagtgtcagattcagagcagcatcagcgagaggaagggggtggtggatactgacgaaccaacccttgcgggtcctgtcagcgcccagcgagtcaccggctctgtctctcgcccctcctgagagaccccaaaggtctcatctgaagtaggtgtttgtggccttgtaaatctgctcagcctctttggaaatcaagactcacaagtgattcactctcaccaactcgacaaggccattattcgatgga

SEQ ID NO: 12188 - DNA, 848 bp, Artificial sequence
  DNA replication origin
tttctcaacataatattagtcaaagaagttactgagtaccttcttggaacttgaaatatcctcctgaagacaggaagccagaggcaggagaggaggtgtgagccgtggggctctggacctgagagagctccccctggaaagcagtgagagaagggtgcaggcttgcagtgagaaaagggctgccctgcagcgccgtggccctgggcttgtgcgtccacacgcaggcactccgggcgccctttgcgcccaggacacggaggggaggggacacggccttccgtgtgggtgtcggggaggaggccggggtggccacaggtgggcgtgcgctgctgcaatgaaaccagccgtgttgagtggctacactggagagagctgcttcccagacaaggggagccgggaggggggtcggggagccgggagggggtcggggagccgggagggggtcggggagccgggagggggtcgggcagcctcaggacggccaacccctaactgtgaaggaggtggttgtacaggcccttgatggggacagcttcaaacgctgctgtcccacgcacagagctgagactttatgtaaattgcgagatggcagcagtgcccgtaacggcggttttccttgtctgttgctgctcagcagatgaccctggcctggatcctgaacaacaggacgacttttttctgtggccgggcggcctctcccgactgcgtggtctccaagctcactcgcatggcggctggtgggattctctcctggggctgccggcactgcctggggttcctgctgcatgcgcctctccgtggggcccctcacttctggatactccccagaggacgccagcaaaagggta

SEQ ID NO: 12189 - DNA, 1195 bp, Artificial sequence
  DNA replication origin
gggggagagggcccaggtcagcccagtgcggggggagagggcccaggtcagcccagtgcggggggagagggcccaggtcagcccagtgcggggggagagggcccaggtcagcccagtccggggggagagggcccaggtcagcccagtgcggggggagagggcccaggtcagcccagtgcggggggagagggcccaggtcagcccagtgcggggggagagggcccaggtcagcccagtgcggggggagagggcccaggtcagcccagtccggggggagagggcccaggtcagcccagtccggggggagagggcccaggtcagcccagtccggggagagagggcccaggtcagcccagtccggggggagagggcccaggtcagcccagtgcggagggagagggcccaggtcagcccagtgcggagggagagggcccaggtcagcccagtccagctgaggctctcggaggacaggacccgccccgcgctgccagtgccgaagcttgggttctctgaggactgcgagggggtctcagcactgtgtccacagatggggcagggacctccgcagggaaccttctctcggctgggccagcccaccccaggggctgtagacgagggagttaatgaacacgggatgggttgagccgcctggtttgcccacagaggggcgaggaagggagtggggagtctgctgtgagcggagagaggacagcctgaggcctcaggaacgctggctgcctgcctgcagcgggagctaacggggcgtctgtcgggaaggggcacggccacaggatttaggggcagtttggacacactggtccggtgagcttgatttcagattccgggatctggtttcggagtggagttgtggactctccaggacccatcgctgaggagcaggaggttctccaggggccatggggcccggggctctgagggaggctctgcactcccagcatgaggtcaccacagggctaggccagggcccagacacagcaagccaccaagaggaggccggccggcgtggaagcctcgcagagggtgaattccaaagagggcccctcctgctctgagacccacactcccgagccacactcagcaggtgacgtgcaacaagacccttagggttagggttagggttagggttagggaccccaggctccatgcatgccagggagaggcagcggtgtgcgag

SEQ ID NO: 12190 - DNA, 1001 bp, Artificial sequence
  DNA replication origin
gtggggccaggctgtgggctgcgtcctgagtgagggggccgtgggaaggctggggacagagggacgacgctgggtcttgggtcgggagaggctcacctaggggccgggtggatgggtctaaggagggctaagggcggggcagggagagcagctgtgtggtgaggacgaagggaggtcggccagagcccccggggaagggctgttgtcatgtggatgagctgggaattaggaaagcttgtggattgcgaggcctcagtatgcaaagccctgggacagacgggccccccaggaatgaggggggcagacgggctccccaggaatgaggggggcagacgggctccccaggaatgagggggacagatgggatccccaggaatgaggggggacagatgggtcccccaggaatggggggggcagacaggctccccaggaatgaggggggcagacgggctccccaggaatgaggggggcagacgggcttcccaggaatgagggggacagatgggctccccaggataaggggggacagaagaccccaggcctgaggaccaggcctgccccctggcaccaccagacaccaggagggcactgctgctcttaattgaaagtcttggtgcaggtgagggcgtggaggattcctgggggaagcttcgtgctgcaaggtggaaaagacagataacaagagaaaaacagaagcttaatagcatgtataccttggtctgcaagggacggactcgggacaggctatgtcgcaaaggcgtggcttggagctcagccttaaagaccatgttcgacggaaacaaagagaaagagtgtgtggggaggggcccaagaaattaccccaaactggggtcaggccttctccatggatgagcgtctccggtgacttacaggcggccttctggcccagagagggggcaccctggtgagcgcagatgcctgtacggatgtgactttctctcatagaacagcagcttccactcttgttttcagaatttctc

SEQ ID NO: 12191 - DNA, 1313 bp, Artificial sequence
  DNA replication origin
tgtgtgtccatatatctgtctatgcatgtatcatctgtgtgtctgtgtattgtgtatccatgcatatatccgtaactatgggtatgtctgtgtgtgtttgtgtccacgtgtgtgtatctgtgtgtgtctatatatctgtgtctatgtgtgtgtctgtgtccacgtgtgtgtatctgtgtgtgtctatatatccgtgtctgtgtgtatctgtgtgtatctatgtgtgcatctgtgtgtgtctgttttctctttgtttttatggtgtccacggatgggccgactgaaccaccaaattcctcctcagagcccagtaaaggcaccaggcggaagggtctggcggagggttggccgctgtctcctcactcctcagcggggtcctgtcttccgacttttgtctcgcgccgccgcagcctgtggactcctgggccctcctctgagagcctgcgctgtgcctggccccgggcggaactttgaacgaggctcctgtcttaactcgactgcttgtgcttgggggagataaacaataaacaggagcagaagaaagtgtcctcagaccacggcgggtgctgttgggaaaacagtggcggggcagggaggggggcgcttctgaaggacctggcgaggtagaggccactgttctaagaggcaacagacgagatgaaccaggaccctctgcgagggagggaggcgtccaggggtgcacacgggtccagatagctgccgggctcccaaaaaccactctgggggtgaggatgggaggggagaggagttgggggcaggaggcaagtgaaagtaagtgcccagggaacctccatgaggccccccacaccggataatagtgttccatggggtctgctcagccccatgtctgccccaagacactagccacagctctgcgtcgaggtcctgtagaccacgggagagatgggggggccaggagcctatagaactccaagtccaaggggacccttgctgggagaacacaggccaagaccttccttcctgccacaggcttctgtccctgctgtctgctcccccaggactccccccacacccgggatcttcctcctcaccctccttggcctctctcagtgaccctgtctacacacagatgtgctgtccatgtgagtggaaggaaggaaggatgaggtccactcacaggggtgaagctgtctcctgagggggcagcccacctccaggtcacaccgccccacccaacacagcctccagtccagctccaggtgggccgcacccagcccttcactcacttcaaatggcccaagacgcatggattccactggccagccggactg

SEQ ID NO: 12192 - DNA, 882 bp, Artificial sequence
  DNA replication origin
acgcctctgagctccgggcccgctaaggagagggctcctcctgcccgcggtttgcagagggaagcggcggagaccgggagggcgcgctcggttctggccaggccagcagctgcggccgagtggggggctccggcctggccgcttcctgggaccccctcccgcccggggccgccgccgccagctgcagcctctcggctcctccccagaggagcgcggggccggggcccaggccaagtccctccccggagccgcggggcgtctgcgccgccggatgagctccccgccgggcggcgaccccgtgccccacgcccgtctcggcaaggaggaggcggaggcggccccgcgagagaggcccaaggagcgactgggcctggacccaggggacgccagggcagcggagctcccggcaccggtcccgtccccccccccccgcccacccgcgggacgcgcccgccttaaccctccaggcgccgggcccgctgggggcgctgagaggggctggtgtgccgggggcgccttcctgcttggggccgacgggggtgtgtgagtgcaggcgtgtgcgtgtgtgtgcgcatgtgtgtgtgtggatgtgcgtgtgcgtgtgtatgcctgtgtgtgtttgtgtgtgcgtctgtgtgcatgtgtgtgtgcacatgcatgtgtgttcacgtgagtgcatctcatctgtcacccacaaccaggggagcggtgcttgtacaaccagctggtggcttctgcaaccagcagcttctggccgtgcagctccctgtagggaatatgagttaatctggatgtcagcctaagatgtagtcagggaggtaagtgtgtgggaggaggccacatcccctgtgcctcaagccggctgcttccacagtgcccaga

SEQ ID NO: 12193 - DNA, 1620 bp, Artificial sequence
  DNA replication origin
ggcccaggttcggggccgccccggggagcccccggccgcctcctccgccgccggcgacgcgggctggcccaacaagcacacgctccgcatcctgcaggacttcagctccgacccctcctccaacctctcgtcccactcgctggagaaactgccgcccgcggccgagccggccgagcgcgccttgcgggggcgggatcccggcgccctaagaccccacgaccccgcgcaccggccgctgctgcgagaccccggcccgcgtcggtccgagtcgccccccggccccggcggagacgcctccctcctggccaggctgttcgagcacccgctttaccgggtggcggttccgccgctcacggaggaggacgtcctgttcaatgtgaacagcgacaccaggctcagccccaaagcggcggagaacccggactggtgagtgggggctggcaggtgcccacccccaagggagccgtgagcccaaggcatggtgtagagaggttcaggggccccagagggccgccccccatggaagaggccgggcagggagtgtggtgcgggaggaggcagccgcctacctcagggcgctgcctttgtctccagaataacctcctccttgggaggggctgccggctggtccgggagctgtgccctgtggctgctggtgaggaagccagaccccgcgccctttagaagcgagtcctgaccagccgtggtcaccagcttgggaaatggggtcaggcaatgaatgaatgagttggtgagggaaggagccaggctgccgctgggctttcagacacttggcgagggtgctctgggtgggcaccttggagaaggtctggatgtgcctattgagtcttttaaacccagtggctggagcagaattatcagaggggcttgctggcagccgtgaggtgcaacaaggcggcccagccagcaagggcggtgggtgtgctggctgcaaagagatgatggctcgataaagggcgagaagccacggcaggaacctctctttaaactgtcctggctaagccctttccccaccccccggcccctccctccgccacacagatcaaaacaagcagatgctacaccgaagcagtggaacattaaccacgacaaggccagaataagtaactacctgccgaaggttaccccagcagcagagggggagaccagccttccaaaagatctggttgaaagtcccttcttccctgaaatgtccaggcccagtgtcttctgtctaaacacactggctgtttggaagcctctgagccttgcctgctggtcaggttcaaggaaatgcttggaaatttgagaaccagagcattggcctgggctgtggctctcggcagggagagacggccgcccagagcagcgagtggccaggaagtgtatcctagccccccaccccgcccccgtgtccaccgcaggacagagcttcggcagaaagcacctcagctttaggtgaattcgagctaggacaagttccgcgtttccctccagcccagcaggcagacggagggtctgtccctcctccagaacggtcccttgaccccagagatgtgaggacaggctgcgtgggcggcgggtcctccatgggagcctgggctggagagagtgctgcct

SEQ ID NO: 12194 - DNA, 1424 bp, Artificial sequence
  DNA replication origin
aaatgccagcatctcttggagtccttctgaggaggcaactgcatacgaacatcgcctctgtctcgtgctgtgacccggggagagactgtgggcaaaacccagtggcgtccgagggtctgtgtggccccgaactcttagtgctgacagcaacatgaaataatgaaggcacagggcactctgttcgtgcatgttaacttgtgtaactagtgcacgttaatcacattaactagccatgttaactagtgacgtagattaataatgatgaatcaataggaatgagtcctgtatactgacggatatccgggcgataggattcttcagcgaggccggggaagaagcagactgtcacctttggtctaaagttggtgggttaagtggtgggaggtgctcagggcaggtggcaggaaggggagagcgttccagatggggagaacctatttgaaaggcagtggacatcttcccatgtgcatagagaggacgggtggccactgggcgagattgcactggggaatggggcttgtggacatcttcccgtgtgcatagagaggacaggtggctgctgggtgggattgtactggggaatgggggggccctatggatatcttccagtgtgcatagagagaatgggtgactgctgggtgagattgcactggggaatggggcccgtggacatcttcctgtgtgcatagagaggacgggtgactgctgggtgggattgtactggggaatgggggggcgctatggatatcttcccatgtgcatagagagaatgggtggctgctgggtgagattgcactggggaatggggcttgtggacatcttcccgtgtgcatagagaggacgggtagctgctgggtgggattgtactggggaatgggggggccctatggatatcttccagtgtgcatagagagaatgggtggctgctgggtgagattgcactggggaatggggcccgtggacatcttcccgtgtgcatagcgaggacgggtggctgctgggtgggattgtactggggaatgggggggccctatggatatcttccagtgtgcatagagagaatgggtggctgctgggtgggattgcactggggaatggggcccgtggacatcttcctgtgtgcatagcgaggacgggtggccattagagcagtgcagacgggacctgtttccagaagaaggactgaactgaccagatttgcatgatatgtttttattgcactgggaattggggcctagaggcccactggggtttgattgtgctgttggtttcatgatggcctggatttcaggggaggggcaggtgtagagggagatggagggaaggtggtaggtgggagagggcttagcaggtgagtctctgagacttgtccacggtgtggggtgactttggggtctgtgccaggatgcccccgcctcagccgg

SEQ ID NO: 12195 - DNA, 2010 bp, Artificial sequence
  DNA replication origin
acagtggatacgtgtgcagggccgaggggacagtgaccgacgcgtcacagtggatacgtgtgcggggccgaggggacagtgaccgacgcctcacagtggatacgtgtgcggggccgagggggccgtgaccgacgcctcacagtggacacgtgtgcggggccgaggggacagtgaccgacgcgtcacagtggacacgtgtgcggggccgaggggaccgtgaccgacgcctcacagtggacacgtgtgcggggccgaggggacagtgaccgacgcgtcacagtggacacgtgtgcggggccgaggggaccgtgacagacgcgtcacagtggacagtgagcacgtgtgcggggccgaggggaccatgacagacgcgtcacagtggacagtgagcacgtgtgcggggccgaggggacagtgaccgacgcgtcacagtggacacgtgtgcggggccgaggggaccatgacagacgcgtcacagtggacagtgagcacgtgtgcggggctgaggggacagtgaccgacgcgtcacagtggacacgtgtgcagggccgaggggaccatgacagacgcgtcacagtggacacgtgtgcagggccgaggggaccagggccaacgcatcacagtgcacgggagggtgcaaaggtgggatgggggctggtgagccagcaggtctcagggggtcccagggaaagggaagggcggccagcgtggggcagcagggcatgagggccccacacagattgtccctggctgctgttgctgccctggagccaacggtggacactggaggtgggagaggctggggctgcggcagctgcaggagacggtggtggtttggaggaagatggaaaaatggaaaaatccaagaaatatctgaggatctgagaggtatctggtggagtgacgtgggatgtggagcagggggacggccagagagggaatgtcatggaaggaagacggaacccagccagcctgggatgacggagacgctccagggacctcacggctcctccacgtggctggagggcacgcgcgtgtgctgagggcgtggagctcggggagggcccagccctgcaggagatggcgggatgggggagctgcctgcagatgggtttgtaggtttggtggaagaaagctcaggatactcccttcagacgggaagaactgacccagaggaaccgaggtctcaggtggcggctggctgggagggagggtcagcgtgaggacagcgggcttcgtggggggcctgggggtgccgtggatgcttcccgaggacactgaatcctccaggaaggccaggagcacgggggagggcgcagacgagaaagcagagtccccaccatccacagggcttcacttgggcacaagggaggagctggtactggccccaggcaggagggagatggatcccaagcccggcgcagccacagaaaccgtcgacgggctccgacgcgacctcagggcagtgtgctcggcctcctgcggtgtctctgaggggtctgcacctcccgcccctcccctcctgttaaatggggcccagtgcccgagtgcggcggctcatgcctgaaatcccagcacttttggaggctgaggcaggaggcttgctcgaggccgagtgtttgagaccagcctgggcaacatagcaagaccccatctctaccaaaaaattaaaaaattaactggtgtggtggtgtgtgtccgtggtcccagctactcagaggctgacgtcgtggcggtgcgtgtccgtggtcccggctactcggggggctgacgtcgtggtggtgcgtgtccgtggtcccggctactcgggaggctgacgtcgtggtggtgcgtgtctgtggtcccagctactcgggaggctgtgggaagactgcttgaggccaggggctcaagaccagcctgggcaacagagaccctgtttctagaaaacaatggggctcaggacgtggacgcctgtcccgcctcctttccagggtcctggtgagtacggtggtgcctcatgtgacctgc

SEQ ID NO: 12196 - DNA, 1100 bp, Artificial sequence
  DNA replication origin
ggcccgtgatgttgacgtgtgaccagtccctggtgtggccccgtgaggccccctcacaccagacaatcccccgcgtggcccggacctaccggtccacagcgcgtgacaatctcccatctcgggcgacctggaggccctcgctgtggccagcttagctcccggggctgccccaggccgaggccagccccttccctgctgtgggaaccccccggagcccccttccttctccaccagcaaaaaggaaatcccgaggtggtgggaggagggtcccattgggagttcttgagcctcctggtggccaaagctggagggaggctactggaggcttccacaccccagcgagtccttgcggagcggcgggagctgcctcgcatgagacaggtgctttcagccccaggtctccccaaagtcaccctgctcaggttgcttgtagctccccagaaacgcgggcgggaggtgccactccccgttcttaggcaggggcaggggggtgcgtgggtgtgtgtggtcgtgcaggggtatgtaggggtgtgtcggggggtgtctgtgggtgtgtaaatgtaggttggtgtttgttggtgtgtaggtgtgtgctgatgtgagtgggtgtttgaggtgttgcctgcaggtaagcacacctggccgtcccgtcgagattaggcccttgtgtctgtgggtgtgtaggtgtgtgttgtgtgtactgtagggtgtggtgtgtgtaggtgtgtatgggtatgtacatgactgtggggtgtgtgctgatgtgtgtgggtgtatacgtgtgtgtccaggtaagcacacctggccgtcccttctaggagtcaggccctgtgtctgtgggtgcatgtgtgtgagtgtatgtaggtgtgtgtgatgtgtagtgtgtgggtgtggtgtgtgtacatgggtgtgggtgtgtacatggctgtgtggggtgtgtgctgatgtgggtggcttatacgtgtgtgtccaggtaagcacacctggccgtcccttctaggggtcaggcccttgggtctgtggtcagcatggagagatctaccccagtactcaaccctgaatatcaggcagagaatccatcagccaggcgagagcttcac

SEQ ID NO: 12197 - DNA, 1207 bp, Artificial sequence
  DNA replication origin
gcaaaaggttcgcacacgcccgcccgcctgaggtgtggggtccctgcctccgcccgccacgtgccctgtgggaagacggagtcccggaccagcctctggacgccacggccttggacgtatcctttccctttccgggcctcagtttccccaactgcagcaggcttctcaggcctgtttcctggctatgctgtaacccggcccccacctccccgcttagcccacgcgtcacactggcctccccgggtgacagcacagccctgcccagcccatccgtcagcagcctcggccttcaggcaagctgggatggcagggccctgacaaacgggtcctagggagggggctctggagcctggcgccacctctgcccgctgcaggaccatgggaggtcccctgacctctaaggtcagcccctcatgtggccacgctggggacgtggggtgcccatcacggtggggggctggggaggtttggggaggcctggggaggaagaggtggaggaggtgaggtggaaggttgggggcaggccgggaggttggaagaggctgggggaggtctgggggaggtttcgggaggttgtggggaggctgggaggaggctgggagatgtctaaggggaggctcagaaaaggctgggagggtggaggaggctggggggaggtccagggaaggcatgggaaggtccgaggggaggctgagggaggttggaggaggctgagggaggttgggggaggttggcggaggctgggaggaggcccaggggaggctgacgggggaggaggaagggagaaggctgggggaggcggagggtaggtcgcgcaccctgggcttaaggggacactggatcctggtccaggagggtctctactttccttctctaaaccccagttctctcgtctttacgcagcggtaagcgtcacctcctataactcacagggctatgtgaggatggacaaacataaaggcttctgtatataaaccccaagcacaggccgggcccacagctaccgagtgcccacgagacgccggttcccgcagggcctgggttagagcagcggctcggtaaatgtcaccgttctccaaccacagctgcactttccacctcctcagagatgagaaacggggcctgaggattcacacggaccatgaaataggggccggacaagctggcgcccaggaacactctgctctctgcggacgggacacagcac

SEQ ID NO: 12198 - DNA, 1033 bp, Artificial sequence
  DNA replication origin
gagctgggtggggggagcagggcccctggtgtatggagaggatggggctgggtggggggagcagggcccctggtgtatggagaggatggggctgggtggggggagcagggcccctggtgtatggagaggatggagctgggtgaggggagcagggcccgtggtgtatggagaggatggggctgggggaggggagcagggcccgtggtgtatggagaggatggagctgggtggggggagcagggcccctggtgtatggagaggatggggctgggtgaggggagcagggcccgtggtgtatggagaggatggggctgggtggggggagcagggcccctggtgtatggagaggatggggctgggtggggggagcagggcccctggtgtatggagaggatggagctgggtggggggagcagggcccgtggtgtatggagaggatggggctgggtggggggggcagggcccctggtgtatggagaggatggggctgggtggggagcagggcctctggtggtagattcccagcctgtggggtgacatctcactgaggaaaggccagctgggagccctggtccttgatgctggccggggaatcttttctccagagacacctgccctccctgctctttccagcctgggagtttctgtgtgtgtgtgtatgagtgtgtgtgagtgtgtgtgagtgtgtgtgagtgtgtgtgtgagagacagagtgtgtgtgagagtgtgtgtgtgtgtgagacagagtgtgtgtgtgtgtgtgtgtccgtctacgtctcccaaagagactgtctgcaaacagctgtcccaaggcccaggaactcctcccagccaagacacatgaacagaggcagttgcagaagggcttgcggggctgacacagtatttctagatgcagaaactttagccctccttccgggctctgacaacacatggcccgctggggcctgtctccgggcagcagagcttgagcagtgacgaggaattaaaggcaggagcgggggcccaccctgaacggcctcatcccaagcag

SEQ ID NO: 12199 - DNA, 1089 bp, Artificial sequence
  DNA replication origin
cttctggggtctgcccaggaccagttcccaggagctgcctgcagcccccaacaccgtgcatccttctctccctccccccagagctggccacacccaaaccccttcccttagaaggatttccctcagctctgaaaaacaacacaggaggtgtactaattgtggttattcatactaaagtaggaatgacgactgagctgacctctcccaggcctttcgtggctggcagaataacggtcccccaaagttgtccgcatctgaaccccaggacctgtgactgctgcctcgcgtggcgggaggcacagtgcagatgtgactgaggctctggggaaggagagaccacagcgtccctgcaagaggggccgagggagacctgacttcagaagacgctgcgcggccggctctcaggatggaggagggaccccagccgccaacgcaggcgcctccaggagccggaagggccaggacacggctcctccctgagcctcccgggggagctcagcctgcacgtccttttagacccctgcactctgggctgggaagaggatgcttgtgttgtctgaagacactgcgtttgccgtgatttgttccagcagccaaggaggggaatacaggatacccagccacacgaaggcagggcagatggacacggtgatttagtcccagctggaaaggctgtgaaattacgacctgtttcctccaaatccagtcaggccatcaatgctaaggctcatgacacttagaaaaccacacagaatgatcgagagaaggcactgctgttcacaaaggagccagagagagggtgacaaacaccacacgtgcatccccgggccaggcgacgcgtcctcacgggagcccccatggctctcgcggctgcccccattttaaagacaaggaaaccgaggtctggaaggagacagaggcgtctgcagaatcgcacggccagaacatggcacagcttggacgggaaccaggagtctgactcaggcctgtgatcttttcttcagggccctccaaaaaccacacaccagctcctgctgttccgaacgtccgtgtttcctcccggatctgggcccctctcaggaaggctgg

SEQ ID NO: 12200 - DNA, 1189 bp, Artificial sequence
  DNA replication origin
gaccgatgtggtcatggtggaaacgtggaggaattgtcaaggtcgtgtctgagcataagtgtgtaagcgcgtaagcgtgtaagcgtgtaagcatgcttcctccaccaaggccggcccctgccatgcttcccccaccaaggccggcccctgcctccactggagggagagcctgtcccagggcgtccacccaggccaggcccagggagggaactcagcctccaacccaggcttcctccaccaaggctggcccctgcctccactggaaggagagcccgtcccaggatgtcctcccatgccaggcccagggagggaactcagcccccaatccaggaagaatttaccagattcaaactctggtgacctttccaggtgctggaaaccagagctggcgggaatccccagctcgcacgccctgcagcccacacctcccactcagggcagactgtgttccgtctgggctccaacactccagcaatgcagactacagacgccgccccggtcactttcccagccctcggcttccccggccgggtccttccttccatatacgcagcggaggtccgcccaactcctgggagcatcctggccctgccacgggccgacatcatcgccacacgaacagcggggtggggcacaggtcctgtatgtcatgtccacgtcccttcggggggaccacgtctgggtcacaggccgtcaattacacaccagcccgtggctcccgtcctcccacgctgttctcagaaagctgtggccacaattctccgtgttcccggaacgtttcttatggggggttaaagatgtgtaccacccacggcctttttaagaactagtctctgctgctagaaactctgagaacagaccactttccacgatcccacataatattcgccttgacagggccctgggtaggcgcaaggccagatgaggattccaggagctacttaaaaataaaatgcggatggtgggctggcgcctgaaggtcacatttgcttcataaccccactgggtctgtggccattgctatctctgtgcacttctgaaaccagcagcaaaggagggttggggtgcagggcagggcagtggcaggtatggcggcaaactgaacatgctgcccgccagggtcgccctgcagagccgaggcccagactggccgggatcctgaggttcaagagaaagaatctagaccttg

SEQ ID NO: 12201 - DNA, 811 bp, Artificial sequence
  DNA replication origin
ggtccccccgaagggacgtggacatgacatacaggacctgtgccccaccccgctgttcgtgtggcgatgatgtcggcccgtggcagggccaggatgctcccaggagttgggcggacctccgctgcgtatatggaaggaaggacccggccggggaagccgagggctgggaaagtgaccggggcggcgtctgtagtctgcattgctggagtgttggagcccagacggaacacagtctgccctgagtgggaggtgtgggctgcagggcgtgcgagctggggattcccgccagctctggtttccagcacctggaaaggtcaccagagtttgaatctggtaaattcttcctggattgggggctgagttccctccctgggcctggcatgggaggacatcctgggacgggctctccttccagtggaggcaggggccagccttggtggaggaagcctgggttggaggctgagttccctccctgggcctggcctgggtggacgccctgggacaggctctccctccagtggaggcaggggccggccttggtgggggaagcatggcaggggccggccttggtggaggaagcatgcttacacgcttacacgcttacgcgcttacacacttatgctcagacacgaccttgacaattcctccacgtttccaccatgaccacatcggtcaaacacttgcgtggaccggcacctcacagggccctgcggctaggctccccttcccctggagtattggcctgagatacaggagccctatggtgtttacagaatggcactgacctttcataaacagccccacctgtggc

SEQ ID NO: 12202 - DNA, 1268 bp, Artificial sequence
  DNA replication origin
cgatttctatagtcaccacagaagactttgatctttaaaaaagccctttaaactccaatgtacgcccgcgtcactagggatcttgttaaaatgcagattctgtcccaggtctgggtggagcccaggactctgcattccaactagcccagggcaaccccaatgctgccggccctggggccgcaccccaggctgggacgtgtcagggccgtgcagggcaggcagggaggctctgggggctgagggtggcgcctcctccctccactgcaccagggcaaggtccttcaatccacggggcccctctggacctgggccaggcccgtttactgcccttggagggcactgaacacggaccccccactttcccagcagcagggccaagctgaccctcacaaggggttcactttctgctgggctggggcggcccctctggagacaggcgaccgtggggcctcccaggccccctcatcacaaacatcgcttccccctccttaggaagcctgctttggtctcccagagaagcctgtgctctgtgagtctctgtgttaagattcgcagcacttaatactcccccttccctccctgcctccttccctctttccttttcctctattaccgaccgcacagcagcttctgtgcctcccatctgcctgaactgtgggggtgcaggaggggcccatctggattaaggtgccctgagggcaggcgccctctccctcggtgacagagggatgattaggagcgtgggaacctgggcaaatcgccgctcacagagcctcagtttctcatctgtaaagggggatatgaaaggctctccctaccgcgtgttgtgtgggctacgatgacacagagggccctgctcagggcagcactcggggtggggggagagcaggcaccggcgctgcctgatggtgacaaaggtgacgatgacatacaggaccctgctcagggcagcactcggggtggggggagagcaggcaccggcgctgcctgatggtgacgaaggtgacgatgacgtcctgctgtgtccagtgcaggacggcctcactcaccggtgggtctgagcgcacgggagcgcggatggagggaggaaggaagggctcacctgtccaggtggaaggcagcaatctccgcattgtgcctctcgtagtcagagaaataaaaaaagtcagggggtgtctcctgctccctcgtttgtctgagaaaacaagacagaaacagaaacggtttgtcactgagaaagcctccaggggccggaggcaggcgggacg

SEQ ID NO: 12203 - DNA, 804 bp, Artificial sequence
  DNA replication origin
accaccgccagggtagcaaccacaggggaggaaaagtgtgcagattccagggcctgggagagaccagcaggacctgctgcagggctggaagtgtggagaagagaaggagaaagtgtgacctccaggatctgacttcagccacggcatggggcacccttcactgtggggtgttgaaggaagacccagaggggcagggaggaggcgtgtggtgtccctgcaggcaccagatgacagcggggctgggtataaaacatggtgctgccagcaaggagctggaacgtggagccacagcgaagggaggagggtgcgcacgaggcctatgacagctcatgcacggctggagtctgggtaagtggaggggcagcaagggtggggctgatggtccagacagagcagacgacccttgctgtccactatggaaggacacacaagaaccatcatgcgtgtgagagcctttggcatgagagacacaaagccacagggaaacacatggtgtggagactgtgctgagagcagagatgcagagatgcagagacagcagagatgcagagacagcagagagtggacgaacgaggagggtgtggggtggctggggatggcgtgaggtccagggaacaggaggggctctcgtgcaccagcgtgggtggagaaatcaaacaggatgaagcctcgacagaaagaacaggacacgagactgaggaagctccgagagagcagcgagggagaccagtggctggaaaatgagaaaacaaagccactgaggccccagcagcagccccagtgccaaccagcagggggcacagg

SEQ ID NO: 12204 - DNA, 1037 bp, Artificial sequence
  DNA replication origin
gacgggcggggcggccccccctacccggctcccttcctggggcgctcagggcagggctcgctccgtccccgtccctggaggcagcttggggtgtcctcgcaggctccctgcactggcggaagtctcctcggagcgccccggtgccgtgagccccggtcccgtgcgccctgggcgcgcctgagactcggtggtgctttccgggcgccgggatccccgggaggacccttgggtctcagcagagagcacagcccggagccggcgtcgaagaccaggactgtggccccctccgccacctgcactgtccgccgctctccaccccagagcggccggggggtccaggccaaatccgtggggcccggcgggcgtctcccggccttggtcagggggtcagctgagccagagacccaggtcccagcgctttctgcagcgccctgtgctcccgtccagcggcctctcagtgcctggaagtgagtccccgccagggcccggagggagggggacttcccatccgcagagtcgccgcttcacgggtcccctctgggtcgaagctccgttttaggcgcacgcagagggaagagaagagaagccatccgggttaggaaattctggagaaaagtagagaggcgggatcttacgggagtagggggttttgtttcacagtagacatgagactgaatagtatttccaggaataatctgcagaattctgaccgacagccgtgtctgtgagtcggcctgaggccagaaagcccgggatagatacagccttcaccaggaaatgtcatcttcacagcagcaccttcagctctgaaacgacccagacagcggggcctgggggctcatacttgaaaccgcagcgctttgggagcccgatgtgggaggatcacttgaaaccaggagttagagaccagcctcagcagcagagtgagacccctgtctctataaaaaataaatgaatgaatgaagttgttaaaatacgaggtgactcatgctgcttgcacccagctggccccaggggtgcctggagctgtcgctgcc

SEQ ID NO: 12205 - DNA, 1218 bp, Artificial sequence
  DNA replication origin
cgggggagcggggctggcggggggctcacggcccggggcgccctcgccagcgctgtccggggccaggcgcccctgagcggcgggcggctcggacggacccgacggcccctgggcgccccccgcgcgcggacccctcggcccctcgcgcttggggccgcgccgccgccgccgccgccggtagttgccgttctcgaagaggtccagcagcgactcgcagccgcccgcgaacgtccagtagttgcctttgcccttctcgtggccctcggaccgcggcacctgcgcgcgcggagggaggggctgggagcggctccgctgcacggtgcgcccgcccgccttgtcccctcggggcgccctggaccggggcgagggtggcgcactgcgcaggtggaggcggccccgtgggctgaggacggacctccctgaagccgccgcggtgccctcccttccccgccaccgaggccctggcgcaggtgtcgccacgctgggacacccggggcccgtcgggggcggcgctcaccttgacgaagcagctgttgagggacaggttgtggcggatggagttctgccaggcgcgctggttggcgcggtaataggggaatttgcgcatgatgaagtcgtagatgccggacagggtcaccctccccgcggggctctgctgaatggccatggcgatcaaggcgatgtagctgcggagcccgggggtcaggcggggtctccaccgggcagccccccgtccttccccccatcccgcaggacgccgtggggcgcagaggcggaggagcgaggcggtgttggggaaagtgtccccgcagctcgcggtccccggcgccacccagaccccagaagctctttcccgacctgcggaggcccctccccgcgaggccaagaaccctccctggctctccccaaagtagggacaaatgcgtcctttctctgagctccgccgccggagagaagaaagctcccccgcccttccttcgtcccaggcaggtcccggctacctgggacccttgcagggggtgtcactgtcccccaaagccccagcaccgcccccgcagtcacctgtacgcgggccgcgtgagcctcttgtcttcgtcggagctgccggcggggtagtcgtcggcgtcgtaattgaagcagttgtagggatactgcgagctgtcaaacatcctggcgcgctcggcgcttgctgggggtcccggctgcaattgccgcctc

SEQ ID NO: 12206 - DNA, 1543 bp, Artificial sequence
  DNA replication origin
acctgcgccagggcctcggtggcggggaagggagggcaccgcggcggcttcagggaggtccgtcctcagcccacggggccgcctccacctgcgcagtgcgccaccctcgccccggtccagggcgccccgaggggacaaggcgggcgggcgcaccgtgcagcggagccgctcccagcccctccctccgcgcgcgcaggtgccgcggtccgagggccacgagaagggcaaaggcaactactggacgttcgcgggcggctgcgagtcgctgctggacctcttcgagaacggcaactaccggcggcggcggcggcggcgcggccccaagcgcgaggggccgaggggtccgcgcgcggggggcgcccaggggccgtcgggtccgtccgagccgcccgccgctcaggggcgcctggccccggacagcgctggcgagggcgccccgggccgtgagccccccgccagccccgctcccccggggaaggagcacccccgggacctcaagttcagcatcgactacatcctgtcctccccagaccccttccctgggctcaagccgccctgcctcgcacaagagggcagatacccgcggctggagaacgtgggactccacttttggacaatgtgatgtggagccaccctggaggcccctgcagttcagtctggggtcttccccggaccctccctggaaagacgattccagccccaccttgagccaggaagccagggttcggcaaatcctacaatttctcctgcagacagaaggtcaggtgccacaccaggcctggactggggggacaggcggaggtggagctccttaaaggtatagactgtgaggctgtgacttgacctgttgggaaaacagttctcttgcagggaaaaccccactgggttccggttttacctaagggtttgctctggactgacctagtgctcttgctctgagggataaacacagggtcatgttccctggagctgggagatatttcattcctcagtcacttgagggcgagttttctaggcagccacaccccaataagccacaagtgcccagtgtgcggtcagtgggctggttcgcgtcgtccccatggttaaaataatagtggtaaggcacaaaccgtgaagagagagggcagtcagccccacgaattagtcaccccaaagctgatgatggtgtccgtgctagcggtgacgtgctcagaagtgacaaatgtatcttgttgtgtcagctgagtattttggtgacagtttaagaaatccattgtgctttttataccagaagggagaaagacaaggtgggaaggaggggcccagatttgggatgatactggggcaaagtccaaatttcttgattcttcagagcagggagtaagccctgattcaggcaccttccatcaactggattcccaaaaaatcaggcccccaagagagcaggctgttgataaaattcctgtgacacctctcagtgcacggttacaagtatccgaggtgggtgcactccacttgaaatgtaaaggatttaattactgtgtggagacgggcattctaa

SEQ ID NO: 12207 - DNA, 1066 bp, Artificial sequence
  DNA replication origin
gcgtcccgtcatcaatgctggggcaggcattctcagtagacacttactgtgggacctcagcctgaccaaagaccctcaaaaccttgctcccctgagccccatctttagtggagttttgtcagtgagaccctcagtctagccccaggggtggcctgaggcactggacacgtgcagctatttcaggtgcactggcctgagtgcaaagcacagtctcctgtgtctgatgaagccgccggtggcccccagactcctggcagctgggggccagctgtgctcggggaggatggaggggcggggtgggggggggcaagagggaccaggcagggccaggaggggcatggggagccaggagagttgggggagttcaagggtcggggggaaggctggaagggctgggggtccagaaggggcctggggacctgggggtgccacagggccagtaagaattgggggtagagaggggctggggggagaatgggaggggctaggaggcagaaaagacccaggaggaccaggaggtgccaggaggaccaggcagggctgagggcaccaggaggggctgggcaggacctgggggagggaggcgggggtgcaaggtggggcctggtggggccaaggggaggctggggagtgtaggggtggtgaggcagtgccgggagggggcaaagtcggaccctgagtccccaggccgcaggcagcctccggcaggccctgtgcttgttttcagtttcatattttggtgagaaacagcctgtttgggttcctcctctggaatgtgtacacggagagactccagggccctcagcatggagaggaacttggctggccctggggcagggcgggggccggaaagttagaaccgagcagtttcaggagcccagccctgtcacagcctggggtgatgggagtggtggcacccctgatccccaaacccaggcagaaccacagaggaaaccaagatagagaggggagggccgccagacccccgcgcggaggccagtgtaggcctctcagaagaatccaggtgggaaacacccagctgtgtcctggtgccagtcccagccca

SEQ ID NO: 12208 - DNA, 1481 bp, Artificial sequence
  DNA replication origin
tcagccctgcctggtcctcctggcacctcctggtcctcctgggtcttttctgcctcctagcccctcccattctccccccagcccctctctacccccaattcttactggccctgtggcacccccaggtccccaggccccttctggacccccagcccttccagccttccccccgacccttgaactcccccaactctcctggctccccatgcccctcctggccctgcctggtccctcttgcccccccccaccccgcccctccatcctccccgagcacagctggcccccagctgccaggagtctgggggccaccggcggcttcatcagacacaggagactgtgctttgcactcaggccagtgcacctgaaatagctgcacgtgtccagtgcctcaggccacccctggggctagactgagggtctcactgacaaaactccactaaagatggggctcaggggagcaaggttttgagggtctttggtcaggctgaggtcccacagtaagtgtctactgagaatgcctgccccagcattgatgacgggacgcagggctgcggggtggcgggaggaggtgctgggaggcactggacgcgtggatgacgggacgtggggctgcggggtggcgggaggagaagctgggagggagtggactcgtggatgatgggacgtggggctgcggggtggcgggaggaggtactgggagggagtggacgcgtggacgatgggacgcggggctgaggggtggcaggaggagaagctgggagggagtggacacgtggatgatgggacgtggggctgcggggtggtgggaggaggtgctgggagggagtggacgcgtggacgatgggacgcggggctgaggggtggcaggaggagaagctgggagggagtggacacgtggatgatgggacgtggggctgcggggtggcgggaggagaagctgggagggagtggacacgtggaagacgggacgtggggctgcggggtggtgggaggaggtgctgggagggagtggacacgtggacgatgggacgcggggctgaggggtggcgggaggaggtgctgggaggcactggacgcgtggaagacgggacgtggggctgcggggtggtgggaggaggtgctgggagggagtggacacgtggatgatgggacgcagggctgaggggtggcgggaggaggtgctgggagggagtggatggagcacattcaatcttgagaattcctacgtgtgggtcacttcctctcctgcacacggtgggcgccctgcacacagatgatgagtaaattcacagggtcccaagaaagaagcttctgtgaggggaagagatagatggggaggtcgtgtcattcatgactgtgccatatcccagcaagcccaggcccagtgtcccggggtcagcccaggaggacatcctaatcctggtagaaagaagggctggcgtttgccgagggctctccatgtgctgggcatggttctgaaa

SEQ ID NO: 12209 - DNA, 1384 bp, Artificial sequence
  DNA replication origin
gctgcaggcctggaccccagacctgggtctgcggggcggcgggggcggggcctgggcctcggggggcgtggccgggggttggggcggggcccggatcaccgccctctgcgcctggcccagcccgcggcccggcccatccctggcgctctgctgccacctggtggcgtggcgcggccgtgcagcctcggcctcacctgcgggacagcaggtgcaccgagctcctggaaggcggctgctgggcgggcgcggacgtccggctttaggggacagatctggaaagggtgggatgacgggaaagctgcccactcctcagcgtccggtcaggcctcggcttccgtggccagacagggagaggggcttatgacaagcacatcgccacctgggctagggagtcccgcgctgcacctcgagagctaggaggggctgcgcatgaggggcccgcacccctcgttttccagctgggaaactgaggctagaaaggccttggcggcgcttcccaagggcagtcctcccgtgcgctgaccactcgccgcctggtctgtggatggagcctgtggggcaaacaaggaaacaggcacacaaaactgtcatgcaatgaacgcagcctaacatcagaaagcatggcatagctacttcccacagcgggaagtgcagtggaaaacacagcaaagccggaaggccacagcctgggcttgtcccatgggcgctgctgtggctgggtgggctgggtgtggagtgatgcatgaagccggttgctgccgaggcctggggcaggtggaggagggcgatcccagagctctgtgggccataaagacgtggactttattctaggtacctggcagggtttcctaaagggggctgcggggaaaaggagtgtgacatgatgtggtttcagaagtcccaccctccctgcaggcctggctggagtgggtagggacatgctggcttcaggtgagtgtcctgggcaaaggggcttagggccaggctgttaggacttcagcacagaggctgaaggatttgctttggggagagatccagggaggttatggcccactgccaggtgtcaagccaagtcacccacaggtgtgatgggaacagggccaagtgacgtttttaaatggccctattttcgatcccggggttacattgtttgcatgatctcattaattcagcacaatagtcctgggtgtttctctccttatctcgcttaattggcgtaacagcctgtgagtcaggcactattgcccctatttcaggcacaaggaagctgaaggctcagagagagttgaagtgctctgtcttacccagcaggaaggggctgcaggattcatcctgggccagactgtgtgtgtgccattttaaaacgaagacacagggccaggtg

SEQ ID NO: 12210 - DNA, 1734 bp, Artificial sequence
  DNA replication origin
ttgggaagcgccgccaaggcctttctagcctcagtttcccagctggaaaacgaggggtgcgggcccctcatgcgcagcccctcctagctctcgaggtgcagcgcgggactccctagcccaggtggcgatgtgcttgtcataagcccctctccctgtctggccacggaagccgaggcctgaccggacgctgaggagtgggcagctttcccgtcatcccaccctttccagatctgtcccctaaagccggacgtccgcgcccgcccagcagccgccttccaggagctcggtgcacctgctgtcccgcaggtgaggccgaggctgcacggccgcgccacgccaccaggtggcagcagagcgccagggatgggccgggccgcgggctgggccaggcgcagagggcggtgatccgggccccgccccaacccccggccacgccccccgaggcccaggccccgcccccgccgccccgcagacccaggtctggggtccaggcctgcagcccgacgccccgaaagagagcagcgccctggacggagcggggttggggtggcagtgggagggctccaccaagaaggctggctctgtaagcccctgacacccatcttctcgcgcagtcactcccacagccaccctgtaagaggggctgaaacgcggggaacgcttgcagagcagctgtcctggtgctcagcgagacagtgacctgctcagcccctggcgtccagtccggctgccctcaggcccctccctaccccatcttttctcaaatgccctttagggcctctgcaccaaattgaagccgagtggtctctggattcactcctgtcctgacctaggaggggtcttgcccagaccccaggcctggggccttgctggggccaggagggcaaggcggggagggggcccagggatgttgagcaggagacagacccaggccagaggtttgctgaggacagaggggcaaggaagggccccagggaccctaagcagttgccccctggaaaagaccccacccagggcccttgctgaggacagagggcaggggacagggggctcagggaccctgagcagctgccaggagagggacccaggaagtccggcctctcaaactgaggtgccatccactccccttgagggaggctcggagtcgggaaatccaggcaggtgggaaggcgcccccctagtgtcttcttcctccgctgtgctagttacataaaaattatggaagaccatggttttgaactaagcgcctgctctgggtaaaaatcaaatgcagtcacccatggtcaggctgtctgtcaccaaacccaaccgaagttgtcatctgaccttccaaaaaatcaagagagggcgattggccagacacggcggctcacacctgtcatcccagcactttgggagcctgaggcaggaggatggcttgagctcaggagtctgagaccagcctgggcaacacagtggaaccctgtctctataaaaataataaattattttaaaaaacaaaaaagaaagaaagaaaaggagagagagagagaatggccaatttcccaaacaggccggttccagtcttcaatcagtgtggaatgaagttccctctgctttaatccttagcctgaagtcacccgatgtgagacaatcgattggttgtttttgtatttttctgctccctgtccccgccctgcagggacagtaactttgaaacgacccctccgcctgtgttctttgcctctgctttct

SEQ ID NO: 12211 - DNA, 805 bp, Artificial sequence
  DNA replication origin
cccgcgctccacggaaggggctcttcctaccaacgtcatgcctcaaaccagggctggggggccccgctcccaagctgggggacaccggagcaaacggaacggcgcagggcgggcgcgggcggcagcgctgtctgaggtgcgggcggcacctgcgcttccccgggaggttagagaaaggcgccccctgctggcggctgcgccctcgggggacctgcagggcccgaggccacgtggagacgaaggagccctctcctggggtgggggcacgggactgggttcagcgcctccaagcctctccccaggccctccactgggtgttcttgttggagtccgcagcctgcacagttccagccctggcggtctgaggctaggcgagggtgtgtggaccagggagaccccggcgcccggtgggagggcccagcccgcccacccctgccctggcacctgccggcagagcccccagcccgctcacccctgcccctggggctgtcagcatccacgggacggccacaccacaccaggaaatgatcattccaggtcagggctgggtgattgcggcgccctctccccttaccccagcggtgggcaacttcgcacttcggatagcatttcccctgggaagaggccaagcgtgcttcgacaggcggcatcacaaaaggtcaagaggcaaacaccctcggtccgccgcctcgataattagctcctcagccagcctgcagaaaagccatcgggcctggacaagctcccaggcacagcacctcaccacccgccctctgtcctgcccagtgtacacacaggagctcct

SEQ ID NO: 12212 - DNA, 1983 bp, Artificial sequence
  DNA replication origin
ggacaaaggtggccccatccagggcaccccaggggaatgtgatggccactgcaccgtgcccagtgccttctgtgcacctgtgacccttggtgggccacgcaaacctgcagccagggcctggggacctctggaggggatgaggatggaacagcaagaggcagtatcactgccaagggcgtctctgcccacatctggaggcagcaaggcccctgcgctctctagagcaggtctgtggtcctctggtgtgccacaaatttcaaaccggccccgactcctggggcaagagcaaagagccacactcctgattcttgtgccagctggttttaaccactgtagtgtccctgtgtgtacacgagtaaatatggcatatgtgtgccctggggatgtgagctcctgggcaggtgagcatctgtgcacaggcacgtgtgtgtatgcatgtttgtgtttgtgtgagtgagcgtgtgtgcacgtgcataggcatgtgctttgtatgactgtgtgtttctgcatgcacgtgggtgcatgtgtgcttgtgtgtgcacatgtgtttgtgtgtgtgtttctgtgtgcttatgtgtatgtgcatgggttttgcatgtgtgtttttgcttacatgtgggtgcatgtgtgcctatgtgtgtgcatgtttctgtgtgcatgtgggtgtgtgggtgtgtgtgtatgcgtttgtgcctgcatgtgtgtttctgtgtgcatgtgggtggacgtgtgcatgtgtgcacgtttgtatgtgtttgtgtgtgtgtttctgtgtgcatgtatgcacatttgtgtatatgtgtgtgcttgtgtgtgcatgtgtgtgcatgtatgagcttttgtgtgtatgtttgtgtgtgcacgtgggtacatgtgtgcatgcgtgcacatttgtgtgtgtgcatgtgggtgcatgtgtgcttgtgtgcacgtatgtatgtgtgtgtttgtgtgcaggtgggtacatgtgtgcatatgtgcgtgtttgtgtgtgtgtgtatgcgtctgtgcctgcatgtgtgtttctgtgtgcatgtgggtggacgtgtgcatgtgtgcacgtttgtatgtgtttgcgtgtgcgtgtgtgtttctttgtgcatgtatgcacatttgtgtatatgtgtgtgtgcttgtgtgtgcatgtttgtgtgtgcatgtatgagcttttgtatgtgtttgtgtgtgtatgtggatgcacgtgtgtgtgtgcacttttgtgtgtgtgtctctgcatgcatgtgggtgcacgtgtgcatgtgtgcacgtttgtgtgtgcacgtgtgtttctgtgtgcatgtgggtacatgtgtacatgtgtgcatgtgtgcacatttgtgtgtgtgtttctgcgtgcatgtgggtggatgtgtgcatgtgtgcacgtttgtgtgtgtgcgtgtttctgcatgcatgtaggtgcatgtgtgcacgtttgtgtgtgtgtgtttctgcatgcatgtgggtgcatgtgtgcgcgtttgtgtgtgtgtgtttctgcgtgcatgtgggtgcatgtgtgcatgtgtgcatgtgtgcgcgtgtgtgcgtgtgtttctgcttgcatgtgggtgcatgtgtgcgcgtttgtttgtgcgtgtttctgcgtgcatgtggatgcatgtgtgcatgtgtgtgcgtttgtgcgtgtgtttctgcgtgcatgtgggtgcatgtgtgcatgtgtgcacgtttgtgtgtttctgcgtgcatgtgggtgcatgtgtgcatgtgtgcatgtgtgcacgtttgtgtgtgtgtttctgcgtgcatgtgggtgcatgtgtgcatgtgtgcgcgtttgtgtgtgcgtttctgcatgcatgtggatgcatgtgtgcatgtgtgcgcgtttgtttgtgcgtgtgtttctgcgtgcatgtgggtgcatgtgtgcatgtgtgcgcgtttgtgtgtgtgtgtttctgcgtgcatgtgtgcatgtgtgcgcgtttgtgtgtgtgtgtgtttctgcgtgcatgt

SEQ ID NO: 12213 - DNA, 1018 bp, Artificial sequence
  DNA replication origin
aagcccggggccgtacagcactgtggggttcctcacaggcaagggggatgcggtaacagcttgaagacgcacattccgacttcaggaagcgccatgaggccgggaagggctccgtgcctgtccctggctgaggcttcactgggcatatgaggagcatgagagggacaagctcctccaaacccaggcccatgttgaagtcagtgtcccccagctcccctgctgaaagaactgggtgtgactgggcaggggagggaaggggaggggagggcctctcaggattccgaggagtctgtgctcatggggatgcccaggccgccccccagccactggcagagaggagccgtggtgcccaagccaggcggtgggtcagaggccgagcggagcctggctggctggctgtccatgggcggcctcggtccggttcttgtccattcttgtccagggcagtgaagctcagccctgcagaagccgagtggctggggggagcctgcttgcacccacccgcgggcagaaaagacgccctggctgggtggggcggggagtctaacccctgccctggcaggtcaggtctgcggcaacttctccgacatggggggcaggtggtcttctgggccaggctgggagttggcaactgggagagggagcaggaggagagggaggctgagggccctgggggccactaacaggggagatggggagggccagagtcgcccccacagcggccacaggacaggacagcggcgggacagtggctgaacccagtcccaggtgccaggtgctcctcacctgtggtggaggactccacgcacacgccagtgggatcttccttcgaacggacacattccaggggagtgtagattattgggctcacacagaggaagtcgggaagcacagatcaggacctgggaaccccgttcaagaccaagcaaagacctgggccacagagcagcaagagctggagtgtgggctcagccgtgtgaccccaggtcctccctgtttccatgaaggagaggcacgt

SEQ ID NO: 12214 - DNA, 1204 bp, Artificial sequence
  DNA replication origin
gccaccccctgcctcccgcccacacccccttgtcactggggtgtttgtctgagtcttgaggcccaaagcacgcccaccgctgcacatccgatgccagaggccgccctgggcagcagcggtgtttgtcggcatgagagccccaggtggcagcggtggttgttggcgcgtgagccccgggtggcggcggtggtggttggcgtgtgagccccgggtggcggtggtgtttgttggcgtgtgagccccgggcggcggcagtggtggttggcgtgtgagccccgggcggcggcggtggtggttggcgtgtgaccccgggtggcagtggtgtttgttggcgtgtgagccccgggcggcggcggtggtggttggcgtgtgagccccgggcggcggcggtgtttgttggcgcgtgagccccgggcggcggcggtggtggttggcgtgtgagccccgggcggctgcggtggtggttggcgtgtgaccccgggtggcagcggtggtggttggcgtgagacacaacctcatcacttccaggctgggggctcttgacctcatggtgtgtttttgagggttctccacagaaacagaccaacaggaggcagaggtatagggatgtcccgtgaggaccaggctcatcgactaaggaggccaaggcgtcccaccacctgcgtctgcaggctggagacccagggagcctgtacagtgcgttccggtcgagcctgaaagcctgaaaccgcgggagccgatggagtgagccccgtcctagggcaggagaggaggaggaggagatgagatgatcccgttcaggcaggcagagtgcaaaccagcctcactcagggctggagtggtgcccgtgtacactggggaggcatcttcgctcattttcagttcgaatgccaagctcttccggaagcaccccctcagacacccctgaaataatgcttaggcggatactaggcacccgtgacccagtcaaggggacacaaatcatgcatcctgtggagcttggaggctgtcccgctcacaccctgcccaccctgaccatctgtctcttctttcctgcgcccctctgcctccccctctccctcttctcctgtctctctcttttctcagtcacataaaatagctcacgattttctccaggattcactgaaaacaaaccaaaacaacaaaaccaagacaaaacaacacgaaaaccccacaaaatatc

SEQ ID NO: 12215 - DNA, 1138 bp, Artificial sequence
  DNA replication origin
ggaggaacacctgcctctgccctggtaattaattcaggttaaattaaaaagggactggcgtgcccacagacacagcagggagaggaaattggttttctccagcccagcaagagagatgttgctgtgagatgtccctccctccgcttgtggccctgcccccagacgcccggtgggggcctctgtgttctgggtgctgtcttccaccttctcaggaatggctcagacctgggatggagctggggcccctcagctgccccatgcaccctggggctggagctctgtcgaggcaatagtggacatgggattggtggcagggaccctgaaccccgtccccgcggcctggggtcaacgagaaggtcgtggtgaggagcggaggggggctggggggtcaggagcctcccttcccgcgctactcagcggggactgtggggcaggctggtggaatgcaacccacagggcagggttttccatggctgggaggcccctcagggcttgtgggcagcttcccaaggggcagaagcgagcgcaactgctgttcccaagtgcgggaagattccgggagggcagggccgttggttctgctctgaaccagtcaaggtgagttcagggcagcaatggcggagaggtcagcaatggcggaggggtcagcgacagaggagaggtcagcgttggcggagaggtcagcaatggcagataggtcaccattggtggaagggtcagcaatggcggagggggtcagtgttggtggaggtcagcattggtggaggggtcagtgatggcaaaggggtcagcgttggcgtcgttcccttctgcaaattgttggccacatctttggcccgagggaaggactacctggaagcgtcttggggtgatccctacagcccgccgaggccctgccctgacccctgggcagagcttgatgttgtccaccaaggaggaacctcagtctccaagggcaagaacgtgtgtccagggatcaggcaagagctggggtcgcccggcccgtctcactcagagcatgtgtctgcttgtggaccagggagatgtctagacaccctggggggactcccgctccactagcttcagaggcccaccctagagggtgtttctgggagggacaggagggtttatgggaggg

SEQ ID NO: 12216 - DNA, 1147 bp, Artificial sequence
  DNA replication origin
cgttctctgtcgattggctccagtgctttagaggcccaggccgataggatgcattttctcttccggtttccagattcagtagaaacgccacagccccaaggcaccagcttgtgggttctcgagccgtagagcccttggttccaacagacttgcaaagaggagggggcccttgggaggccctgattgggacaccgctcaccacccatttatggggtcttcagggggtgggggctggggctctgacgcccccggctttcctgtccctctctctgccccctgctatggccccttgggaagctctgagtgggaaccattcacccacccttttgcagggcctggagggcgggggctggggctctcggctttcctgtccctcctctgccccctggtacggcccttgggaagctctgagtgggaaccattcacctacccttttgcggggtcttcagggggtgggggctggggttctgatgcccccggctttcctgttcctctctctgtgatccctgctatggcccttgggaagccctgagtggggcaccactcaccacccatttgcagggtctgcagggggtggggggtggggctctgacgcccctggctttcctgtccctctctctgccccctgctacggcccttgggaagctttgagtggggcactgttcgcccacacatttgtggagcctggagggtgggagcggggagtctgatgtccccggctttcctgtccctctctctgccccctgctacggcccttgggaagctctgagtggggcactgttcgcccacacatttgtggagcctggagggtgggagcggggggtctgatgtccccggctttcttgtccctctctctgccccccgctaccgtgtcaccggccccagtgtccgcagaatctgggcgattccgaattatgcaacggcaaccgggaggcgaaggggatggggtacagggacactgggcgggcaggccagctgctcacaattcaggtctcgcccagaggatgtgggcgcagcgcccagaggggaagccctttaggaccagcgcctgccgtccggcatgctccgggaacattccttccaggctggatgtgcgttgccagggagtgagatgccaggagggagtgtcatcaccacagtcggccac

SEQ ID NO: 12217 - DNA, 2809 bp, Artificial sequence
  DNA replication origin
gcttcttgcggtcaccagtattgcagacgtgggtgctcgtgcgtgtcctgggcaggtgcatgaactcagcctctggtgtgtcccaggggcctgctgggcagtcgcacgtggcttcggagcctgagtggatgttacagaaccgttactcgaagagcatgcatcagctgctcccttgccagcaatgcatgagagtcttcccactaaggaaagggggcagcctggctgagtgcagtggctcatgcctatgatcccagcacttcgggaagccaaagcaggaggatcatttgaggccaggagatcgagcccagcctgtgccacatagtgagaccctgtctctacaaaatgcaaaatgtagctgggtgcagtggcatgcatctgtaatcccagctactcaggacgccaaaacaggggcatctcttgagcccaggagtttcagaccagtgtcggcaacatagtgagaccatgtctctacagaacattttaaaaattagttggatgtggtggtgcatgcctgtagtcctagctactcgggaggctgaagtgggacgatcacctgagcctggaaggtcagagcttgcagtgcgctgtgattgcaccactgcactccagcctgggtgacagagccagaccctgtctcaaaacaaaacaaattccaggttcaaatgccctcgctggtgatgtttatcaatatattcaagaaacaaataacactatctttaacccgtcaagagaacagcagtgaagcaagcattctccatcccatctcagggggcgagaggcccttgacacagaagggagataacagctcctaaaacatggcagtgaggctcaacggctgagcgcgtggacgggatcgcacctcgtggctgccgtgtctatcccaggactagaagtggttcagtgtcacaatggcaatgaatagaatcctccacaccaacaggtttaagggaaaaatcttacagtcatttcaacaaatgagaaaagaatgtttgataaaagtcaacgtcctttcaggaaaaagatacttcaagtaggaacagcagcgcctccctaacctgataaatgtgcaaacacccacagcagaagcacccccggaagcttttgctttgatatcgggaccaaggggcggtgcgttccagcaccatttcaccagcgtccttccgcaggtccgggccaaggcaggaaaaggaaatgaaagctaacgagatcggaaaggaagaaatacaacttctgacagtcacggaggatacggttatgtgtgttcgaagagctgaacagcaccagggtaaattatgaaatcagtaagacagctgggcagtttgctggagacaaaatcaatatacacaaaaatcagctgtttttcttcatatgccagagacaaagtgaaatttagaaaagatgtcatttacaaaagcctgagcctattaaatactaggaagaacaaacaatgtgtaagatttttatagaggaagctgatgtaaaaaaacatggctgagagacatttgagaagactcaagtgaatggttccttaaataactgtattcatgaaccgagaagtcccaagttacaaagatgtcaactctccccaaaggaattcaggcatctcacgtactccatagccagacttctgcaattgtttgtggtggttcatggaaaactgactctacaatttatgttgaaagtcaaagaactgggaatagctaaatcactctcgaagggcagagatcagggcaggaactggggatgtctgtattgaggcttattaaaaagtcataacatttgtgacaaggtgatgctgaggtggggacagaacagtagtccacacagcatggagtcgggacagggaggcagcggcgtgagtgggagggagtcaggacagggaggctgaggcgtgagtgggagggagtcaggacagggaggctgaggcgtgagtgggagggagtccggacagggaggcggaggcgtgagtgggagggagtcgggacagggaggctgaggcgtgagtgggagggagtcgggacagggaggcagcggcgtgagtgggagggagtcgggacagggaggctgaggcgtgagtgggagggagtcgggacagggaggcagcggcgtgagtgggagggagtcgggacagggaggctgaggcgtgagtgggagggagtcgggacagggaggcagcggcgtgagtgggagggagtcgggacagggaggcagcggcgtgagtgggagggagtcgggacagggaggctgaggcgtgagtgggagggagtcgggacagggaggcagcggcgtgagtgggagggagtcgggacagggaggctgaggcgtgagtgggagggagtcaggacagggaggctgaggcgtgagtgggagggagtcgggacagggaggctgaggcgtgagtgggagggagtcgggacagggaggcagcggcgtgagtgggagcgtggctttgggacaaccggacgcccacatacagaaagcagagagtgctgtccctctccacaccactaaaggcagacctgcatggattaaattcctaaatgtaaataaaccccgtcatggttttagaagaggatttaaagggctgttttcatgactttgaattagggatggatttgtgaaacaatctacaaaattattcgtcataaaggcaaagattggtaaattctaaaacattaaaataaagacattctgttacattaaaatctaccataaaaggagtgaaaagacaagcccgaagcaggacatgtgccatatatatatttgaccaaaaaagggaggcccagaagatttaaaaacgtcaacaggc

SEQ ID NO: 12218 - DNA, 814 bp, Artificial sequence
  DNA replication origin
catgttttgagaacatcaccttctccagagaagagacctggaagtgagtcttataaagccacatacaagattgtgtcacacacacacctgcctggggccttgggggctggagtagaaggcgcagaggctgctccaaaaggaggaggccagagggcacttctgcaggggggctgcagcacccacaccaggagggcagcagagtgtttgcaaacaagccacccatccagactgcagcctggggaggagggagggggcctctccaggcctcaggccgctgtgcccacggtaggctggtggtgtgagccgtcgtccatccatgatggtgaagaaagcctctccagctctaaggccacctcctgtcacccaggcatgggagaaagtggctgacgctgaagaccccagccccctcaccaagggaacccccagccccagccccttctggaaggcatggactgcctggagcccagcccggtcagccagctgagctaagaggatctggtgagtttaaagtcggtcacacttctctgggctctgtaacgagggaatggactagatgggttgtcagacatgagaaactcttggttggggtggctactagacaggccctcatgaagaaaggggctgtggccatcagctcactgaacaggtggggaaactgaggcccagagagggatgggcctgcctgaggcatggagggagttgcccagatctgagccagggccagacacccctggtgtgctcgtcttccagctgccacgtggagcagatcacaacatccccccgacccagcgtccccccacggaccccagctcag

SEQ ID NO: 12219 - DNA, 1480 bp, Artificial sequence
  DNA replication origin
ggtcgccccccaccaggaaggaggagagtgagggtcgcccaccacggccccacctctgcatcctcctggtaacagggctcagaatggaggctcttgggtacatgcagagggacaccctccccagacaccagagtcgtgatgtacagctccgtgatttcacacagtgactctgtgaggtccatgtgcccatttcacaagggaggaaactgaggctcatctgactgagccacccagagaataatggacttgcggtttcgactgagctgttggccttggtgctttgtcctccagatacctggaagggagggtgtggcaactcaggacacagaggacagggagagctcagcacccttgacctttgctcccaaaggactgtcactctccaagggaggctcccacacccctcacaggccctgtgcagtcacctgccccaggcaacatctcgttttgtcttgggcacctactctgcgctgggcccctcgggggtgttggaggcctattgtgcgctgggcccctcgggtgtgctgagcgcctactgtgtgctgagccccttgggtgtattggatgcctactgtgtgctgggccatttgggtgtgttgagcgcctactgtgtgctgggccccttgggtgtgttggatgcctactgtgtgctgggccatttgggtgtgttgagcacctactgtgtgctgggcccctcgggtgtgtgggactcctactgtgtgctggacccgtagggtgtgttggacacctactgtgcactgggccctttgggtgtgttggacgcctactgtgcgctgggccccttgggtgtgttggacgcctactgtgcgctgggcccctcgggtgtgttggacgcctactgtgcgctgggccatttgggtgtgttgagcacctactgtgtgctggacccctcgggtgtgttgagtgcctactgtgtactgggccctttgggtgtgttggatgcctactgtgcgctggacccttcaggtgttggaagaagtgtaaggctcagtcgttgccctccaagaaatgaatgtttagttggggaaacaaagtccacaggaggcagatggaagcatggccccgaccagacgcctttcatgtccgaggttggccttcatgtggccacagccccccgtgttcacccaggtgcgtctaataggccgccttgggttttatgagataacggtctgcacctgatagctgtgactgggaggcggcaacccggccagccaggtcagtctgtctgtagcgaaaagccaaggaatgaggtaatacctggacgcacgcactgtggtcaaagtcaaatcccccagggctttctggaagaactgagagtgtctctgggccttttcctgcttcctgcacccagtaacctagaagatcactggccatctttgcccgcagcagccccctttgccctgcaggacggaggctgtgacatggcttcccgtaggacgcgctgcggcattcgtgagtc

SEQ ID NO: 12220 - DNA, 1182 bp, Artificial sequence
  DNA replication origin
tggtggggaaccaggctccaggcatccgaggcccggataggcggtcggccacatttacggtgccaaactcagatcaaaggccgatggaatggggcagcccggcccagtctcgggtgcccacaacaaagccctggcccactggtcgcagagcacaaaaggcctgggctatgcagccttacttgtgtggggaaggcctcagataaagcgacagggcattctcggggccgctgtcccaccacagaaccgctcgtcacacatgaaacagcagattaagaatttccttttctatttttgctgcaaaatttgcactggaaagggcttggtttggaaacactctcccctttgagctgcttggctgcagatgaaaggggcgtccagcctgcggtccggcccggagggggcacttgcagcctcggcagcctcctcggtgtgacggcgataagggatcagaaacctattatcgctgtgtttattgtgctggttaaccattaaaaacggcggtggaggtgggggccggggtgatttgttgacttgaagaatggtttctggctctgcgagcgcttctggaatccttgcccctaagccccagcttggcggctgggtgaggaggaagctggggcaggtttggcctctgtgccccggggagaagagagacgcagatgtctgtctgtgggctggtggtgcccaggtggtgtccggcaccttctggggctgaccggcggttaaagacgacgtgttagggccacacgtggagaagttttcctgcagaggaggggccatctcggggagggaatagggcttgctggaggcctcacagtggggaagagaagggggtctctgcccagccctgccccactctccaagggtggagcacagagtctgggtgagaggcactggctgcggtcctgatgcccagggggtcgagggctggtgtgagtgtggacagggctgcttggacttggactacaagctcggtcgtggttgccctcggagcgtttctttccttttttggcgttgggggtggggagtgggagagtgttagggtctcactctgtcgtccaggctggagtacagtggtgcgatcacagctcactgcagtcgcaaactcctgggctcaagcgatcctcctgcctcagcctcccaagcagttggaactacatgtgtacgccaccgcacccggct

SEQ ID NO: 12221 - DNA, 1399 bp, Artificial sequence
  DNA replication origin
ggagacacgaattggcctataacaggctcttgtgcagaaggggaggtgatggaggtggcttctattcccaggaccctcaatgctcagaacggagagtggcagacaaggggcctggtctggaaaactgatccccagcaaagcctcctgctgagtgacgtcttcgtgcaggtgcagctcggacagagggagggaggggagggggcagggggacagagggaggcaggggagggggcagggggacagagggagggaggggagggggcagggggacagagggagggaggggagggggcagggggacagagggagggaggggagggggcaggaggacagagggagggaggggaggggactggagcaaacagcaggtggtgagctcctgggccagacacagccaattaccagacacaagggacaatcccatggccacttgggaccccagccctctccccgggagagccagggagggaaattcacctgcctgccccttctcatctcccaggtcccgctggtgaccgtggcccatgggatgtctctgacctgcagcagcgtcactcacccctctgagcaagctctgggaggcagcgtccctgtggatctggcatctgtagagactgcaccatgaacagccttcactcaggaggcaggtgatggccaggactccctgagacaggggacgcagaaggaaggggcagcgggctgtgccctggggggatcacactcccctgctcgcagctcaggggagctgggggtgggtgctggatcccctgaggcagcaggagacccctgccttcagctcagagtgagcctcccctttgtcctgcctcccatcagcttgaagctgcctcagtttccctccctcctggccctcatgaacctcctggtgggtccagggctttggccagcagagctagtgcatgaagtgtggagatgcgggatggcattgcccccggcagggaccccgcgagcctgcatgcacgctgtgcagactgatgagccgtccacggcactgactcaaaccatccagaggggagtgggggatgcccacaggtggggacactgaggcaccgagaagggaccgacccagggtcctgcttaaagagagacatcaggagacgcctggcacagacaagacttatttttccgggtgcctcccactaagccctgctataaatccaggaaactgcacgtgcagtggacagaaaattccaaagcatgcaagtggtcagggcccaggtgggagagacggccgggtgacaggaaggaagagagccaggctgggcatttcctgactcccagcctagcaagagaaggcagctggggggtgggagccattcccctgccaggtgcaacaggggccttgagcagggggctcggcacagcaaaccacgcccagaaa

SEQ ID NO: 12222 - DNA, 1149 bp, Artificial sequence
  DNA replication origin
aagacttatttttccgggtgcctcccactaagccctgctataaatccaggaaactgcacgtgcagtggacagaaaattccaaagcatgcaagtggtcagggcccaggtgggagagacggccgggtgacaggaaggaagagagccaggctgggcatttcctgactcccagcctagcaagagaaggcagctggggggtgggagccattcccctgccaggtgcaacaggggccttgagcagggggctcggcacagcaaaccacgcccagaaagccccttggtccctgtgggcctgagaccctcctccccaccaagaagtacgggtggcatcggtaggggaatgccacagcatgctggctcagcacaggaagcgaccatcgggtagaaacttccttccccacctagagctgccacatggccggggaaatccccggcccctcaggaagcaccagtggaaactctgccagcaccagatcaaccaaggatacccagacggcaccacccatcccaaagagtaaaaatgtcaggaaccacagttcatgacaccagccaggacctggtgccaacctacagggcggtggcctaggaaaataaagtacatccacaggactcagagtctctaagcagggccaaaatgcccaggatacaagcaaaagctgctcatcacagcaaaagctggaggacacacacgtgaatgagaaaagacaatgaatgacaccagtgccaggaccagctcgaggctgaggacacgaccaggaggccagggttgtcaccacagggcaccatgacaaagcaatgcactctccagaaacaaatgaagtagaagacctcagcaaagacacagaagttatcagaaagaaccaaagggaatacacagagctaacaactacaaacacagaaacaaaactctccggatgtactcagtagtaaagtgaagatggcagaggacacagccagtgaacctgaggacacagcagtagaatgggcccaataagaaccatagagagagaaagggagggaggaagggaggagggaggaaggaagggaggaagagagggagggagaaaggagaggaaaaagggagaagtgagggagggagggaaggaggagggaacagaggaagaaaaaacgaacagagcttcaggaaccagt

SEQ ID NO: 12223 - DNA, 950 bp, Artificial sequence
  DNA replication origin
cagccaggcagggcggcccagcagacgcagggagcggccgccagccgctaggatcccgatgccgccgcaagtaaggacaggcccgggtgctgccgcaggaggccaggcctgcgctcgccgctgtggaatgtgtgtttgtctgatgagcatccctgcagggccccagatggagggtgtgacaaggatgggggctgagtctccagggcccgggggcacctgcacgctgcccctggcaggggcccgggcatcccacctgagctggcagccctgagcctgagaccagggctctgactcacttctgggccgccctcctcacagagatctgagaggggctttcccggagccaggcagggaggcggccgtgcacctgcggggggactgagccccccggagggacgagctgcatgatgacagggagggaccctggcctcgccacctgtgtgcctggggctcccttcccagggcctctctgcacccctcaggccccctgggcttggcacctgggcccccagagctctgcctaaccagtgttggaagaggttgggtaagtcctgtgggtgggaatccataagggatcaggccccatgacagagtccacagcgagaacagacgcttccagccagccaggatcggccaaagcctaatcacgagccgacctgagctcgcagtgtggacgtccaccagctgcagtgttcagatatgggaaggagggtgcagcagccgccgtggacgctttcgccctgcaacaacagaacacacatcagcggtgtgcaaaccggggcccaaggccagacaagacgcaggcctacgtcacaacacaaggttctgcccgaacgccgcgacgcccactggttggagtatcgtctggggctgctgtctcaccacaggcgcggagttgagaggttgtgaaggagattgatggcccaaaagcacaaaatctttactgtctg

SEQ ID NO: 12224 - DNA, 1114 bp, Artificial sequence
  DNA replication origin
tattttacttttgtaaaatgactgctgccttctcctgagatcctagtaacctggttggtattgtttttgtcacttgcctatctacctaccatgtattcatcttccccacctaggctgtgagtgccagaagggcaggggcatttctggtctcatcctctctatgcttccagcacagaagcatatgatgaatatttgtttcatgaatgggtgggtggatggatgggtgaatggatagatggatgggtggataggtggatagacagatggatggatggtggatggtgggtggatggtggatgaatgggttgtggttagatggatggatgaatggatagatggatgggtggatgggtggatagatggatggataggtgggtgggtggatagatggatggatggatgggttgtggatagatggatggatgaatggatagatggatgggtgggtgggtggatagatagatggatggatgggtaggtggatagatggatggatgggtgggtgggtggatagatgggtggatggatgggttgtggatagatgggtggatgaatggatagatggatgactgggtgggtgcatagacgggtgggtggatggtggatggatgggtgggtggatggatgagtacgtggatggatgaatgtttggcagtttttttgagacctgttagcagggaggaaggaggcttgagctccagctgtggttctgttggtaacaagccctgggccactggggtcaggacgtttcttctctctgaccacagttgcctcagctgccaccctcggttcatacagtgagtccccgtctcattagcccttactggttgccctccgtgaagcagagggtgcagttgtcaggtttttgaggagagatgaagaagctcagggaggggcagccacagccttgggtgtggggagcggtcctgatgtggtatcccccaaccccccaatcttgtgcccactctgcagccatccaagtcagtagggtggctgcgggcaccacgagtgtacagccttattcttgtgatggtcaggaccctttgtgaaaattcaggtttcaggatgtgggaggagaatctctctatttctctctctgtgtctccctctcttt

SEQ ID NO: 12225 - DNA, 976 bp, Artificial sequence
  DNA replication origin
agggctccttcaaaatccccctccctcccagaccccttggcagactgcaggccttgagcatctggctgtggcttatttatttatttttgagacagagtttcactcttgttgcccaggctggagtgcaatggcgcaatctcggctcagcggtgcaacctccgcctcgtgggtcccagttcaagcaattctcctgcctcagcctccagagcagctgggattacaggtccacgccaccatgcgccaccacgcccagctaagtttatgtatttttagtagagacggggtttcaccatgttggctgagctgatctcaaactcctgacctcgtgatccgcctgcctcggcctcccaaagtgcagggattataggcgtgagccaccgcgcccggcctggctgtggtttagagcgaagcagttcaccactttcccgctgatgcagggcaatggattcatctagagaatgtttgcacgctacagaggaggtcagagagaaaagaaggaagcagctccgatttcgactgaaaaacagcctaggtgttccgaatattcccccaagtcccagctgaattctggggtggcaggacctgttttggtagcgaggagagcaggttacggacaaagcttggcctgcggagaccctgctgtgacaggcagggtcatgtctcactgaaccaggtgtctccaggggatgtgggagccccttgggggatctgtgtcctgcctcagccgagtttcacctactgggtgcagcgtggcgtggcgtgtgtgtgtgtggtgtggtgtgacagtgtggattgccatgttgtggcgtggtatgagcgtgtggtgtggtgtgacgtggtgtgggttgccatgttgtggcgtggtgtgagcgtgtggtgtggtgtgacgtggtgtggattgccatgctgagcctgacacaggccctgggttagctgtcacctctctgagcctccgtttggtcacctgaagggcttg

SEQ ID NO: 12226 - DNA, 974 bp, Artificial sequence
  DNA replication origin
ttcatatggctcagagtggtcagggctgggaccccgcccaggctggagactccgttactgccgctggacaagttcgaggagcatttcagccacccggcaagggcaccttctcaaggttgccaggggcttgaacggccggggcgtgtcaggaaaggcccgaccactgaggcttcgagctcctctgctccggcgtggtgtggccgtgggagacactcacgggggccagggcctctgcttggcagttggagaagctgatgagcaaaacgtggagctctgaaagaaaaatgcttgtggaccagctctttcaaaacaaggtgtcggtccgggagcggtggctcacgcctgtaatcccagcactttgggaggctgaggcgggcggatcacaaggtcaggagatcgagaccatcctggctagcacagtgaaaccccgtctctattaaaaatacaaaaaattagccaggcgtggtggcgggcgcctgtagtcccagctactcgagaggctaaggcaggagaatggggtgaagccgggaggcggagcttgcagtgagccgagatcgcgccactgccctccagcctgggtgacagagcgagagactctgtctcaaaaaaaaaaaaaaaaaaaaaggtgtcagggccgtcatccaagggctccttcaaaatccccctccctcccagaccccttggcagactgcaggccttgagcatctggctgtggcttatttatttatttttgagacagagtttcactcttgttgcccaggctggagtgcaatggcgcaatctcggctcagcggtgcaacctccgcctcgtgggtcccagttcaagcaattctcctgcctcagcctccagagcagctgggattacaggtccacgccaccatgcgccaccacgcccagctaagtttatgtatttttagtagagacggggtttcaccatgttggctgagctgatctcaaactcctgacctcgtgat

SEQ ID NO: 12227 - DNA, 1586 bp, Artificial sequence
  DNA replication origin
ccgtggctcctgggttcctctgtgtcgggtttttcacaatgtcgggcagtacttccaaagcagaaactcaggacaaacaccaagggctccacggtatcctgcaggagcttgggaaacagcgagtttttgaggggtggaggcccagcctgccctcggaagtagccgctgagatagtgggcctcctctaccagccactggcagggacacaggaagcaccctccatctttagagctgcagtgaggggtgggcagcggccccttgggcggggggcactgatcatagacccagacagtggtgggcagcccatctgtgctgcctgggcccgcttgtcaggccccggggtcttcaggtgcctgtcaggattgacactgctggtctcatcaaaggggatgccctggccttccagagggagggcccagggatgggtctctgggggttcctgcagctctcacctctgtcctttgatagccatcagagatggccaggcctggggccaccaggggtgactggggggagctgggactgagacggctgcggaggttttgcctgccctgggcgaggctgcaggggtgactggggggaggtgggactgagacggctgcggaggttttgcctgccctgggcgaggctgcaggggtgactggggggaggtgggactgagacggctgcggaggttttgcctgccctgggcgaggctgcaggggtgactggggggaggtgggactgagacggctgcggaggttttgcctgccctgggcgaggctgcaggggtgactggggggaggtgggactgagacggctgcggaggttttgcctgccctgggcgaggctgcaggggtgactggggggagctgggactgagacggctgcggaggttttgcctgccctgggcgaggctgcaggggtgactggggggaggtgggactgagacggctgcagaggttttgcctgccctgggcgaggctgcaggggtgactggggggagctgggactgagacggctgcagaggttttgcctgccctgggcgaggctgcaggggtgactggggggaggtgggactgagacggctgcggaggttttgcctgccctgggcgaggctgcaggggtgactggggggagctgggactgagacggctgcagaggttttgcctgccctgggcgaggctgcaggggtgactggggggaggtgggactgagacggctgcagaggttttgcctgccctgggcgaggctgcaggggtgactggggggagctgggactgagacggctgcggaggttttgcctgccctgggcgaggctgcaggggtgactgggaagagctgggactgagacggcttcgaaggttttgcctgccctgggtgaggctgcaggggtgactgaggggagctgggactgagagggctgaggaggttttgcctgtcctgggcagggctgcatcttcagtcccagggccccggacaccccaggcttgtccgtgggatggtgatgggaagggctgttctggggctactggaagttaagacaggaactgacgtggagagagcctccgggcctccaacttccagagtcagctcctgcagaccct

SEQ ID NO: 12228 - DNA, 833 bp, Artificial sequence
  DNA replication origin
gagcccccggcccggtccccgctccccaggggcggccgctgctttcttctcggccctggctcggttcacaaacccctttcactgtgtgcccagccctggccaacaagggcttattcagcaccggcctgtgtcccgttgctggggagggcagggccggagcgggaagaacatttgtgtaacgtggaaggcatgcttctctcaaagggtgggagcaggcgattcccagagaaggacacgcagggaggccgtccgtcggtgaccagacgcctgacctcatacaccggcaatgatgcacatgtcagacccagcttgtagccgctcagcccacccgacagacagcaccagtgcccagtggcagccagccccatgcagatgaaagaaaaaggcacagcccagggcggatgcttctgaggtgcaggtgcctgtctgtcatcgggcaggagcccgcaggtggacagcatggggcccgcacacctggggaccgggcgaggggtgtggagcgccgtggggcaccctgcagcatcgggtacatctgcgtgtggacagcaggacatcaagagtcgaaaaggtgcgattaacaagttgcagaacagaacggccgtgaacccattttatctaaacgtggtgtgtgcgtgtgtgtgttcgagggtgtgcgtgtgtgtgcctgtgtgtgtgtgtgcgtgtgcgatagtgtgaactgaaaagccactgggcctctggtcaaggcagacggggccactccccccccaagcctgctcgggaactaagcccagggatgcattcccacgcccagggcttgttctaaatgctccgcgggagggaggtcggtccct

SEQ ID NO: 12229 - DNA, 647 bp, Artificial sequence
  DNA replication origin
gtgctgccgagaaggccggccccatggctggggctgtggggggcaggggctggaacaaaggagcagctgggctggacagccttggccctgtccccagaggcttccagacacatctctggccctgagctcgagtgccttgtggccttccagggaggccggcacccgcttccccagactgggcagcctcgcctggtcccgtggtcctggggaaagacaagcctgggccggggacagggagagagctgcggagttgaaaagggatgcaggcccctgggagcagctgtggggcggaggcggggggtgggggccatggccagcactcggtgggctgggagaagtttcagggctctgggttctgggttcagggctggaagatggatggagggaccagcattggcttgagagcaaggctccgccgtcctggggctgggctgctgtgagccctcaggccatgcgtctgggaagctggaggtgggggtgtccgagggacaggggacagtggactgggcctgcaccaggagactggccggggcagccatcataggcaggtgtgtgtgggtggcggtgaggctcagcctcgggacacaggaggccacacatgagctgtgacctgcactggcacccagaccaagctgccctggagctgt

SEQ ID NO: 12230 - DNA, 1395 bp, Artificial sequence
  DNA replication origin
tccttccccgagcgattctcacacatggctccgggggctggcccacagcagagcctggtcttccggacgtttcttcaagtctcccgtgggcttcaaaggccccggagccgttgccctctgtccttggcctggtgtggtttctgggcatgacgggggttgacgggggtggcaggcggctctttggggctatttcaggatcaccacaaatctcgccttcctgtgaatggggacttttcctcaaacgtggctgaggagggggtgacgtcactcccaaattacaagggagtggggccgggtggggaagggtgtgaccccgtgctctgctcttggggcgggaggcctcagggcggtcacctgtgctgggctctgcgcaggacgctgcccccagagacctccaggccgctcaaacgtcagtgcgcgtctgggaaaatcagaaactgggcggaatgtttgtttgtttgtttgctggggggtgaggggggcaggggcccagcagcccagcggggaagggattcagcagccccctgggggagcagcagaggggcagaggcaggtcccatttccagcctcgctagggtaactcaagctcttaattagtcccctggctgctgagtgatgctgcaaaggcacctccggcccaactgtccctcccccagggcagaacaaagcgctcagagacctcattcagctctcctggggcagccacgccctgctgggaacagagaggagacaagagagagagggaaagagatggaaagagagggaggaggagagaaagagagagagacaggagagagacagagagagagagacagagagagacaggagagagacagagagagagagagagagacaggagagagacagagagagagagagagacagatggaggggagagagacggagagaggggagagagggtgagagagagacaaacagagacagagagagacagagacagagagagacagaagagtgagaaacagagagagacagagagagagagacggaggggaaagacacagagagaggagacagcataagagagagagacagagacagaaggatagaggggagagacagagggatggggagagagggagggaggggaagagatggaggaagaggagagacggatggagggggagaggcggaggggaagtgaaagatggagagagcttgagaggcggcaggagggcaggagcatgggagggagcagaggcccctctgaggcagtgtcgggtgggacccagggctctgtggcctcagggccctcctggacatgaagttgggggtggtcctgcagcaatgggaggccgtccagactcagcagaggcaggaaggggactaaagccgacttccggggtgttggggaggctcgctgtgctcactcat

SEQ ID NO: 12231 - DNA, 1341 bp, Artificial sequence
  DNA replication origin
aatggacaccctgcccaggacgtccgcctccctcttacagacagggaaactgaggcctgcctgcagctgtgacaagaagggctgtagagggacccgtgcatgtaggtgggggtctggccaccccagctggtgagctcccacttcatcggctccgcaggcccaaagcccagtcaggtgcaggaattgttaccccttcctcaggtggccgtgtggacccctggagagaattctgacttggagtctgcatagagtcagaaccaggctctgccacccacttggggagtctcttgcccaacctgggcttgtttactcagctgttgtgggcaagagacccctcgccacccggggggggagggctggaggatccaggggtctccccagacctgtcacagcagctcaggacagtggcgtcaggaccacgagggtggtgggcgttcctgtgctgggtgggggtgctgagggggtggcattctcctcttcctccccacaagagcctgaggagcccttgcctccggggcgtgtagatgcaagacaagcatcgttttactccagggaagagcaatgctgcccaggagggcccgtccacctgtggggcctggagatgcaggacaagcatcatttgactccagggaacagcaatgccggccgggagtgcccatccatgggaagatgctggagaatcgacgtggttcctggtcctgctgctgggtcaggacctcagaggcccctggagtatgtgcctagcccacccgcccccaggccctcgccttccataaccaactcaaaatgaaaacagaccaaaccatacaataaaaacgtgcaattttaacagtgggggagcctaacgtgggcggaaggcgcgggctgcccggggttggattccgggcctttccttaccagctgcacgaccttggggacgctgcgtacatctccctgtcctcgatttctcttatctgtgaaatggggagatcacagaacctctttcaaggtccctgtgagtgtgttcatagatacaaacccttagaacgatgtctggcattagacacagtgatcaacaatcaggtgttatcattgaacgtgacacacggagcccgtgtctgctggaatgaaagcaggttccttccgggtttgggctgctcctgagttcgctttgtgcctgtgggtctggacagtccaggcctctggggcctttccccagggctccagccagacaatggtggacacggcgcaggggcagagggtgctggccggcctcagtgtggcaggaagaccttctacccagagcatggggatgcctgagccaccccatcctgccaggagagcatggctggtgcgggcgcc

SEQ ID NO: 12232 - DNA, 2205 bp, Artificial sequence
  DNA replication origin
caccctcacacccctgggagtctgcgggaggacaaggcctcactgctgtccccagcccctcacccgaggcctggtgctgagtccattctgcccgccttcagctcgggagcgccagcagcacccaaggccccttgtgctccctcttcctcttcagggagacgactcccatcccacactggaagtcgcacatcaacacagccccccaccctcactgccacccctcctctgtgggccccagaggcctggggggtcccagcgttggagtgggaggtctggggtgggagatctgggggtcccggcattggggtgggaggcccgggggtcctggcattggggtgggaggcccgggggtcccagcattggagtgggaggtccagggtgggagatctaggggtcccggcgttggggtgggaggtctggaggggagatctgggggtcccggcattggggtgggagacctgggggtcctggcattgggatgggaggcccaggggtcctggtgttggggtgggaggcctgggggtcccagcgttggagtgggaggtccggggtgggagacctgggggtcccggcattggggtgggagacctgggggtcctggcattgggatgggaggcccaggggtcctggtgttggggtgggaggcctgggggtcccagcgttggagtgggaggtccggggtgggagacctgggggtcccggcgttggggtgggaggcccgggggtcccagtgttggagtgggaggtctggggtgggagatctggggtcccggcattggggtgggaggcctgggggtcctggcattggggtgggaggcccgggggtcctggcgttggggtgggaggcctgggggtcccagcgttggagtgggaggtccggggtgggagacctgggggtcccggcgttggggtgggaggcccaggggtcccagtgttggagtgggaggtctggggtgggagatctggggtcctggcattggggtgggaggcccgggggtcccagcgttggagtaggaggtccagggtgggagatctgggggtcctggcgttggggtgggaggcctgggggtcccggcgttggagtgggaggcctgggggtcccagtgttggagtgggaggtctggggtgggagatctggggtcctggcgttggggtgggaggcctgggggtcccagtgttggagtgggaggtctggggtgggagatctggggtcctggcgttggggtgggaggcctgggggtcccagcgttggagtgggaggcctggggtgggagatctggggtcctggcgttggggtgggaggcctgggggtcccagtgttggagtgggaggcctggggtgggagatctggggtcctggcgttggggtgggaggcccaggggtcccagcgttggagtgggaggcctggggtgggagatctggggtcctggcgttggggtgggaggcctgggggtcccagtgttggagtaggaggtccagggtgggagatctgggggtcccggcattggggtgggaggcccaggggtcccagtgttggagtgggaggtctggggtgggagatctggggtcctggcgttggggtgggaggcctgggggtcccagcgttggagtgggaggtccggagtgggagatctggggtcctggcgttggggtgggaggcctgggggtcccagtgttggagtgggaggtctggggtgggagatctggggtcctggcgttggggtgggaggcctgggggtcccagcgttggagtgggaggtccggagtgggagacctgggggtcccggcgttggggtgggaggcctgggggtcccagtgttggagtgggaggtctggggtgggagatctggggtcctggcgttggggtgggaggcctgggggtcccagcgttggagtgggaggtccggagtgggagatctgggggtcccggcattggggtgggaggcccaggggtcccagtgttggagtgggaggtctggggtgggagatctggggtcctggcattggggtgggaggcctgggggtcccggcgttggggtgggaggcctgggggtcctgccgtcgcatcgctggctctccctgaaccccctcctggtctggtctctcccttcccagtggacccagcgtcatcggaaacaaaagccaagaatgctgaggggcccccggggccagtgacagcggctggccgggcgccagcaatcacca

SEQ ID NO: 12233 - DNA, 1120 bp, Artificial sequence
  DNA replication origin
tcctgcaaagaaacaaagttgtcctctgctgagtttctgcccactgccagcctctcccaggatctgctcaggtcagtcagctgctggggagccggcctccgggtgcggggacctggaatgggccagtgcctcccgtctgggctggtcccggctccaggcctttgctcacacgctccccttcctggagtccctttcccatgtgtgggtccagctccccgcagggaatgcctgcgccccaagtatcagcagggagaccccgtgtgccatgtcctcccctgggccgtgtctcatgtctgagaggggctggcacatggaaggcgctgcatatgtgcccactgaggttaggcgcacagatgaggttagtggtatcatgggggctggaccccgagatcccccccgaccccggctctgccccgcttcctcacccttgggcctcttggctcaagcaagggcagggctgggtccatgctgagctggcaggacaagggacgtcctctgtcctccggtcagcacagggcaggcggcgggcagagaccggaggtggcctggggaggaaatgttgaaatttgcagccaggcaggaaatggacagattgttgaggaggagttggaatgccatctggaatgccgccccctcggtgccccccgttcgagcccagagtcaggaagtgcctggtgtcttggctggaggagctcgtgcccccgctgggagggtgcctgcccagtgctacctccggttcccagctagcggcattgaaggggaaatttggaaacagacagggggccgcagggcagaggagaaactgggaactggagccaggacagtggggtcctccctctgctgctgcccacgtggggctccctctgggctgccctgctggtgatgaggagcttgagaattggctcatgatgtgcatgggtttctgcacgctctttcacactttgcacatagccttctccacatgcaatgctcttccccagtagaaaactcctattcagtcttcaaaacccagctctggcagcagctccttgatcaagctgtccttgaagctccccaccctcacaggtgctttgtccccacccatccagttttacaggccagatccatgccttggaaccac

SEQ ID NO: 12234 - DNA, 1144 bp, Artificial sequence
  DNA replication origin
cctcagaagcaggagcaggctgcctgagagatggccttgaaacatgtgttcgcagccagcagtgcacagctgtttcctcttgtggcgtccgcagcctcagacgattggttttattagaggagagttgtgtttgctactgaccagcagccccggcggccctggggaggcggacgcccggaaaccctcccaggccctggtcatgtttcttctatgcgtgtggatgtttggggcatcgggcgctgggtggccggtcagccgagctcagcactgagccacgcaggggtctggaaagagccaacccacctggtctggtctcttggggacacacacatgggggcctcatttggtcactgggagaaccaggcccacatctgccagtctcctctgcacggctgagcctgaggacggatctgctggaaactcagcctcccccaggccccccagggccaatgacctgagtccactctgcagggacagccgtaaaggaggcagggcagccccaaggcgccagggcaggcaggagtgctggggcagagggagtggcttggttcggggccctgtctctccatttctgattgggggccctgggcaaattccacagcttcccaggctccgagcctccatctgtctaggacatggtcattcctactgcacagggtggggtgagccccgtatgtggcgaccaccccagagacgtccgctctgtgctgctgagggcttggctgtccttttggggatgggcccctcctggtggcttcaagcccagctcctagtgctcagctcggcagcgtggctggggcaggttcagctcggatttgcagctgtttttgaagaagacgcttgcgggtgccaccctgccccccacaaccccacagtaccaggggcactttggtgtactttccagggcagggtggggtgaaggtggactgtttggtggggctggaggcatccgatgaacatggttgactctgacgtgggggccaacatttgctttaagagcctatttcgaatattcaactcagaagtggagtttagaaagtgtatcggctttcctggtggtgtgagccttgctcggaaagctggatttgaacgtcgtctgggtttggcgttggccctcagggcccggtgtccttccccagcgctg

SEQ ID NO: 12235 - DNA, 2674 bp, Artificial sequence
  DNA replication origin
gtagctggagccaactgaggcagcgtccggaccctcagctctggaccccaccacagtcctgcagggctcccagcctgtggaccaaggctggccgatagagctttctagggtgtgccctggatctgcaccgtccaacatggcagccaccggccacatgtgtgtactgggcaccggaaatgtggctggtacagctgaggttctcaacttttaaaacgtcatccatctttaatttaacataagtacccacacaggggctcgtggctctcctattggaccagccaccctggagtcccctgtgagacacagctgtgcagggaagttagttcccagaactctgagaggtgcccacgtggggagggctgttgggtgggagctcagctcttggacctcccattctccatggcacttgcacccatgcgtgtgggtcactgggacaccctgggaacttcccacaggccagcctttctgttcgtattggtgccttcaggcccaggcagagtcccagacagaggaaggaagtcctcggctgagctttgtcgaagtgatctggctttcctgacatccaatttttctttctgcagtttacaataccccagggcttagctgaaacctccgtctctactttgcaagctgccccagatcctaatgagcattcacttcccagggatttgcagaattgttttaaatatagactctaccaccaaccccataaaaagttgtattggtggtagtcattcttcagcaggccggtcatcatgtgagacttcctccgagggttacgtaagcgtgagtgtggggttctgggagggggaagtggctctgtgttggctccgtgggcagccagggtgcttcgtaccagtcatgcagtcaccgtaaagttaacacctttgacttcattaggaaaaaggaggaggttccagatatgtgtggcttatgtagaggtttgaaaacaggatttcagaaatgacttttagctaggcttttggtgaccatgtctcagcactggggatagagcctttggccaggggcctggtgggactgtaggacccagggcagaggcgagagagcatgcagttggcatctgaagacctgggcttgagttcagcgtcttctgccagcctggggtcctcagacactggaacactcacccgcatctcactaattaaggaaataggctgtgagggggatggtaatggcaatgacagtgatgtggcagtggtggtaggacagttgcaggaatgacagagatggtgatggtgacagaggtgatggtcgtgaggaggtgatggccatgggaggcgacggtcatgaggaagtgaaggtcatgggaggtgatggtcatgagaggtggtggtcatgagaaagtaattgtcatgaggaagtgacagtcttgaggaagggatggtcttgaggaagtgacagtcatggaaggtgatggtcatgaggaagtgatggtcatgaggaagtgacagtcatggaaggtgatggtcatgagaggtgatggtcatgagaggtgatggtaatgaggaagtgacagtcatgagaggtggtggtcatgggagtcggtggtcagtgagaggtgatggtcataggaggtggtggtcaatgagaggtgatggtcatgaggaggtgatggtcatgaggaagtgatagtcatgagaggtgatggtcatgaggaagtgatagtcatgagaggtgatggtcatgggaggcgatggccaatgagaggtgatggtcatgggaggcaatggtcatggggaagtgacagtcttgaggaagggatggtcatgaggaagtgatagtcatgagagatgatggtcatgggaggtggtggtcaatcagaggtgatgttcatgaggaagtgatagtcatgggaagtgatgggaggtgatgattatgagaggtggtggtcatgaggaagtaatggtcatgaggaagtgatagtcatggggaagtgatagtcgtgagatgtggtggtcatgagaggtgatggtcatgaggagctgatggttatgaggaagtgatactcatggggggtggtagtcatgggaggtgatatctgtgggaggtggtgatatttgtgggaggtggtaatgcttgtgggaggaggtgatggccatgaggaggtgatggttgtgggaggaggtgatggtcatgggtggtgacggttgtgggacgaggtgatggccatgggaggtgatggttttgggaggaggtgatggttgtgagaggaggtgatggttgtgggaagtgatagttgtgggaggaggtgatggttgtgggaggtggtgatggttgaggaaggaggtgatagtcatgggaagtgatggttgtgggaggaggtgatggtcatgggtggtgatggttgtgggaggaggtgatatttgtgggaggtggtaatgcttgtgggaagaggtgatggccgtgagaggtgatggttgtgggaggaggtgatggttgtgggaggtagtgatggttgaggaaggaggtgatagtcatgggaagtgatggctgtgaggaggtgatggccatgaggaggtaggataatctcctatgtaatactctagactttcctatttttttttcctgtgtcaacaaaggctggggagcccccgtctagtctgaggggcctgatatgtttttccctaacgtcacatggctgggagacctgggg

SEQ ID NO: 12236 - DNA, 972 bp, Artificial sequence
  DNA replication origin
aggaggaaggaggagggaaggaggaaggaggagggaaggaggaaggaggagggaaggaggagggaaggaggaaggaggagggaagggaaggaggagggaaggaggagggaaggaggagggaaggaggaaggaggagggaaggaggaaggaggagggaaggaggagggaaggaggaaggaggagggaagggaaggaggagggaaggaggagggaaggaggaaggaggagggaaggaggaaggaggagggaagggaaggaggagggaaggaggagggaaggaggagggaaggaggaaggaggagggaaggaggaaggaggagggaaggaggagggaaggaggaaggaggagggaagggaaggaggagggaaggaggagggaaggaggagggaaggaggaaggaggagggaaggaggaaggaggagggaaggaggagggaaggaggaaggaggagggaagggaaggaggagggaaggaggagggaaggaggaaggaggagggaaggaggaaggaggagggaagggaaggaggagggaaggagggaaggaggaaggaggagggaagggaaggaggagggaaggagggaagaggggaggagggattggtatggtcagtattttttatttgtccgtctgatggccaggtagtggtgtctgattgcggctttactttatgtcctcctaatggcaactggtgtgaaacatccttccattcgctcccgtgctgtcagcggatcttctttgatgaaacgttagctgatgtgggaacagctactctgccaggctctgtgccaggctctgaaaatctgtgacagaggcacataagacatccttgctctcttcatggtgtttacaacctcatgggagaggcaaacacataaataaacctggtgcctcgaaggtttggaaacagagcaacagagctttggaaagggctgggtgggccgctccttcccttgttgccccctgcacacg

SEQ ID NO: 12237 - DNA, 1079 bp, Artificial sequence
  DNA replication origin
acatgaatgccgggaggttccaggatccccccagaggcttggagaaggcctgggcaggaagccaggtggcagcagcaggagctgagcagaggtgggcaggaggatacatgcagcccgagggcagatcccgtgtatgcatggccccaactgctccgggtcctgcaccagcctccccatggctggctgcttctcacctggacaaccttgtcgcccacccatctgcgtgccatcttcagccacctgctctcccaagagcagccagggttatcttctccaaacccaaggccaccttgctctccccacccctcctagagcccctgctgctctgtaggcttagaacaaagttgagaagcttccagggctccgggccctgtctgaccctgactgtcccagtcacaccctggcccctgtctgccacctcatgacctcagctgagctggctttgtcgtggcacaggggaaccggagcaggggggctgcccaggctgaaggaacggggttgaagcgcaggacttttctgatggggcggcagctgggaaaacggagtgagtggccggggagggctgtttatgggatggccgtctgcagggccttggcaaccagagccccccgtccagacctccaagcttgcctggtgacagggcccggtgtgagctggaccacaggtacttggtaggcctggtctgggttggggtcagggagtcagagtgcttgggagacaggtgccccctcccaggttcggccaagcatggggtgagagtactgggctctgctgggctctgcccagctgtttgatgttggatgacctcactgtgaccttgggctgcaccactgccctggttggaagagagggaggctcggtgggatgggctgagctccaggaccgccaacccttacccccctttgcccacctgtgagtggcttccctgatggaaagactgagtgagaggactccttagtggccggcccttgtagaggcacagagctgcaggagctgtggtgagggccggcaccatgagacctctagaccccaggctcttgaagcgtccctgcctgccctccctgaaggacttcccaggc

SEQ ID NO: 12238 - DNA, 1230 bp, Artificial sequence
  DNA replication origin
acaggtgggcaaaggggggtaagggttggcggtcctggagctcagcccatcccaccgagcctccctctcttccaaccagggcagtggtgcagcccaaggtcacagtgaggtcatccaacatcaaacagctgggcagagcccagcagagcccagtactctcaccccatgcttggccgaacctgggagggggcacctgtctcccaagcactctgactccctgaccccaacccagaccaggcctaccaagtacctgtggtccagctcacaccgggccctgtcaccaggcaagcttggaggtctggacggggggctctggttgccaaggccctgcagacggccatcccataaacagccctccccggccactcactccgttttcccagctgccgccccatcagaaaagtcctgcgcttcaaccccgttccttcagcctgggcagcccccctgctccggttcccctgtgccacgacaaagccagctcagctgaggtcatgaggtggcagacaggggccagggtgtgactgggacagtcagggtcagacagggcccggagccctggaagcttctcaactttgttctaagcctacagagcagcaggggctctaggaggggtggggagagcaaggtggccttgggtttggagaagataaccctggctgctcttgggagagcaggtggctgaagatggcacgcagatgggtgggcgacaaggttgtccaggtgagaagcagccagccatggggaggctggtgcaggacccggagcagttggggccatgcatacacgggatctgccctcgggctgcatgtatcctcctgcccacctctgctcagctcctgctgctgccacctggcttcctgcccaggccttctccaagcctctggggggatcctggaacctcccggcattcatgtgtgcaggctccaggtctcaggatttggagcccggagctgattcagtgaggtctcccacttgaacatttcacaccccagcccctccctgtattgctggtatctgccctcccgtaaaccatatgcccacaactctgtccttcaggttctgcctctggggcacccaggccaaggcaacccccaacatcccacttagtagcctcatctatgaacggcaccccgatttcctcgggaaaccccgtcctcccccattttctgtcttgtgcttctgatggaaatctatcccacaacagaaacggtacatgggactcagacccag

SEQ ID NO: 12239 - DNA, 863 bp, Artificial sequence
  DNA replication origin
ggccgaggcgcgcccacctccagggtccccggcacgggagccgcaagggccaggcctccttcgcccgcaccgaccctcctagcccgcccgcccccggggcgccggagcctggaaccaaaattctccctgcaaacggaggaggccaccttcagcttcatcgctgggcacgggtggcggtcacagcgctcccggggtctgtcaccctcgccgggcgccccgggaagcggcggaacccacaggcggcgggaacctgccacttccggtccagccttggccccgggccgcgtccacgtatcgggagcctggggtccccgttctcaggactgggcctgtgtcccctcctcctgcccatcccggaaacccggggacctcaggaccaggacttcctggaaacggctgtacagaggggacgggggaatccgtgagggggatggaggggatccgtgaggggacgggggatctgtgagggggacgggggatccgtgagggggatgggggatctgtgaggaggacaggggatctgtgaggggacgggggaatctgtgagaggacaggggatctgtcaggggacaggggatctacgaggggaccagggttctgtgagaggatggggggcttctgtgagggaacgggggtctgtggggtgcaggaaattctgtgatttttgctacttgagttcaaatacctgctcttccttttggacctggaggtcgccatcttccctggggtctgtatcttggtccttgctgaccccatttccagggagcatgcagaggcaaatctctgtgaatcttggccctttggtgataggtgcagggcaaggagcttcagtcccaggctgggcacctgcccaggacacaacc

SEQ ID NO: 12240 - DNA, 894 bp, Artificial sequence
  DNA replication origin
ggaggggaggggaggggaggggaggggagggctcaccttgacgctgcggtggtggacgcgggagggctggcacttgacactgctcgtgttgcagcagccggtgcagcgtttcacctccacgcacgggggccagatcaggaagttggcggacgtggggtcgacctgactccgaggaatctcgtaaatgaccgtcctggtcttgcagacagcggggacagcttcctctgcaacggcgggggcacagtgagcggggaccggcctctgcgaccacggccccaccccagggctgaggcggctccagctgggcctggggggcaaccagggtaagccacaggccaggattcctcccaggcagcagaggctgagctgggagcagaggcttaggggctgggtgggcaggagcaccacacatccagaggagcccagcccggtgcctgcaggctggagggacctggacaggtggggccagtggctcggaggggaggggaacttagtccaggtggggccagtggctgggggtggggagaggggaacttagtccaggtggggccagagactgggggtggggagaggggaacctagtccaggtggggccagagactgggggtggcaggggcagaggggaacctagtccaggtggggccagtggctgggggaggagggggccttaacagtgaatcctacagcacttgctgcatgctctagccttcaaaagtggtctgaagggtgcaaaatgcagaccccacagcaaatgtcacctggggagggcctgcttgcatcagctgggactagccagccacacatgacactttaaggtggaagatacaaaatccatcttcatggaggaaaccacagctcagagaggggggtccacctgctcagggccccagagcc

SEQ ID NO: 12241 - DNA, 1481 bp, Artificial sequence
  DNA replication origin
ctctgcgatgaacttgttaaaaagagtaactaaaggcagcagaattggaagaagttacgtgacatgaagattcttctctccctgcaaaggactctgaaaaagggggggcatgcggggattaagtgaaatcacatggtctagtcatttggaaatttgtacctaattatggtggtggagaggcctgaactattttcgtttcatgccaaaaccattttctaacaaggccgatggtttctgtagtttcttgacccaggaaatccctgggctgatccttatcgggggcggagggtggggggtgcggtagagtttcactcccacagcacagctgggcggggggattttgaccggatccctcagtggataactctagggaaaaggatctggctctggtttgtgggggggaatcccttgcctgaatctcgctggtcctggatgggtttggaaaagtggggggggggggctgcttcctggagaaggtttcagggctttttctgggggggggtgctagcagaaggggaggcttgtggagagctgggcctcctcgtgggactggctttggaagctgcagggaaatgggccattcactttctgctgggactattcttattctggtcttggcgccccgcctcctccacccccacccattatcgcctttagcattgcagcttcgtggggtatgctgatggcattcctcacccgggggcttctaggtcgtagggtccgaacagaaaaaaacaaggatgcccctaagctagtcctggccggtttcaaattccctctgcagtcatgtcccaggagctctctcctcctgccccagggaatgcagagtggatctcagccctcctgtgtccgtgagaggttttggggtctgaataggattctcctagtgtctgggaggctttgtgtgtgagaatatgggggtggcatctacctcctctcttgcccctggtgggggaccttttgtaacataggggggcctccttggtcctgtccagtcccctccccaggtgtggctgaaaacagaaccagagaaacccacagtctctcgcctgaggacaggagaggcaccggctgctcctccagcttgtagggggtgtcttttcttcaactcccgttctctgtcgtagggagggttgtaaactggttgaggtcagttctcattgggtaagcatccctccgggtcctggactcccttttcaatccagaggtgcttctggtctgttaggggcaggggacagtgcaggggctcatgaggaaggggctgggtgctgggagaaacccaacgcaacgaactttccctcggagtccctttataacccttccaggctgatgttcttggcattaggtgcctctaaggcccacgctgtaggaagcagaaaagaggctttgaggaatcccaggggtgcgccccagctatgctgactcctcctccaggtgggtggggctttgtgactggcatttggctcctcccagcatgcagg

SEQ ID NO: 12242 - DNA, 1544 bp, Artificial sequence
  DNA replication origin
cctccccaggggctgcaatgaggacgctgggagtttgaatggaaacgaaggccggggaggggggtccgcgcgggcgtgggttttttatccaagtcggtgacctcttggttaagtcagccctgcggtttcaacgcccaatccccccaaaaaagcctgtgggggtccacgtctccttgtgtcttccggggatccggcggagaatgtggcggggccgggcaggggggtcccagtcccacgccgggtgcgtcgtgccccgagtctccccagaaggcggctgtcgcgcggctgcacaagttttcgcctccctcgcgcggccgctgttgttgtggtcgccatggcgacgggtcgcggttttatttttaatagcggccggcgattagagagatgcctgcaccgctttcgcctaagctctgcgtcccccgcgggtgaagcacccacgccccgccccagcccccgcctcgctccagcgccccttgcacgtccccaggtggccctaaactctagctgggcgcacccgtagctccaggccgggcaggggagccgagggaagcagccatctaggccctcagaggcggcgaggacccccaggatccctcaagctgggagggacgggtaccccatccccaatacaacgcgaccttcctccttgccttccacaccgtcttaccgagtcctctaaccccacagaggtgtcctcgggccccctctgcgcgcgagcagtccgaggcccaggaagacaggatgcgcgccactccgggataactggccgaagaatgaggccggggtccggcctgcgtcctggccctgcgagtccggctctttccagaagccatgcagtgggtgtcccctcccaagccgcaagttccccctggagggacaaggcctggctttaaggggctcctccacgtttccaaggctcccctggttctgtcccggtcccgcttggtcctgaccacccagagggcatgcttgaccgcgggggtcgtggtgtggggctgcggccaacggaagggagagacgtggggagggggcctgcaggtgtgtggaagggcgcgtgtagacgcgacccactgggagcggagggagaggcgtcgctccccaaatatttgggggaaggggagagcccccgaagcgctctccggattcggcctttgaaatgctagagctggcctagctggggatgaaagaccgcccgcggggctgcgccttaacggcctttgtctggagggagggcgaccgcgacgggggcaggggtttaatcgacagggttgggggtgacggctgggccgggcgggattctccgctgctcacccaaggaagcgtctcctgggctccaggggcctaggccgtctagcctcggggtctgcacagcacgccaccccgctggacccggtaccaggacgcgtagaccccctggcagggcactgacgagcacctggacctgtagtcagggtccaatccctcctggtctagggaggcgaaatccatccagcccaggcgcacccgccctttctcggcgtgggagccgtctagccacgctcaga

SEQ ID NO: 12243 - DNA, 1177 bp, Artificial sequence
  DNA replication origin
aggaatcgagtttcacttccagccgctattagtcggttcacacagttcactgcaaacatttgataatgaggctaaatatactcccgcgtcggaggaggcgtgggcgtccccgcccaggcccgggagacagaggcgctgaccccgggacagagcctggctttgtgcgggaggcagacgcgccccgcgcgccgcccccgaaacattcgcaccccatgctgaggcgcgcgtctgggagtccgtgggcgccccgaggtgagcccggggcccctggcggaagcagcggggagctcccggcgggtgcggggaggtgctggtgggaagcaaggtgcacctggcggcctgggatgtccggtcgcccccggagccggtgcatccggcctctcccggcgcgccccgacgtgcccgcgggctcataattaccgtgagtcaggtgccccaaataggccgagcgaggggggccgtcgcgcagcaggggcgggtggccggacgtctgcccgggactggttgcctcccgcccctccccaagaccctggcacccagggagggcgggaaaggccttggccattcctctgggtaggggactggagaggggaagaaactttcgccgagtccagcgctgccccctcatacccatccccacccaggctgcgtgtccggggcccctccggggcttggcaccagcaggcacgcagcgatcgccgtcgttgttatttagtagtagtagtaacggctgacatttacagcgacgtcgatggcgccaggtgccaagctctttccttgtataatttcatggacactcacgcatcaactctaagcgaagacttggagcggggctcagcaccccaggggtacctctgcaacctcggtaaatatagactatcctcaattcgcaggggcatttgtacgtggggtgtacaggcaggaacaggaaagacgctgtggccacccaggagtaggggcggcagccaacaccccctggatccccagttccaaggtgcagggaggggggcagaggccagttccctccgctctctgccccttgaccttggccttggtgagctctgtccctagactgccctgggtgtctgttccctcatctgaaaagcgtgaggcccacagccgtcactgcacacagctgccgtcactgcacacagctgcctccactgtcgggaagcct

SEQ ID NO: 12244 - DNA, 2328 bp, Artificial sequence
  DNA replication origin
cgtgagtcacggcgcctggccccagaaatgctgttgcttctgttttataagaggcactggggcatgaaaagctatatctctgatggggctgtgtgcctggcgggtcctgcctggctctggcccccaggtgccctctgaacggacagtgctgcctggggacgcccctggccacacaggccagcccccgccactgggccagcagagctgggctttagagttgacctcctgccgactgtgtgacctcaagcaactcacgctgacgccctgagcctcagtttacccgtctgggatgcgatgactgccactccagtgctgctgtgatgggaaaaacagaagccgtgctgaagaccctcccggcccctgcagacttgccaccagcctggtccctgttccgccaagcctgggagtggggccgggcaggggcaggcggggcaggggcaggggcggggggcggggggcgggggccagggtggcagggggtggggggcagtgctcagcgggtgggctggttgggggcgtggctgtcctgtgacggtgccgtggctcggtgggctggcctcaaggggaggctggagggtctgggtgactcctcttcctggctgagagagactgcttcacccacactgcccttgggggccaagtgaggtgtgggggcaaatggctttcttgtgaaacagactccgaacaccctggggtaggcaccaaaccatgctgaggaataaagagctgagaagtgggagggagacagtaaactgaaggagaataggaaagaggaggaaaaggaggtgagcagggaggtgagcagggaggtgagccacgaggtggggggtgaaacagagagaggaggtgagggaggaggtgagccccagggtggggtgagagaggaggagacaggggaggtgagggggacaggggaggtgagggggacaggggaggtgagggggacaggggaggtgagggggacaggggaggtgagggggacaggggaggtgagggggacaggggaggtgagggggacaggggagccacgaggcggagggtgaaacagagaggaggagatgggggaagtaagccacagggttgggggtgagacagagaggagagggggtgagagagaaaggaagtaaaagagcaagagaaggtgagagagagaggaggtgagagtcagagagggaagtccccagccccgtgcccactccatggctgcctggtctttcccctcagcccacgcagagagcagggggaagctggtcctcccaccccaacgcccgtcaggaccacgctcacatcactgcagcagacgggactgcatacgtacagcatggtgccaaccagtgggacatggagacaccatctctctgacccccaaacagaacctgacgtgcgcaggtgtcctaaaccagcaggactccccagtaggccctgcaggtgcaagatcgagctccagtttgcggctgaggagacccattgacgtccacgctcatggtggccctgacctgggagctcagggggtgaggccaggcgggggaactcctgtgtccttgctgaagttctgcgttgggggctggtgacctgactgcttagcctcctgcaggaggatccagctgcccgtcatctcccacctgtgagtttccagacaggaagagagaaagccacagcccaccccacctgggtctatccttagacatcatgacccttggctgtaatgacaagaacccaatgcattctggcccaagaaagcaagagaatgcattggtctatgtacctgttgagctcaggagtgagcagtttcaggcatggctggatcagggccctcggcccgtgtcttcagagctgtctcctgccctcatctccctttcacggcggcaggaaagcagactaacaccctcgctgccccagactcttggagtggctggatcaggcactgggacctcgtctccctttcacagcagcaggacagcagactgacactcagcctcacactcactgccccagactcagagctgcgaagctgcatctcactggctaagtctgggctcgtgctgccccaggtcagtgaccatggttggggacaatgctctgcttggccagatctggacacagcacccaggacccctagggtcaccaatgagaaatggcccccggccctccaggcagaagagaacaccacgctcctcccttcccaggcctgcctgaggggacttccctgtcctcacccaactgcagctcccgcactgtcctggctgggcgacctgtgacccctggcaactgtaaccccagacatagctggcgagcacttagctggagcactgaggcgtggggtgggag

SEQ ID NO: 12245 - DNA, 1057 bp, Artificial sequence
  DNA replication origin
tgtgggtttggggctctgtttgggccataatgagatcagcttgtctttagacacccatgcagaggtgttgggcagagctggacccgagtccagttgtcaggacggaggcagtgttgcccccatgagaagacggtgaagagtgagctctggaccctccagggtgaagaggaggagccgggccaggcatggtgggtcacgcctggcgtctcaccactgtgggaggccgaggcgggaggaacacttgagcccaggaattcaagaccagcctgggcaacacagtgagaccctaactttacagaacatacaaaaattagccaggtgtggtggcttgcacctgtagtcccagctactcgtggggctgaggtgggagcatcacctacgcctgggaagtggaaattgcagtgagctgtgattgcagcctgggcaacagagcaagaccctgtctcacaagataaaacaataaagaaaagaggagcccgggaaggagtagccggggttgactccagaacacagggctgggggtcctgaaacaggagaaggcggcacatcgggggcaggtgtgcaatgctgcagtgatgtcctatcagataagagaactgaccagaggggtcagtgctggcgaggtcgtggcgctcttcacaacaggcgatccatgggtcggatggcagttcaggagtgggcatctcagccccctggccaaggactgcgttctgagaaagagcttcattgatcttaccggtaggcagacgggtggttcgcactctttcttgctgacgagaaccagggctctccagccgctcctggcagccgtcttgtcaccatgagggaacccaagaggaggaccaagatgtggagccggacccttgatcagacctctcctgaatcccgcctctgggcttcccagtaagatccctgactgtgtttgggctgagtttctattttctggagctgaacgcatcagctgaaatagccagactgtccaacaggcaggttaagcccctggttcacgtgtttgtcacccatcctcaccttccagatgtccagtcccatgagggtg

SEQ ID NO: 12246 - DNA, 959 bp, Artificial sequence
  DNA replication origin
tgcaggcacgcagcgcgttgtataatccacccatagggctttcttcagccaggcagaaggtcactgggtcgggttccactgatcccagcagggggtctgcttggggacggagccccgtgtcaccgctggagacgtcccttagaattaagactgtcagcccctcaccagcctccttagccaaacattgttttcacttgcgcagttggggaaattgactgttgtatctcagaaatgcacttgaaaaggagcctggcgatccccggcctgggatgctgcggccctgcccgggctggctggcgtgcgctgtgctgggtaaagcagagaattacacggtcacctaacgtgcctcaaaccctagtcccagctcttccttgctgtgtggccccaggcacgttccttaactcctctgacactgctcatctctaaagtggggtcataatgtttgccccgtggggttggaggtgagagtgaagcaagactgcgcaggtgaagctggttgcagggggttggaggtgagctgacgcgagactgcgcaggtgaagctggttgcagggggttggaggtgagcgtgacgcgagactgcgcaggtgaagctggttgcagggggttggaggtgagggtgaagcgagactgcgcaggtgaagctggttgcgtggggttggaggtgagctgacgcgagactgcgcaggtgaagctggttgcagggggttggaagtgagctgacgcgagactgcgcaggtgaagctggttgcgtggggttgggggtgagctgacgcgagactgtgtaggtggagctggttgaatggggtctggtgcagaggacattcacggctgtggagctgctgtcgcgtatgacgtctctgtcacacccaacagtgatgggaactgggccctccccacgtccggcatgtgcctcccggagcttctgctgtgtgcgccatgtccttcagctcccagtg

SEQ ID NO: 12247 - DNA, 2392 bp, Artificial sequence
  DNA replication origin
ggagccgagtggccccacggccggatcaggggccagggcagcggtctggctgtcacaggggctgccagttggtgcctggagattctaggcgtggcgggcaccagcagggtctcctgacccacatctctcccagactgatgaggtggggagttactcattaacccaggtacagcctggctggcatttgttgaggctgggtctgggtgagccagggtgaaccgagcccaccttgaaatgaagtgtttgttctccaagagcagctgctctcagagggccgccgtctgccaggccggctggggctgtggggacgtgatccctgggtacccggatggtgccgtctccggaccctggagggccaggctgcaggtgctgccaccttcctgggcctcagcttccccggctgtaaaatgggatggtgacattcctcacgcaggtgctgcacttctgcggcagacgcggggccctgcctccggggactagggaccggtcggagcgtggtgcagagagagctgctcagagtggaattcggggagtgtctgaggccggcggcgtgcagggccggcgacagagctacattcatcaacacctgctgagggtgtttggtgttgaggacagaccgtttccccggctgttcagaggaagcttctctagtgtgtcttcccagcggctctagtgtcagcgggacattcctaggttcccggcaggcggagtctcaggggggacagtgacacggcagccccgtctggccacacagcccacgctttccctgtgccaggccgcggtttccacacctggggccctggagggaccagagtccaggggacattcagctaccccagccccgccgtccgcaggctgcatctgtgcgtagcacgtgctgcggcggtgccctgtgatatgctgcccacggcctctgtgttaatcattgatctgggcaacccgcagacccctccccacttccccgtgtcgggggtcaggagggagcttagtaggcatgtgaccctgagacagcgcccccctcccctttccccggggaggccgggatggctggatgagctcccagtccttgagagttggtccaaggtcagcttggagaccggcagccctgtgacaaagataccgacccccagggaaggtcccagcgcgtcccctcccggctcctccgctcgcctcggcaaaggtgcggggggccagtgagttccatttcgaggagctgtgtgtctgaacaaaaatgggagctgggccaggccggacggtggtctctgggcaggtcccgcggtgctcagatgccctggtcacaggtgccgggaacgggagaagcagcagcattggatgtggtggtggcagtggctctggagaaggacctgggtgggaggtgggggtttgggtggtgacgtggtgatggcagtggctctgcgggaaggacctgggtgggaggtgggggtttgggtggtgacgtggtggtggcagtggctctggagaaggacccgggcgggaggtgggggtttgggtggtgacgtggtggtggcagtggctctgcgggaaggacccgggcgggaggtgggggtttgggtggtgacgtggtgatggcagtagctctggagaaggacctgggtgggaggtgggggtttgggtggtgacgtggtggtggcagtagctctggagaaggacctgggcgggaggtgggggtttgggtggtgacgtggtggtggcagtggctctggagaaggacctgggtgggaggtgggggtttgggtggtgacgtggtggtggcagtggctctggagaaggacctgggtgggaggtgggggtttgggtggtgacgtggtggtggcagtagctctggagaaggacctgggtgggaggtgggggtttgggtggtgacatggtgatggcagtggcgccgagggaaggacccgggcgggaggtgggggtttgggtggtgacgtggtggtggcagtggctctggagaaggacctgggcgggaggtgggggtttgggtggttacatggtggtggcagtggctctgggagaaggacctgggtgggaggtgggggtttgggtggtgacatggtgatggcagtggctccgagggaaggacccgggcgggaggtgggggtttgggtggtgacatggtggtggcagtggctctggagaaggacctgggcaggacatgggggtttgggtggtgatgtggtggtggcagtggctccaggagaaggacctgggtgggaggtgggggtttgggtggtgacgtggtgtcggcagtggctctgggagaaggacctgggtgggaggtgggggtttgggtggtgaccccctgtggggtgacccctcacgtgtgtcccaccctgcacccgcctggctggcactcacgtctgtccacctccac

SEQ ID NO: 12248 - DNA, 1499 bp, Artificial sequence
  DNA replication origin
gcctgcttttccaggcccctggagttcccctcccggagacctccccacagcctgggggcagctggaccccgggagccggttccccgtaaaaatcccgagaccgaaattccccagcttcctcctatacggggcggcagcggcctgggaggtgttgctatgggaatgctagagtggatttatctcctctcttagcaaattaattttatgaatgtccacaacgttgaaacaactgcaaaacaacacgttgcaaagctgcccttgggcctgggaacttttcctggctcatcagagccccgcgcctcctccccgccgacgcctgaaccaggggacggcccattgttcaaaatccacgggtcgctgctggatgcttttaggaaagggacccctgcaaaacagcacccctggaggaccccgtgcacaccccgtcatcgggtggggtcagctgggacccagcctgtaccgcgaggctcctggctggggtctcggacagacccggcctgcgctgcgaggctcctggctggggtcttggacagtgccggtgccacattttgaagcgttgctgcttactcgtggtgctgcttacttgtggtggccctttcagttcctacttgtcgctcttttggggccgccttctggaggaggctctgctggagtgccggagccacaggggcctaagccatacatgtttcccaggcatcagctccggtcccggggctggagagatgccgtgggccgcagacacgccctgtcctctctccggctggcgttctaggggcgtgagatgctttggaaggacatgagggcttggaagagacgtgaagcaggacccgacacagagagtgctgggagtggtgtcgcttgggctgcagggagggtggtgggggccgtggggcaggggcctggataccgggagggagggggctgcaggcagcggtccaaggtgggagagcgggcagggtgagtctggggggctccggttgcagagctctgctgaccggggttggaacgccagcgttactctgggtgtgacggccgcaatggccggagttgggggctgatttgcagaggagggagatagtccagctgctttgccgagggccgtgccacgtggcgaataaaccagacaggagcaggccggccacagcacagggcagtcaccctgaggggacggcgggggatgagggagggctcggggactgctgggcaggcagtggggggacgggtattgaagtaggagtaggagtctgccagatggagggcatcctgacagcctcggggacacaggagcgcgggagggtggggcgaggctacgcaagagcggagctgcaaaccctgggcagggaaggctcccaggccccccgagctccttgacggggggtatgaaagtcgctttataacattctgcctggacaccacagcctcttctgagagccaagtgagaagtgctcagaaccaaatccctggcccacccttggcctcagggccctgccacgagcctg

SEQ ID NO: 12249 - DNA, 897 bp, Artificial sequence
  DNA replication origin
ggagatggtcaggggggtgaaatggacaaggccgtgggctttgccaactctacccggggtaggcggggttgccctgcagtgcacctgagacattgaggtctgcagagtgggcctgcttttcccgccatcgcctggccggcctgaccctggtccaatcctgacagcccccagctgtgtggttttcctgggcctgagcgagcgactggtcccatcgagcccctgccggcctttgctcttcctcacacgggcctgggaggagctccagcccggcaacccggtttgatggcagacagctggggctcttttcttcctccaggaatgaaatccttggagaagaaagatcctgcatcccagtctggagagaggcctctggaggggaccccgcctgccctctgctgacctaagcatgccttggctgttggcggctcccgcctcgtgcccgccttcgccttggctccacgtccccgattttgacttgctcggcacagagaggttctgatgaggtttccagctctaggctgggtccagcctgtgggatgcagaggcagatccggtgcccgcagagcccatcgctgagtctggttgagcaaatagcaaaacctgtttgctgccccaggggtgcctgatgtggctgagcacaggaagccgcgtggccgtggatggctggttatgaggcagtacaggtccctttcgcatggtctttggggagatgagttcggggggccttcagtcccactccccccaccgctgtccccctgtgatgaggcctcggcctgtgtttgttccgtgagtgacagtcagaagggccccacccattcgatgttcacccctgttttgctggtgcctttatgagacaggggctgtgtgtgccccatttcccggcaacctggcgcccag

SEQ ID NO: 12250 - DNA, 1467 bp, Artificial sequence
  DNA replication origin
gcagcgttttccagccctggggtggtggcgccctgggaggccgtggccccgctcctgcagcgttttccagccctggggtggtgacgccctcggaggccgtggccccgctcctgcagcgttttccagccctggggtggtggcgccctcggaggccgtggccccgctcctgcagcgttttccagccttggggtggtggcgccctcggaggccgtggccccgctcctgcagcgttttccagccttggggtggtggtgccttcggaggccgtggccccgctcctgcagcgttttccagccctggggtggtggcgccctgggaggccgtggtcccgctcctgcagcgttttccagccctggggtggtggtgccttcggaggccgtggccccgctcctgcagcgttttccagccctggggtggtggcgccctcggaggccgtggccccgctcctgcagcgttttccagccttggggtggtggcgccctcggaggccgtggtcccgcttctgcagcattttccagccttggggtggtggtgccttcggaggccgtggccccgctcctgcagcgttttccagccctggggtggtggcgccctgggaggctgtggccccgctcctgcagcattttccagccctcgcgcttggagccagggtctgagggctacagtggaaccagctgcctggaatcctgtcactgtgccatgagcccggtgcctttcactctggaaaacgtgccctgtcctgggaggtgatggctgaggaaggcagccaggcttgggaatgtctccagggcttctcatcttctgcacggagcgggctctgtcaccatcggctgtaatgtccgacacacaggtggtgtagcaatggcgtcccgcggtggcggagtggcacgggctcacaggacgttgcaagcaccttggcgtcagaacacgagtgcccgccgtgggctgcagagcaggcacctccaccccgtccccgacgaaccctgaggggtccttgagcctgacttggggggtccttgagcctgacttggggggtccttgagcctgacttgggggtgggcgaggaatttcagagggtttcttggaaaaggcgagggagggagatggtcaggggggtgaaatggacaaggccgtgggctttgccaactctacccggggtaggcggggttgccctgcagtgcacctgagacattgaggtctgcagagtgggcctgcttttcccgccatcgcctggccggcctgaccctggtccaatcctgacagcccccagctgtgtggttttcctgggcctgagcgagcgactggtcccatcgagcccctgccggcctttgctcttcctcacacgggcctgggaggagctccagcccggcaacccggtttgatggcagacagctggggctcttttcttcctccaggaatgaaatccttggagaagaaagatcctgcatcccagtctggagagaggcc

SEQ ID NO: 12251 - DNA, 1455 bp, Artificial sequence
  DNA replication origin
gggaccacggcctcccagggcgccaccaccccagggctggaaaacgctgcaggagcggggccacggcctccgaaggcaccaccaccccaaggctggaaaacgctgcaggagcggggccacggcctccgagggcgccaccaccccaaggctggaaaacgctgcaggagcggggccacggcctccgagggcgccaccaccccagggctggaaaacgctgcaggagcggggccacggcctccgagggcgtcaccaccccagggctggaaaacgctgcaggagcggggccacggcctcccagggcgccaccaccccagggctggaaaacgctgcaggagcagggccacggcctcccagggcgccaccaccccagggctggaaaacgctgcaggagcggggccacggcctcccagggcgccaccaccccagggctggaaaacgctgcaggagcggggccacggcctcccagggcgccaccaccccagggctggaaaacgctgcaggagcgggaccacggcctcccagggctctgtgggctgcaatacttgttttctttccacggctgctgcttcaaagcacaggccgggccttggaagtggagcgcagtggaagagccaggcacacccccacctcccccttccaggaccagggcacttgaaaggtgtggagggggctgggccaggccaggcgaaggtgaccgtggctcctagcaggtgagcagctgagatgtacctgagggctcggccagccccatcggagaggcaaacccccaggcaggtggtcctgttgtcaaaactggccggccgggagctggaaaacaggcccaaactgcgcctgtgctggcaggtggcaggcaggcagcgggcagcggttggggtcctggctgggggtgcaaggtcagcctgcatctgaggcctgtgggtacccagggggtggcctatcccattgccctgggggtcccacggctccctgtacaaactcagatgcacttgattttgttattattgttttaatttggtctgaacctttgttctaagtgaagagacatagctttccaaaggccatacgggtgaggctggccccggggggatcaaatgcctccctcctggcctcactgccaggctcatgttaaagacgcccaggggatgtgccataggcactgcatcaccaaagctggaggctccctcaggaccagggagacagacagggattgcaaactcagccacccccaggcccagtcaggtgcagggatggggagcacaccccccccaccatctccagggagcaccatcacccaggtggagcagggcccacacgtgtgaccttccagctttcagataagatggaaactcagaagctccctgaccatcgcctggtttcaacagagggcttgcagctgattcggatttttttttttttttttttaaagacagagtcttgctctgtcacccaggctgg

SEQ ID NO: 12252 - DNA, 1065 bp, Artificial sequence
  DNA replication origin
ggcacagtccggtggaggacgtgagggcgcggccggtggaggacgtgtgggcgcggccggtggaggacgtgagggcgcggccggtggaggacgtgtgggcgcggccggtggaggacgtgtgggcgcggccggtggaggacgtgtgggcgcggccggtggaggacgtgagggcgcggccggtggaggacgtgagggcgcggccggtggaggacgtgagggcgcggccggtggaggacgtgtgggcgcggccggtggaggacgtgagggcgcggccggtggaggacgtgtgggcgcggccggtggaggacgtgagggcgcggccggtggaggacgtgtgggcgcggccggtggaggacgtgagggcgcggccggtggaggacgtgagggcgcggccggtggaggacgtgtgggcgcggccggtggaggacgtgtgggcgcggccggtggaggacgtgagggcgcggccggtggaggacgtgagggcgcggccggtggaggacgtgagggcgcggccggtggaggatgtgtgggcgcggtgctggtacttttacaatgcttcgtgaacctgctgtccgtagctctgtttcacagatggggaaactgaggcctggcgattaagtggcctgctgaaatcatccagctagtaagtgtcggagctgtgatttggaccaactcctgcctccaaagctcattcacctccttacctttgcactgagctccagaaaacctgaggcttccccgtctccctcgctgtgccttctctcccctgctcaaagaccgtcctgcagccatcatggagggagaagccctttttcctaagctgttcacaggatagtctgggagggcctgggaggcagcggaggagtcccgagccttccgggctccaggcctgggttccagtgccctggggagaggcctagggctgccaaggggccctcgggtcccagctgtgcgtctgccaggagaggactgtggagtcagtgttggggacgctccctgagccccaggggggtgcaggcaggttgccgtccactccgatccttctgaggctctgtggcccaggcc

SEQ ID NO: 12253 - DNA, 1503 bp, Artificial sequence
  DNA replication origin
ccggccgcgccctcacgtcctccaccggccgcgccctcacgtcctccaccggccgcgcccacacgtcctccaccggccgcgcccacacgtcctccaccggccgcgccctcacgtcctccaccggccgcgccctcacgtcctccaccggccgcgcccacacgtcctccaccggccgcgccctcacgtcctccaccggccgcgcccacacgtcctccaccggccgcgccctcacgtcctccaccggccgcgcccacacgtcctccaccggccgcgccctcacgtcctccaccggccgcgccctcacgtcctccaccggccgcgccctcacgtcctccaccggccgcgcccacacgtcctccaccggccgcgcccacacgtcctccaccggccgcgcccacacgtcctccaccggccgcgccctcacgtcctccaccggccgcgcccacacgtcctccaccggccgcgccctcacgtcctccaccggactgtgcccactgtgcccaccggatgctggggctccttcaccaggggtggggggtttcctgccagccctgccaatgagggctggtcctggggcccctcctgccccacccagaatggtcctttctgacagccaatgctctgcctctctcaactgctggaacacagtgaccccaggtggccagcacctccccagcccgtggccactgtgaggacagcagctcagacagaagcatttccaccctcacagaggctgtgctgtagaagcctgctggggagggggccggcgggacctgacgggtcgggtccatctctctgtctctgcacctgcacgcccctccctcctgggtgaggaatgggtatcacacgccaaactccctgctatcaagagcagctcccaggtgtctgcaacttcctcaacaactgtgaccccgcaaaccacggcgagtgggaaagaacggccgtgagggaaggggccaggtgctgaaggtggggggtggggagtgccgggacaggccaagctccaggaccagtcagaaaccttgaaggaggtgaggtgtggtggttcacacctaatcccagcactttgggaggctaaggcgggtggacggtttgagctcaggactttgagaccagcctgggccacaccgcgaaaccccatctctacaaaaacatacaaaaattagccgggcgtggtggtgcacacctgtagtcccggctcctcgggaggctgaggtgggaggatcgcttgagcttcggaggcagaggtctagcctacatggtgaaatcccgtctctaactaaaaatacaaaaattagctgggcatggtggcgcacctgtaatcccagctacttgggaggctgaggcgggagaatcgcttgaaccagggaggtggagattgcaatgagccgagattgcgccactgcactccagcctgggtgaaggagtaagactctgtctcaaaaaaacaaacaaacaaatcatgtttattaaaatgctttatacagtctttaaacctaagga

SEQ ID NO: 12254 - DNA, 1034 bp, Artificial sequence
  DNA replication origin
cctcccacctcagcctcccaagtacctgggaccacaggtgcgcaccaccacacccggctaatttttaaattttttgtagagctggggtcttgatgtgttgctcgagctggtcgcaaacttctggcctcaagcagcgtctcaaagcaccggattacaggtgtgagccaccatgcccggccataatgaagcattttaggtgctaactgaaaaacaacatgcgaggaggttttttttttttttttttttttttttggagacgaagtctcgttgttgcccaggctggagtgcagtggtgcgatctcggctcactgcaggctctgcccccccaggttcatgccattctcctgcctcagcctcctgagtagctgggactacaggcgcctgccacctcgcccggctaattttttgtatttttagtagagacggggtttcactgtgttagccaggatggtctcgatctcctgaccttgtgatccacttgtctcggccccccaaagtgctgggattacaggcatgagccaccgcgcctggcctggaggtacgtgttttaagaaaactctttggatagcaaatgggtggttattcatggttatgggattaaagaccggacggagtgggagctgctggggggtgttgggatcatagagggggcatggatgggagaggacgaggaggctacggggcagcaggagaggccaggagagttgtcccagccacaggtgatgctggcttgggtgggctggagacgggacagtggacagactgggtgatggcccttggttagaccaacgggttttgctgaggacctgacatgggagggtgagaacgggagtgaggaaggctgatccgcaggttgggggttgctggtgcccccaaccccggaggaggtgggcaggcaggctggttttggccacaagagtttgggcgccctgtaggacgtgggagagaggggacaggtggtcggctgtgtggctctggccggccatgttgcgtcccatgcccctttcttccccacctctgggtggcccctttgg

SEQ ID NO: 12255 - DNA, 1426 bp, Artificial sequence
  DNA replication origin
gactcctgggggtggagctgggactcctggccagtggcatccctgagtgccaggccggtggccaccaccaaccaccctgtgtggaaatcagccatcccagccaacaccatgggagggaggaggcctgccccatcaacccacagaaccatgaggaagagtgaatttttttgtcaaggcactctgtttgaggtggtttgttatgtaacaataaataaccaaaatacccgagtaccagttattggagccaagaaatccttattgaatgggttgggaattgtctctggctccaaatctctatcccttccagcgaccctggacagcaagctgggaaaacgagacactcccacatcacaaatggtgagcctggactgccagtccctagggcagaacctccagatttacaaaatagtctcctgtgtgagcgtgaactgtcttccaagaggggtttccccaggttcctagcactgcgtgggtatgaactttcttccgagaggggtttccccaggttcctagcactgtgtgggtgtgaactgtcttccgagaggggtttccccaggttcctagcgctgcgtgggtgtgaactgtcttccgagaggggtttccccaggttcctagtgctgcacgggtgtgaactgtcttccgagaggggtttccccaggttcctagctctgtgtgggtgtgaactgtgttccgagaggggtttccccaggttcctagcgctgcgtgggtgtgaactgtcttccgagaggggttttcccaggttcctagcgctgtgtgggtgtgaactgtgttccgagaggggtttccccaggttcctagcgctgtgcgggtgtgaactgtgttccgagaggggttttcccaggttcctagcactgtgtgggtgtgaactgtcttccgagaggggtttccccaggttcctagcgctgtgtgggtgtgaactgtgttccgagaggggtttccccaggttcctagcgttgtgtgggtgtgaactgtgttccgagaggggtttccccaggttcctagctccgtgtgggtgtgaactgtcttccgagaggggtttccccaggttcctagcgctgtgtgggtgtgaactgtgttccgagaggggtttccccaggttcctagcgttgtgtgggtgtgaactgtcttccgagaggggtttccccaggttcctagctccgtgtgggtgtgaactgtcttccgagaggggtttccccaggttcctagcgctgtgtgggtgtgaactgtgttccgagaggggtttccccaggttcctagctccgtgtgggtgtgaactgtcttccgagaggggtttccccaggttcctagcgctgtgtgggtgtgaactgtgttccgagaggggtttccccaggttcctagcgctgtgtgggtgtgaactgtcttctgacagggggtttcccaggtt

SEQ ID NO: 12256 - DNA, 1406 bp, Artificial sequence
  DNA replication origin
acctgtgccatgggggggagagtaggtatttggatctgttggggtggggacctgtgccatggaggggaagagtaagtatttggacccgttgtggtggggaactgtgccatgggggggagagtaggtatttggacccgttggggtggggacctgtgccatggtggggggagagtaggtatttggatctgttggggtggggacctgtgccatggtggggagagtaggtatttggacccgttggcgtggggacctgtgccatgggggggagagtaggtatttggatccgttggggtggggacctgtgccatgggggggagagtaggtatttggacccgttggggtggggacctgtgccatggagggaaagagtaagtatttggacccgttggggtggggacctgtgccatggggggcagagtaggtatttggacccgttggggtggggacctgtcccatgggggggagagtaggtatttggacccgttggggtggggacctgtgccatgggggggagagtaggtatttggatccgttggggtggggacctgtgccatgggggggagagtaggtatttggatctgttggggtggggacctgtgccatggaggggaagagtaagtatttggacccgttgggttggggacctgtgccatggggggagagtaggtatttggacccgttggagtagggacctgtgccatggggggcagagtaggtatttggatctgttgggttggggacctgtgccatgggggggagagtaggtatttgcatctgttggggtggggacctgtgctatggaggggagagtaggtatttggacccgttggggtggggacctgtgccatggaggggagagtaggtatttggatttgttggggtggggacctgtggcatgggggggagagtaggtatttggatctgttggggtggggacttgtgctatgggggggagagtaggtaattgcatctgttggggtggggacctgtgccatgggggggagagtaggtatttggacccgttggggtggggacctgtgccatgggggggagagtaggtatttggatctgttggggtggggacctgtggcattgggggcagagtaggtatttggacccgttggggtggggagcctgtggcactggggggagagtaggtatttggatctgttggggtggggacctgtgccatgggagggattgtaggtatttggacccgttggagcggggcctgtggcacccggggaggtgtcgagaggcagcaggctcacagacttgggccccattgagctatggtagacgggaactcggtgggcccatgtccccggggagactgagcagggaggtgatgccaggcctgggtggaaccagaacccggaacatggagccgggagaaggctgggatg

SEQ ID NO: 12257 - DNA, 1262 bp, Artificial sequence
  DNA replication origin
tcaaccccaagtcccagctctgcagggagggagggtctttagtgtcctctggccctcctagctcactacttggtgagcatgacagtgtgtgatggactgagggggtaactgcccactccttcctccagctgtgacctctgcccttcctaccccggctgttcctgcgttgggaggggccctaaccgtcagtgccttcctgctttgggactcagtgcctcccagtgcaggaacaccgagatatggcacgtggtgctttgcatactttatctcatcgaattctcacgcaggcctggccagatgagatatttacattcccatcttacaaatgagaaaacgggtgcttggagagagaacgtgggttccccaccatcagccagggagagtcatggagctgggcgcaaacccaggcatgcctctgaggccacacccttcccaccttgcctgtgggctctggcccctggcgtgctggggcagggtgcagggttctcctggggttggctttgatggtggaacccccccttctgcttctttctcatcctccgtcctaggaactcaggcttctccgcctttgccctgcaaggctggtgcccctgtgtgtggcaggctggagctggggtgctgccctccaggagggagaggctgaatcaccagctgctgctgctgcgtggggagaggtggggtggggagacagccgccatggtgggtgagggagtgagtgcaagtgtgtgtgagtgacatgtacacacactcgcccagatgcacacacatgcacacacaggcaaggatgtactgttgccaccgaggaggagggtacgtggagtcgtgtgtgcacatgcattaaaacacacgcacttacccagatgcatagctgtgcgcacacctggacatactcagtttactccgagagtggtggatgtaaggggtgtgtttgcatgcatgtgtacacgctcacacatgtacttaactagatgtgcatatggtcacatgcatgtacctctctggatgtgcacacacatgtacttagttggatatgtacatgttcacacatatgtgcacatgctcacgcacgtacttacctagacacacactaacacatacgtacctagatatgcacacacgcacacgtacttacctagacacacatgcacacgtactttcctagatgtgcacacatagagtcatgccatctgcttctgagggtgagcagggctctcgcctgtgctcacaccctcctgtgtacactctgcccctagcctcactgg

SEQ ID NO: 12258 - DNA, 866 bp, Artificial sequence
  DNA replication origin
cctctgagccacagaattcccccttcggcttccagggggttccaggtcttcagagctctcctggaaggaggttcagggttttaggtccaggtgtttcgctagcttgtggggctcaccgacagttttcagcctagttacagatgctgtcaccacttgggataaaatagctcccacggggtagctcacacctgtcatcccagcactttgggaggccgaggcgggcagatcacttgaggtcaggagttcgagaccagcctggccaacatggcgaaaccccctctctactaaaaatacaaaaattagttgggtgtggtggcggcgcctgtaatcccagctactggggtggttcaggcaggagaattgcttgaaccgggaggtggaggctgcagtgagctgagatcgcaccactgcactccagcctgggcgacagagcgagactccgtctcaaaaaaaaaaaaaaaaaaaaggaaaaagaaaatagctcccatggctaaggtgatgtggggtttgaggtcgaattccacgttgatcttgcagcagtgggagaggaaagtacccttcggcacgtgtggtcggggagaagctcaggcctgctcacggtcttctctccgggaatgatgcctctcacccccttcctggcctcctgcatctgggctcttttcgtagacgtgcgtgcctgggaagtggaggccgggacaggagcccctgtgacacctcctgctgtgtcccctccccctcgccgtgggctcctcctgtccttgttctgggccccaccccaggctgtctgcgtatcacctaatgtttctcctcttggtccttttatcacaacttaactatctcctgtgcccatctctcctggggaccaa

SEQ ID NO: 12259 - DNA, 1255 bp, Artificial sequence
  DNA replication origin
tcctgcgccccgcggtgcggtgccggcctggcctggccatggtgacttcgctgcgcggccgccgcatttgttctcccgcaccccacccccccaccaccgccagcttcccttgtttacctgcgtttctgtcttttcctgtgcagaggccgccccagcccatccacagtctcaccctcatctccccctcccctgaggccgcgcgcaggggcccccagcattcacatttcacataagtgcccccaaaaaggggggatggaggaggacgaggccctggaaccccccggctggaccctcagggcgccgggcccccccactcttcccacccggaatcctcagaactgcagaaggggcttctcagccgcgtgcacccctgtctgcctgagccccctccccccctgcctgagccccctccacccctgccgggggtctgtggggagggaaggctctgggggccgtcacgtttaacacctcacctggccccacagaatgaaagatctttgacaaatgcagaatcagtgactttcttccacgctcctgggagaagcctggttcacgccgcctgcgtttatccggcgcgcagccccgggcagctctcaggcctggggatctgtgtgttttctggacaggaaggaagcagccaccctcgccatggcctccccgcccgcctgcccctcggaggaggacgagagcctgaagggctgtgagctgtacgtgcagctgcacgggatccagcaggtcctcaaagactgtatcgtccacctctgcatctccaagcccgaacgccccatgaagttcctccgggagcacttcgagaagctggagaaggtgagtggcccccgccgcccgctgcttcccttcgcacgtgtcctggggcagaggcggcagccggggaagccttccctctgtcccgtggtcctcgaaggctgggtgccccagagactgtctgccgtcctgcaggtccttccagaagcgcggggagagaggccgacctggggcccaccgtcccttgtttggtctcccgagattcatgcctctaggtggggtcctctgagccacagaattcccccttcggcttccagggggttccaggtcttcagagctctcctggaaggaggttcagggttttaggtccaggtgtttcgctagcttgtggggctcaccgacagttttcagcctagttacagatgctgtcaccacttgggataaaatagctcccacggggtagctcacacctgtcatcccagcactttgggag

SEQ ID NO: 12260 - DNA, 782 bp, Artificial sequence
  DNA replication origin
cccgcggggaggcggtcggggggagacgggctgcaggcccgcgcgggcggcgttgggggtgcagcagctgcgcgcggcgcgggggcgggcgtggagggcggcgccgctgcagtgcggggacccgctcgctcgctcgccagccgtccccgcgccccgcgtccccgcgcagccgcctcctggcctcgggcgccgcgcatccaggtacgcggggccgggctggggtctgcgccgggagccccgggcctgggaggccccccggggatgcggacatttggaagggttcggccccgccgggagtggggcgcgcggggcggggccgggcctggggctcccggtcaggggtcccgggagggtcctcgccggcgctgaggccgggtttggggcggggggcgcggggtctctgggtgggcgccttcccggcggtctgggcactccgggggcggcgtggcggggggctggggtcctgcgccccgcggtgcggtgccggcctggcctggccatggtgacttcgctgcgcggccgccgcatttgttctcccgcaccccacccccccaccaccgccagcttcccttgtttacctgcgtttctgtcttttcctgtgcagaggccgccccagcccatccacagtctcaccctcatctccccctcccctgaggccgcgcgcaggggcccccagcattcacatttcacataagtgcccccaaaaaggggggatggaggaggacgaggccctggaaccccccggctggaccctcagggcgccgggcccccccactcttccc

SEQ ID NO: 12261 - DNA, 2339 bp, Artificial sequence
  DNA replication origin
tcactggagttcaagtgattctcctgcttcagctttctgagtagctggggattacaggcgtgcatgaccatgcccggctaattttgtatttctagtcgagacagggtttcgctatgttgcccaggctggtcttgaactcctgacctccagtgacccacctgcctcggcctcccaaagtgctgggattacaggtgtgaaccaccgcatccggccaaaggtatttattgatgaacataattgggaagtccagatacgggaagggcctcaggtttggtttgaggacggccgtggctccatttctctaggatcctgtttcttcccacttctgtgttgatttcatcctctggcaatgatcagacagtgagcaggacactaaggaagcgtctgtccttggctcaagccagtaaggctgaagcaagagaggcctgggagtcaggcagaaacttgtctgcaggttggggcggtgggggccacgcctcgcactcctaccagagccagtctggagagggagtccttgtgtggggtgggggccactggaacagggatctgagtggcggggaaaagtgtgaaagagagaggcagtgggagctgccgtcgtggcaatgaggagaggagctcagcagacgtcacagctcagtggggccaggggccgcatgtctggctggccacgtgcatgctgccagcccccaaacctgggagatccttgtctcaaaaggacgcaggcaaggaggctcagcctgaggaggtattgcagcagaaggagggcttgtgtgtgcgcctcgggatcagagggctgtcctgtgaggtcagccagagaggtgcctccactctcctctagaggcacggtgtgggggaagtctttacagggagtctccagagaaccccaggacagcccgggagagaagcagccaggcctggagcatctgccccccgaagcgagacgtcgccttggttaggtggcacctgggtcttttttgctgtcctcaccagtctaccctggaggagcaggagtaattggaggaggaggaggagggagtggaggggccgcggggagcacgtgatggtactgctggtcagcagcagctccaggcaggccagggctgggagagccagaggtctgagtgggttgtgggatggagttctaattcagagaccaggcctggatccctaagaaagtctcaggacaaatgcaggtctgcctgagacggggctggggccagtgggtgctgagggtgagggctgaggaccaaggaccttcgtgtttgacccccgagggtggcctgcttggtttacgttcaccctggcaggaagaggctgaggcaatgtcagccctgctggggaatgtgctcggcagggctggtgacctgtgtagtgcctgtgcaggcaggtgagtgggagacagctgagcaatgaacaagaaagctggacaggtgagtgtggaccaggtgagcatgggagggctgagtgagagacggtgagtgtgtacaggtgagtgtggaccaggtgagcatgggagggctgactgggagacggtgagtgtgtatacgtgagtgtggaccaggtgagcatgggagggctgagtgggagatggtgtctgtgtacaggtgagtgtggaaaaggtgagcaagagacgggtgagtgggagatggtgtgtacgggtgagtgggagacaggtgaagatggggcagcatagtgggagacaggtgagtaggcaacagggaagccgggcaggtgagtgcaggacccgggggctggacaggcgggtggaggatccgggggctgggcaggtgggtggaggaccccgggggtagacaggtgagtgtgcacagggaggcaggtatcatctccttcacagctggaactgcctacccctctcctggcatttggagcctctggggagggaagatggagtttctgccgccgccaccctggcaggatggggcaacggtgtgcggtaggaggatgaggttgattccctttcctgcagggctgggcttgtgggttaggaccgtcaccaagaggctcctcctaggcctccgtgacctctggatccccaagaaaggtgggaaagaatttaggagggttccgatttcccactgggcatcggggtgaagctggtgcgcctaagcgctgggagtcacctggggaagcggggctgggcccacctggccaccctctctggccgctaaggcagagtgagaccccagggaacgggcgtgcttgctgggtaccgggtgtcctgcagaggcagggatgtgatcccctaggtgtgagcagctcaggcagccgcggtggtcgtgaacggggcgggagtggggggtgcccaggccatcagaggc

SEQ ID NO: 12262 - DNA, 1324 bp, Artificial sequence
  DNA replication origin
tcggcctccagccccggcagcaggcggctcagggcgcggctcagctccaccgcctcagccgtctcggccccctcagccgggtgtggggccgccacggcctccgccacccccagcgccgccatcttgcccgcgtcgccggtcactaaggggaacagcgctttcgcgactctcagcgcagattacggcagcacttccggtccgcgctgcgggcggggcgccgggctacttcctccccgccggtgcgcacgtgggcctgtgctcttgtcgtgctcgcccgctgtccccctctgtcgccggaacccccgccagcctgcctgctgggccttgtcctgtccccattgtacagatggggaaggtctcgggagggtgcagctcgcccgggatgcgggtcccgggctataggcctgggcctgcccctagggaagcctgccctgcagcctagggggcttggagaaggaacctgagtggtcccgcctgggaccagggtagccgggaagcccctgtttgagccgcctagagcccctctggctttgggaaggtccgttccaggagggaaggacgctggttctgtggactggatccccctgtggtgtaagacaggtgcctggtctgggcttcacgtgcagcctgtcattagatctcaggcgtagccgcccaataggttcgccttactcgctgcccaggtagagccaatttatcaagacaggggaattgcaatagagagtttaatgcatgcagaaactggctgcatgcagaaactggctgcatgcagaaactggctaaaggacactggagctttattgctcaaaccaggttctgaaaatcctgagatgggtcatctaaggataattaggcaggtagggggccagggagagggcagtgcttattggtcgggttggagatgaaaccatggagagtcaaagttgattctcttgctgtcttctgttcctgggtgggatcacagaactggttgagccagattagtggtgtgggtggtggcacctggtgcatcagaatgcagagcctgaaaaatatcttgagcaccaatcttagagttgatgatagtggtgttatcctaaggagcaactggggaggtttggaatcttgtggcctctagctgcatgactcaaaccacaatttctaatcttgtggctcatgtgttagtcttacaaaagcattctggtccccaggcaagaaggaggttggcttcaggaaagggctgttatcatctttgtttcaaagttaaactataaactaagttcctcctaaagttagcttggcctactcccaagaaataacaaggcagcttggaaattaaaagcaa

SEQ ID NO: 12263 - DNA, 1213 bp, Artificial sequence
  DNA replication origin
ggtccagggagggagctcgtggggctgatgtacagactgggtagggaagtggttgaggatgaagaagaaatacattaaatgccaggaattctcaatggccatgtccatccagcccaaggttcttccccaagctccacaggagttctggaccatgtgaaatccaaagttaaccaacgtggaaatctcggcatttccccaagtccagctcttcctctacttctggaatctattctccacgcagctgcagtgatcttttaacaacctgaactcgggtctatcacttctattgacaccccctgcacttcccactacattcagaccatcactgggacatcactgggacggcctgagctggccagatccctcactgctttcctgctccctaccgcccacggatttatagcatcagtgttccctccttcggaaagccttcccgccagcaggaagcaggcgcctgctatcattccacatcccagccaggggagggaaagggcaagaccctgcaggaatggccagctaaggaaagggaacgaccggatcagatcagagctctaaaaaagatggggaacgttataaagtggaggggagaagcggcctccttccacttaggacagtggtccaagccagagcggaaaggcaggggagtaggatgaatgggacagaaagtgaaatgaccagagcagagtctcaaagcgcgtgccctcaaccaggtgcaagtcctgcaagcccccgagggaaggaaagggggcagctatcagggcacaccccaccccaaaccgcctaacaggaatttctgcggtggtttccaggtatctggacagaagcgctggctcgtgggcccgggtggggtggagggggctcaggcagggaggagggtgggaggtgagggtcgcgggagggcggcgtgcaaggaggaggatggcacaggataggcaggtggagggggcacagggagcaggcaggtggggggcggggcttggggcgtggagggtggaggcggggagcaaggggacaggggagtgaggtgagtgagggccaagcaggaacaggggtcacggggcaaggagcacgtggcagcgcaggaaacaggtacatgggggtagaggacaagggagcagctgaagggcgcgttggtggcgggacgtgaggcaggggaagcagtggtggtgggaggagggggccgggcggggtgctttggggcaggcgggtgggg

SEQ ID NO: 12264 - DNA, 842 bp, Artificial sequence
  DNA replication origin
gtccgtgagactcaggagcagccccaaatcccggccctagctgtccttgctatcaggtgagatgtttgaagctcctttctgcaaaagaagcctatctgtgggttccgacagacaggtggccgtcctgggtggggccccgcagagaccctggcacacagtgcaggaggtcagggaggagaaagcagcgaggccaaacccagcgagttcagactgctccctggctgccggcctggggcagagtgtgctcaggccttgtggccctggacgcctgcccatctcccggagagggccccatcactgtacacctgtttgggctgggggctggctgcagtctggcttgtctcagccacgccctctgccccatcactgtatacctgtttgggctgggggctggctgcagtctggcttgtctcagccacgccctctgccccatcactgtatacctgtttgggctgggggctggctgcagtctggcttgtctcagccacgccctctgcctgacaggctttgcagcatctcagcacatggcactgggtgagcttggagtttgccgctcacctggattagcgtcgtggcaggtgcggccgtggcaggtgtcgactgcattaaaccctgggctgtctctgctcgagacctgccggcgccatgggtgaagacgacagtgacagtttgttctgtggggactctctagccaggtggtggaatggccgtggagctgatttgggtttctcttagttgttatctgggcatttgtatttgtggttgctagtaaggccctgtgtcagttaatgaccccggcaaacgcgccacacattcctgtgtcccctcgcgtgcttccctgc

SEQ ID NO: 12265 - DNA, 1162 bp, Artificial sequence
  DNA replication origin
ggatttaacagggcaccaaacatcaataccagacatgagaaactgttttttgtttgtttgtttgttttaaacggggtctcactctgtcacccaggctggagtgcaggggtgtggtcatagctcaccgcagcctcaacttcctggacccaagcgatcctcccacctcagcctctggagcagctgggatacaggcatgcaccaccacgcccagctaatttgttttgtttttgttaaaatatttgtaaagtaggagtcttgctgtgttgcccaggttggtctccaactcctgggctcaggtgatcctcccaccctggccccccgcgtagttgggatacaggcgtgagctactgtgcccggccaagaagctactttaatgctgtatttgacggaatacatttccctccaggacctgaccccgggctacttcagcgcctcaactaggccagggaggtgacatgggaagtaagttgagactgcaaatctctcagggcatctgatttgggctgtgcatctgatttgagctgggaatgattgatttgagctggacatgattgatttgagctgggcatctgatttgagctgggcatgattgatttgagctgggcatgattgatttgagcggggcatgtgatttgagctgggcatgattgatttgagctgggcatgtgatttgagctgggcgtctgatttgggctgggcatctgattgatttgagctgggcatctgatttgagctgggcatgattgatttgagctgggcatgattgatttgagctgggcatgtgatttgagctgggcatgattgatttgagctgggcatgtgatttgagctgggcgtctgatttgggctgggcatctgattgatttgagctgggcgtctgatttgggctgggcatctgattgattggagctgggcatctgatttgagctgggcatgattgatttgagctgggcatgattgatttgagctgggcatgtgatttgagctgggcatgattgatttgagctgggcatgtgatttgagctgggcgtcttgatttgggctgggcatctgattgatttgagctgggcgtctgatttgagctgggcatgtgatttgagctgggcgtctgatttgagctgggcatctgatttgggctgggcatctgatgtgggctgcgctt

SEQ ID NO: 12266 - DNA, 1265 bp, Artificial sequence
  DNA replication origin
cactctcacaaaaaccagtctgcaagtgtttacatcagctttacctgtgatggccaaaaactagaaaggacccgaatatgcccctgctggtgaccagatggtccatccacgggagggaacgtgactcacgcgaagaaggaaagtgctgcagacacaggtgccatgcatgagcctccgacacagagaggaaagagcagacgccagcggccacgctcccacaacctcatgcaagtgacatcctggaagggacacacaggacgcagcccacagcagcagtgccagggcccatgagcagttctgggcggtggagatgcccacatgcaggggacagaggcggtgctgctcaaaactcacagagctgcagccctgaagggtgaatgcagcgtggtcccgggggaagggctatcacagaccctgggcagggtgggcagggggtggcaggatggtaaggacgtcacagaccctgggcaaggtgggtggggggtggcaggaccgtaaggagggcgtcacagtccctaggcacgacgggcggggaaaagggacgacacagagcctgggcacggcgggcgggggaaagggatgacacagacgctggacagggcaggacggtaaggagggcgtcacaaaccctgggcatgttgggtggggggcagcaggacggtaaggagggcgtcacaggccctgggcatgttgggtggggggcagcaggacggtaaggagggcgtcacaggccctgggcatgttgggtggggggcagcaggacggtaaggagggcgtcacaggccctgggcatgacgggcgggggaaagtgaggacacagagcctgggcccagcgggcaggggggggcaagacagtaaggagagcgtcacagaccctgggcacggcaggcggggggtggcaggacggcagggagggtgtgtgcttggcaatacagggccagtgcaaacttctgaggaagagactcaaaaaatcttctgatctgacatttaaaatactgtagaaaaaaatctgagaaatcgtatttaaaattcaaatctacagactggagaaaagtaatttgaggagaaaatgccaaaaatctaacacaacgtagtgcttatgcgactgactgactgtcattcaattctaaatttactctgctccacttgaaacaaaagttctgtgcctaacgacactctctacgcctcggcacggataactaactgtgtttttgtaattatcagtcaggaacattcccaagtccttgaaccaattctaaatcagg

SEQ ID NO: 12267 - DNA, 1726 bp, Artificial sequence
  DNA replication origin
gctcatgggccctggcactgctgctgtgggctgcgtcctgtgtgtcccttccaggatgtcacttgcatgaggttgtgggagcgtggccgctggcgtctgctctttcctctctgtgtcggaggctcatgcatggcacctgtgtctgcagcactttccttcttcgcgtgagtcacgttccctcccgtggatggaccatctggtcaccagcaggggcatattcgggtcctttctagtttttggccatcacaggtaaagctgatgtaaacacttgcagactggtttttgtgagagtgttttattggataaacactcaggcgtggggttgctgggccataggtacagtccttactttgttagaaactcaccacacactgttttccacacccttcgcgccatgtcgcatccccacgggcactggatgagatttccaggtgctgcagtcaggccagcgtgtggggtggagtttgctgtttttagtgtgtcggttggtgtgcagtgttggcacacggtgttggtgtccagtgttgacacacggtattggggtttgctgtttttagtgtgtccagctggtgtgcaatggtggcacagggtgttggtggggtttgctattttcagcgtgtccggctggtgtgcagtggtggcccacggtgttggtggggtttgctgtttttaccgtgtctggctggtgtgcagtgttgtcacacagggttggtggggtttgctgtttttagtgtatccagctggtgtgcagtgttgtcacacagggttggtggggtttgctgtttttagtgtgtccagttggtgtgcagtggtggcccacagtgttggtggggtttgctggtttcagtgtgtccggctggtgtgcagtggtggcccacggtgttggtggggtttgctggtttcagcatgtccggctggtgtgcagtggtggcccacggtgttggtggggtttgctggtttcagcgtgtccggctggtgtgcagtgttgtcacacagggttggtggggtttgctggtttcagtgtgtccagttggtgtgcagtggtggcccacggtgttggtggggtttgctggtttgagcgtgtccggctggtgtgcagtggtggcccacggtgttggtggggtttgctggtttcagcgtgtccggctggtgtgcagtgttgtcacacagggttggtggggtttgctggtttcagtgtgtccagttggtgtgcagtggtggcccacggtgttggtggggtttgctggtttgagcgtgtccggctggtgtgcagtggtggcccacggtgttggtggggtttgctggtttcagcgtgtccggctggtgtgcagtgttgtcacacagggttggtggggtttgctggtttcagtgtgtccagttggtgtgcagtggtggcccacggtgttggtggggtttgctggtttgagcgtgtccggctggtgtgcagtggtggcccacggtgttggtggggtttgctggtttcagcgtgtccggctagtgtgcagtggtggcccatggtgttttactttgcgattccctaatgagaggacattggggccttttcctgtgctgtggtgtgcttctgtgcacccgtacgtcgtctttggtggccattcagaactgccatccattaaatcgagttctgtgtttctgagtgcggagtttgaggaccccttccgtgctctggatgcaggtccctcatcagactgttttaggctccacagcc

SEQ ID NO: 12268 - DNA, 1296 bp, Artificial sequence
  DNA replication origin
aggccgggccacgccctgcgctgacagtcaccaccatgaggacttcacacccacctcacaaggatgcttcctagtgctcaggagaacaactaaagctttgacttgagatttcagttgaaaatatcctcatcttgaaccttaaattccattgcaaggtagcctggccagcagcttttacttctagtggtccaggtcactgttactagcccagcgtagtggcgtgcacctgtggttccagctcccgggaggctgaggtgggaggatcgcttgagcccgggagtttgaggcctcagtgagctatgattgcgccactactctccagcctgggcgacggaatgagacgctgtctcagataaaacaaaaaaatctaaatcattgtgactgatttaaagtaaatgttccaggttccatgttatttacatgtcatgtttctgcttttcaaaaactaccgtgaatttaaaattgtctgtagttctctgtggaacctacaggagagcaagagacacgggggtgaggctgagaggacgagagacgtgtgtgggatccgctgtggaatcccacggtgcagaggggctggtgtgtgtgtgatccactgtggaatcccacagtgcagaggggctggtgtgtgtgatccggtgtgaaatcccacggtgcagaggggctggtgtatgtgtgatccgctgtggaatcccacggtgcagaggggctggtgtgtgtgtgatccactgtggaatcccatggtgcagaggggctggtgtgtgtgtgatccgctgtggaatcccacggtgcagaggggctggtgtgtgtgtgatccgctgtggaatcccatggtgcagaggggctggtgtgtggtgtccactgtggaatcccatggtgcagaggggctggtgtgtgtgtgatccgctgtggaatcccacagtgcagaggggctggtgtgtgtgtgatccgctgtggaatcccacggtgcagaggggctggtgtgtggtgtccactgtggaatcccacggtgcagaggggctggtgagtgtgtgatccactgtgggcttccacggtacagaggggctggtgtgtattgatcagcttagtgatgggaaggttgggtcactggtgtccgatgaggggtgtgtggtgaaccccacagctgggacacagcatcctttgggccagacttcactgcctgggaggcgtgtccggctcgctggcctcagggacgttctgagaccacacccggacccttgtacctttcctgagggctctgagcatgtgccaaggactcactctgcctaacacggggct

SEQ ID NO: 12269 - DNA, 2404 bp, Artificial sequence
  DNA replication origin
ctgacacctggtaccagccggaggtgttcatagaaacgatgcggaaagcccaggcccgtcctctggcctggatcctgggattcgactcctggtcttgcagccagcattgggccggaaaccgagaaaccgcacgctcatgagcggctgcaaaacccgcagcacgaccgggctggctgggcccgcggcctggctcccgctctcccgcctgctgtctgaaccgcagcccggccgccggctcctgcccttccgccgccagtgtggggagagcctcttggggtacgggccccaggtggaggtgcagctgctgcctgcccaagttcctgctgcgggagctctgccgggcgccaggaagcctgcgcagtccccggccggtgtccaccgagcacgcagggagccccgtacctgctctgccgacaggacctcgctgctggtgagcgcccagaggcaggacacggcagccgtgcggatggccgcggctgtcctccccgcatgccactgcagattgggggccaggatgtcctttgtcaccgtctcgaggtagctgggaaactgcctggaaccggaacggagagggtggatgaggagaccggacaggtgctcggaagaaacgtttcagactagggatgaatggggctgaggggggagccaaacaggaaaacgaactcgaccccaaaacacgaggcccctcctcctctcaggagctgcttctcagtgcgaattgggaggttcctccaggcccaaccctaccggggagacaggggtgcctgtgcccctggcctctcctgcggcccgcgtaggtcctgttctccagaggcgagccagaggccctgggccgagggtgcactttcagcccctcgccgctcctagcttcaaaaggaggcctgagtgacgcctgggctagggcaggtgcggtggtgtcggcagcacccagtgagcccctttcccatctgcatccctcccccagaaaaaggccaagtctctccagccacagaaccctctgtccagcaaggacagtcgctgcggcttcacagaggcgggatgggagggccacaggcgcggtccggggacccaagggccacagctcagagagacgggcagttcccaccctgtcggcgacttcgtcctgatggtgaccagtcaggtcaaagtgccaccaagacaaactcaaagcaaaatgacacactcattagtgacatcccaacaccacggtatgtttcaaaggtggctctggtctccaagaccagctccacagcccgcagccctccagcgtccgtgaagcctgcacagcgtcccttcctcttctggaggcgccaccggcttgctcctggcaggggccatgttgggaccagccaggtagatgagcagatgtggaaagtgacgttggtgtggtgtgatttacacgcattccgcgaggtttctggcgtgggttcgtttttaagcagagctgccattttcggcaccgtgacttgcaagagggctctctggaatgaacgaacccagcgcctgctccatggtcaccacatgaaatggcctggaagtcctggccttcagggtgtggggtccaagtgtgggccaggcgtgccacacgggcgccacctaggagtgcttaggtttttttaaatttttttttttttttttttaattttggggtgaaggatactcagcctgtgtctgacagaagctccatcagaacttctgggcattgatcagaaccaccatcgaaccactgaatgaggcacgttccttttttttgagacaaagtctcgctcttgctgcccaggctggagtgaaatggcgcaatctccgctcactgcaacctctgcctcccaggttcaagtgattctcctgcctcagcctcctgagtagctgggatcacaggcacttgccaccatgcactggggccgggtacagccaggcctgcaggaccccaagacactatagtccacgggcagcagggctgggcacagccagacccacaggacccgaagacgctgcagagccggggaacgaggggcccagcggctggtgctccgggttccctgcccgagcacattcctattcacagagggactcgaggtccactgtggggcttgacttccagaaacggtgcagcctcaaagccaggagcctcttgccctgaactcgcagccacttctctggagcttctgtcagacgcaggctgagcatccttcacttcagaatgcaaagtgctccagggtctgaccatatctgagcactgacatgatgctcaaatgaaatactcactggagcattttggatttctgaagttcggattagggatgctctacaatgcaattactacagaattttaagaaaacctaaacacaactagtcccgagtgtcccaggtaagacacagaaagcctgtgggaggcagccctgag

SEQ ID NO: 12270 - DNA, 819 bp, Artificial sequence
  DNA replication origin
gcgggcccagccagcccggtcgtgctgcgggttttgcagccgctcatgagcgtgcggtttctcggtttccggcccaatgctggctgcaagaccaggagtcgaatcccaggatccaggccagaggacgggcctgggctttccgcatcgtttctatgaacacctccggctggtaccaggtgtcagaaaacagacactgatgcccgcccgcgtcctggtcgccgcccggcgggaaggcgctgccctgggcgcccgtgcagcatcagcgccacctcctggtgcacgcggggtggtgcggtcggtgctccagccgaaagccccacgtccttggggcccaggcgagccattaccctggtttagggttagtgcctcacctaggagttgtgaacagtgtgcgtattttctaaaaatcaagtaagcaagttaaaaattgctcaaaatctaaattttacaatgaagattcaagcctactttttaggtaaagctttcaagccccctaagtccttccaggcaggagtgcacggatggtgagcacccccaccccaccccaggacagatgtgagtcacgtcgtatgtgtttgctgattgcagatacgggacgtgcaggaaacactgatgccccaggtcctgaccaccctggaggaggattcgaagatgacgcgactgatctcatgccgtattatcaacacgttcttaaaaacctcgggcggcatgacggatccagagaaactcatcaggatttatcctggtaggacatttctgttgttcacagcctgtgtatatgcagtcagccctccgtgtccctgggttccgtttgcatcc

SEQ ID NO: 12271 - DNA, 1901 bp, Artificial sequence
  DNA replication origin
agtttctgacgttgtgtgaggggacgcggccacgccaggaaggtccgagtttctgatgccgccggatgggaggtggccatggcaggaagaccgagtttctgacgctgcgtgacgggaggcggccacgccaggaagatcgagtttctgacgctgcgtgacgggaggcggccacgccaggaagatcgagtttctgacgctgcgtgacgggaggcggccacgccaggaagatcgagtttctgacgctgcgtgacgggaggcggccacgccaggaatatcgagtttctgacgctgcgtaacgggacgcggccacgccgggaagatccgagtttctgacgccgcgtgacgggaggcggccacaccaggaagatgcgagtttctgacgccgcgtgacgggacgcggccacgccgggaagatccgagtttctgacgccgcgtgacgggaggcggccacaccaggaagatgcgagtttctgacgccgcgtgaggggaggcggccacgccgggaagatgcgagtttctgacgccgcgtgacgggaggcggccacgccgcgaagagccgagtttctgacgccgcgtgacgggaggcggccacgccaggaagatccgagtttctgatgccgcgtgtcgggaggtggccacgccgcgaagatccgagtttctgacgccgcgcgacgggaggcggccacgccaggaagatccgagtttctgacgccgcgtgtcgggaggcggccacgccgcgaagatccgagtttctgacgctgcgcgacgggaggcggccacaccaggaagatccgacatcgcataaccggatgtagccacgccgggaaaccggacgcagctgcgcggggaaggtctaagtattttccaaaggaggcaaaaggcaaagtcagcacatccaggcccaaagcttccacacagcaaagggaagaatgagcagagtacagccgcagggacagcccgcgggtacgggatgggagactgtatcttagaaccgccgcctgacaaggattaatcactggaatatatgaggagctcaggctcaatagcagacaatctaataatccaattaaaaatgggtaaaagacctgaacagacagctctcaaaagacagcatggaaatgacaaacaggcgtctgaaaaggtgcccaccaccaccgctcctcagagaaatgcacatagaaacaagtgagacatcctctgaccccagttaaaatggctgcggaaacaagtcccggcgcggatgtggagacaagggaaccctcacgctgctggtgggaatgtaaatgagcaccgctgggagaacagtctggaggtccctccaaaactaaaaatagagccccatacagcccggcaatcccacttctgggcaaatacccaaaagagaggaattcagctatgggggagagctgcacgcgcacgccgaatgccccactgttccgacagccaaggtgtggaagcaaccggggtgtccacggacagatgaagggagaaggaaaacgtggagcgcacgcagtggaatattatccggccacaaaagaaatgagatccagtcattggatcaacatggagggaagtggaggtcgctatgttaagtgaaataagtcaggcacagaagggcaaattccgcacattctcatttgtgggaactaaaaataaaaataattcaactcatggagatagagcagaaggatggctcccagaggctcggaagaggaatggggccgggggaagaggtggggatggttaatgagtacaaaaacagaatgagtaagatttagtatttgatagcacaacagggtgactatggtcaacaataatttatcacacatttaaacataacgaaaagtatcactgaattatttgtaacacaaagaaagtgtaagtgtttgaagtgacgggga

SEQ ID NO: 12272 - DNA, 1584 bp, Artificial sequence
  DNA replication origin
ggatggggaggttgctgcagtggctggggagtctatcagattctgctgggagttaagagggggtccaggaggacctcaaggtctccgccttcagtcttgaggacagatggccactgagccactgagggtggcggaacccggcaggcagtcagggaggggggtagcggcccagggttcggcaccaggcagctgcacttgtgtgtggagctgaggccaggagaagagctctgagggagcggtgcagacacagcagaggagcagtgaggggcccacatgggcgagggaaagaccaagagactgagcacgggcgtcccgcagccagaggagggtgcgtggccgccagctgtgcctggcgctgctcagaggtgcaggcaggtggacggctgcagatgcctgccatgggcccagggcctcgaggaggggtaaggcgggctgcttccagggagcctgctgccaggcggatgtgcggtgggggaggtgggggaggtgggggcggcgtacagggcatctgtgttttgtttttttaaagacaggagaaagaatggcctgtaccgtgcagtggggaagggagatgccctgtgcagtcctggggaggcgagagggccggggctgcaggctgagctggtgcacaggggcactggtctcctcggcctagagcaaggtcctgaggacgagtgaggctgaggctgagagtaggagaagctcagaactcgggttgatggtgtgtagtgcaggacaggagagctgggagggcgcaggcagggctgggatttgccagggagtgtggggagctgggggcgttgcgtggatctggcaggatgggctgtcccagcgaggcctgcacgtgagctgctgtcctccttttaaacaatttccaattggtctccaattcgcagcttctttccgtgacctggagagaccacgggccccgccgtggatcaatgggctctggggctccctcactggctgacaacctgattccacgactcaaggcaggggctcccgacatgggctccaaggccctcggggtccccaggacccttcagagggtctgtgagtcaaagccaggcatgtggtcgcacgcagagcatgcccggcctgcccgtcactgtgctcacacctgcgcagatgcgggagcagctgaggcccacgccccctgccacactcaccctcgagcacacggcttcacctgccacactcaccctcacgcacacggcttacacccgcgagtgggcaccaggtgcaccgcttcacacggaggaccagggtcgtgcagcagagctgcttttcccaggaagaatggcggacggacgagcagtgcacccaccctggctgtgcggacgcgggatctggcagagcacggcgtgaaagtgaacggcccaagtccctcactcccagaacaaccgacagggtttgtggccgaggatacaagtcaagctctcacacaaaaaatcacaatgagccaaagcttggccctgccaccacaagccggactcttctgagcctggtgcccacgcaggagagtttctgacgttgcgtaacaagagcagccaccccaggacgatccgagtttctgatgccgcc

SEQ ID NO: 12273 - DNA, 894 bp, Artificial sequence
  DNA replication origin
cacgtgcacggcagtcccagtgtggacacgagcgacctgatgcagcggatgggtgcacagtagtcataacgtggatataagtaagctgacactctggacgggtggacggcagtcagaatgtggatacgaatgacctgagtcacaacgtggacaagtgacctgatgctgcatggtcactatgtgaatatgaggaacctgatgctgctgggtgggtgcacggcagtcacaacgtgcattcaaagaactgaaaatcgcctcctggcagttgtgggcagaccatgaaatgatgtcctgcagagtcttcaggtggcatttttgggcttagaaacaggtttcacaggagcaaataggctcagaaaaacaggcgactttcttatccaatttgcggatgccaattcacctgccgcagtgactgcaaacctcccacgggccaggcatcaccgacacagccggaaatgaacccatgcttacggagggttcatcgggaagcagtggccgatgatgaaaatcaggaaggcaaacgtgtcaggggctcgtggtggtgtgtgtgatgggggcagtgggagctgcaggggtgggggccagaaagggttgggcgtgtctagctgaggcaggaagaggatggggaggttgctgcagtggctggggagtctatcagattctgctgggagttaagagggggtccaggaggacctcaaggtctccgccttcagtcttgaggacagatggccactgagccactgagggtggcggaacccggcaggcagtcagggaggggggtagcggcccagggttcggcaccaggcagctgcacttgtgtgtggagctgaggccaggagaagagctctgagggagcggtgcagacacagcagaggagcagtgaggggcccacat

SEQ ID NO: 12274 - DNA, 1440 bp, Artificial sequence
  DNA replication origin
atttcatgagatctaattgtggttgcccctataggtagcaggaaagtaaagttgcatttccctctcgcacattctacacccaagtgcctaaaagatctcattgtaagtgggtagtgttaccggaagccattgtgttcacacgggggaaatgccgtatatatttttcaacaaatattaacgtttatactttcatgtttgaaaatttaattaaaaatgtttgttttaatgattgtgtatgcctgactttgtgagttggtaactaaccgacatgtcaggcagggatcccagcctctagaattccagagttcctctgtggggtgtcgtagtgcccgctctggacaccagggggcaggagctcccaacacgttcggggaacacccctggtaaggagggccccataggactcaccttgagaggggctggggcatcagggtgagggcaggccagccttgggggggtgtcagggttgggggaggtcagccttggggggcatcatcagggtgagggcaggccagcgttgggaggggtgtcatggttggggaggtcagccttggggggtgtcagggtcgggtgaggtcagccttggggggcatcagggtgagggcaggccagccttgggggtgtctgggtagggggaggtcagcctggttggcaggtggggtgtccaggtgcagagaggtcaatctggatgggggttggtttcagagttgggggacgtcaaccttgatggagggtgttttgtctgggtgggggaaggtcacctttgggattgtctgggtgggggaggtcagccttgggggaggtcagccttgggggtggctggggtgtccaggttgtgggaggtcagcctgggggggacgccggggtggagaggtcagccttggggggtgtctgggttgagggaggtgaacctcggagggtgtcagggttgggtgaggtcagccttggggggtatctggtttgggggaggtcagccttgtggtgtctgggttgggggaggtcagccttggggggtgtctgggttgggggaggtcagccttggggggtgtctgggttgggggaggtcagccttggggggtgtctgagttgggggaggtcactcttggggggagtcagggtgggaggaggtcactcttggggggtgtctgggttaggggaggtcacccctggggggtgtcagggttgggggagttcagccttggggatggctggagtgtccggattgggaggtcagcatgtatagctgagcctgccccatggactcacatcccctgccctagacaccctcgccaccctctggtccccttcagagttgcaccgtcatggctgttccctgcgccagcttctgtaactcgtggccacagggatttcgggggccctcaggggtggtcttccacctcttccttgtgtgccctttgacctctgtggcttctgccacat

SEQ ID NO: 12275 - DNA, 747 bp, Artificial sequence
  DNA replication origin
gaggtcagccttggggggtgtctgggttgggggaggtcagccttggggggtgtctgggttgggggaggtcagccttggggggtgtctgagttgggggaggtcactcttggggggagtcagggtgggaggaggtcactcttggggggtgtctgggttaggggaggtcacccctggggggtgtcagggttgggggagttcagccttggggatggctggagtgtccggattgggaggtcagcatgtatagctgagcctgccccatggactcacatcccctgccctagacaccctcgccaccctctggtccccttcagagttgcaccgtcatggctgttccctgcgccagcttctgtaactcgtggccacagggatttcgggggccctcaggggtggtcttccacctcttccttgtgtgccctttgacctctgtggcttctgccacatccttgaagagccctcaagagcccctgggtcggtggtccttggtggcgatggagccagtggcagcagcctcacctggaagcttgttagaaaggcacattgcagggcctcaggccagacctactgaggcagagacaggtgggccgcagtcagccctgcaggtgattctgaggctgcggactgggaggacccccacctgtgcaccaagcagttcccatccagctcccatccagcacgaggctccgtcgtctgtctctgtcacaagacccagaaatgaatggcagggagcttgcccgagaggacaca

SEQ ID NO: 12276 - DNA, 902 bp, Artificial sequence
  DNA replication origin
ccgcgctgagggcgcccaggccgcgaccccgcgtccccccggcccccgggcccccgcctcgcgtccccgcagcccggcgcccgccccggggtgcccttggcccggcccgccgggagctcacctgcctcgcgccgccgcctcaggcctcgtctgcgccgcccaggcccgagaagacgctctgcccacgccagccaatcgcgggccgcgccccgggccgagggcgggagcaacgcaggccttcaccagtcccgagcgcgccacccgaagcgttctggccaatgacgaggcggctacgggccgcgggcggaggggcgaggaggactccaggcgggggaaggggagggggagagggagggagggggaggggcctggatgcgtcacggggtgggacgggcgaggccacgtcccggtatgggggctgcacctggaggagggggactgcattcgggggaaaggcctgcatctgagggagggctccgcatttaggggaggggtctgcacctgctggggggggtttgcatctgggggaggggcccgcatctgggggagggatctgcacctgggggaggggtctgcacctgggggaggggtctgcacctgggggaggggtctgcatcgcggagggctctgcccctcagatacgcggtctacgttggggaggggtctgcatctgggggaagggtctgcatcttcggaaaggtgtgtgcatctgggggagggcgtccgcatcttggggagaggtttggatccgggggaggggtctgcatctccatgagagggtctgaatctccaggagggcgtccgcgtcttgggggaggggcagctgcggctccgggaggcagcccccacttccgacggggctcacctcggccagtgcctccttggccttccgcacgtctccc

SEQ ID NO: 12277 - DNA, 1368 bp, Artificial sequence
  DNA replication origin
cagagcgtcttctcgggcctgggcggcgcagacgaggcctgaggcggcggcgcgaggcaggtgagctcccggcgggccgggccaagggcaccccggggcgggcgccgggctgcggggacgcgaggcgggggcccgggggccggggggacgcggggtcgcggcctgggcgccctcagcgcgggctgcgccagggcctcctgggccaacggctgccgcccccgcccgtcccgcgccccgcagctaccccggcccgcgcaggtgaagacgcccggagaccctggcggtcgtggcgcaggggtcctgctcctccccggggtgtcgccagccggctcgtggcgcggggtcgggggcggagcggggagaggcgcgggaggccgcggcgggcggcccgggctgggcgtggaggagcgtcctccccgcgttctcaggcctcggcccgggctgcccgcctggaccccgttgcggggtcccagcccctggaagtagcggcggggccgtgggtggggtggtgggaagacggttttatttaagagggggggtctcgctgtgtttcccaggctggtctcgacctcctgagcgcgagctatcctcccgcctccgcctcccgaagcgctcggatcacaggcgtgagccaccgcgcccggctgatagtcgtattttttgtagggttgtggtctctccatgctgcccaggtcggactcctaggctcaagcgatcccctcgccccagcctgcctggaggcgcgcgcgtggtctccgcgccctgttgcgccttcaaagtgcccagaatggtgtctggtgcaaaataagcagcggcggggaacaccttgccactgtcaccgtcatggggaggatttctcccggctccccagggctccccaggacaggtgggcggtgcggtccgaggtctctgctctcgctttgcagcttgtggttgctgcgtctggctctgattccgggtgggaagctgcccataattgtgtcttctaagcttcagtcatagtattgcccatgaagtgcttgcggctctaattgctaaagctttgtatgaaggcttttgtgtgtaatctgtttttactccctacatctccactgtggagaaacaccgtgtgttttggtttatctcatctgttgttggacacttgatagttttttgaagcctttagttttctcaaattatttctctaataatttccttttctttgtttaccctttttttctgactgttctggaaatactactgtttgggctggaaggcttgggctggctttataattttcttgtctttctcccatttaatgtttgttctactttctagatttcctctttttcttccagtatatctatttagcattttagtttggccatg

SEQ ID NO: 12278 - DNA, 1057 bp, Artificial sequence
  DNA replication origin
aattactgttgggaatggagcagctgacatacctgttccggttagacgaggaagcatatgaaggcctgaacatgccgggaggaagaatgagaggcccaagcgcagcacacacagccctgtggccacccgcgaattcccgcacacacacggccctgtggccacccgtgaattcccacacacacacggccctgtggccacccgtgaattcccacacacacacggccctgtggccacccgcgaattcccgcacgcacgtggccctgtggccacgcatgaattcctgtacaggatttttccggagcgtagtcaggtaaggagtagagagcggtggagactggaggattgtcagcttagtggcaaagcgagcagggtgcgtggcgtggagagcgcccccttccagtcacgtgcagcgttcacttgttctccaggcaaggattagagccgaaggtgaatgaggcacagttcctgccgtcacagagttcaagggccgcttggagagaaggactcattgagaaataatcattatgatttgtgttcctgctgatcaccagtgagtgctagaattgacagtaactggggtaggatgaggcccatgggggcttcctggtggtggtatctctgctgaacattaagtgtgaggagaagttagctaggcagagtttggggtgtaactagaccaaggagatgcggaaggggatcaggaaataggagggcacctcaggcaggaggacattcattgcaaggaaagagtggaggagcggcatgtaaatgggtggggaggagagggttccctggagccacggtggattctaaggcacggatgggaagtgaggagggagaagtagcagcatttgcaccagtgccgtgtgtgcaggcagccatggggggagtctgtgcgaacaaggtaggcagatttctctgtagatgggtcattcaggtggttttctcaaggattggcttgagaggcaagactggagccagggagacggtcaaggcacttgcagggagccagccagaggtggcatgtcagggcgggaatggagagggggcatggggc

SEQ ID NO: 12279 - DNA, 1168 bp, Artificial sequence
  DNA replication origin
ggcaaagggagagcagttcaaggctcagctccgtcttcacagcgcggtagaagacggcttgggggctgaggggcagtaaatccacagctggcatagaggagaagccggcgggtacgtgcccatcgttcaccatctcttctaaacacgaatgaaatgcgtgtgtcgtcctcacacactgaaggcaggctgcgtgcacggtctcctcctccgttgcgcacagcaacgtggctgcctgggcgcagcgtctgcaacttgtcagtcagtccctgtgtgtgcctggggacgctgtgctgcgaacagtgctctccggtcacatctgccctgcacctggaggtgggggtgcgatcgcaggccagaggcagatgtgtgcgcagcaggccgaccttgccaggctgtgcttctggggctgcaggctgcaccgtggccgggttaggttagaacgtgcattttcccagggcatcagcagctgacccttgatgttggtcggatgggggggcagtgctggttccctgtggtgttggtcggatgggggggcagtgctggttccctgtggtgttggtcggattggggggcagtgctggttccctgtggtgttggtcggatgggggggcagtgctggttctctgtggtgttggtcggatggggggacagtgctggttccctgtggtgttggtcggattggggggcagtgctggttccctgtggtgttggtcggattggggggcagtgctggttccctgtggtgttggtcggatgggggggcagtgctggttccctgtggtgttggtcggatcggggggcagtgctggttctctgtggtgttggtcggatgggggggcagtgctggttccctgtggtgttggtcggatgggggggcagtgctggttccctgtggtgttggtcggatggggggacagtgctggttccctgtggtgttggtcggatggggggacagtgctggttccctgtggtgttggtcggatggggggacagtgctggttccctgtggtggtgtcccttcttgctgtgcagggtggagggcatcttgccacgaccaaggaccattgaccttcaccttttctttgaagtatgttgtatgtctcacccatttttctttaaggttctggtcgttttaacttttatacaacatatgggttggagatagtgg

SEQ ID NO: 12280 - DNA, 1373 bp, Artificial sequence
  DNA replication origin
gggtccgcaggcaacacgtgacccaggggcgggtccgcaggcaacacgtgacccaggggcgggtccgcaggcaacacgtgacccaggggcgggcccgcaggcaacacgtgacccagaggcgggtccgcaggcaacacgtgacccagaggcgggtccgcaggcaacacgtggcccagaggcgggtccgcaggcaacacgtggcccagggcgggcccgggagcggcacgtgacccggggccgggactggctcgcgccacaatggcgggtggcacgaaactgcctggcggggcgctgcgcgtaaacaggctgcggcggcggctgaccccgagcaggaagcgtcccggggtgggaccctccccacgcgcgcggtgtaacagcagccattgagctatacagttcaatgtgtaaaatgcttataaattaaaaatacttttatagggccgggcgccgcggctcacgcttgtaaacccagcactttggaaggccgaggtgggcggatcacctgatgtcaggggttcgagaccagcctggccaacatggcgaaaccccgtctctactaaaaatactaaaatgagctgggcgtggtggcaggcgcctctaattccagctactcgggaggctgaggcaggagaactgcttgaacccagaaggtggaggttgcagtgagccgggatcccaccactgccctccagcctgggtaacagagccagactgtgtctccaaacaaacagaaacaacctcttaggatcgctgaggggcgttcctcctctttgaaaggccacctgcggtccttccctggccgtggctggggacctgcggctgtgcctgggtggacggctcactcctccaggatcgggtcctgctggaagggggaactgggtcggcctagagcttccagccctgtcaggctgcggaaacggggtccaaaccccagtcagagttagaaacggggcctgaggcccagccctagccgtgcagggttgggaacggcttggctgtaagaattggggtttgaaggcggttcgccgttcggtccgaagactcctccgttggatttacagggtcagcccactctcacaggttagcattgtttataataaaaaagaagaaacaaaggcctttaagctgggccctgcttgaatcaacatgatccagccgtgcatacaatggacaaaaacagctgttaaaaaaaaaaaggttcttacgggacacacttggtaactggggaaaagccaggtgcaaaatagtgtggtgtgtgtgctatcgtctgtgacctggtgccagcacctgccttcagctacagaagcagcgatgaaaactgtgtcctgaggaaaggcatcagttttcctaatgttctgcccatcaagcaactt

SEQ ID NO: 12281 - DNA, 2758 bp, Artificial sequence
  DNA replication origin
aggaacgcgaatctctttctaaaccaattaaacagctcagttttcaaagaagaaaagcatctacaacacaacagtaaaatgcgatgtagcctggctggtgtgtatttatactatgttgaggttaatagaaaattctggaaacaaggctgcccttcaggtcatgtaagatgtctcctcataagccacgatcaggggcccacatgcactgtcctgagcccgggctgctcagtaggtccgtacaaacaatgtgaacactaaacacagatgccaggacctcatcccagcccgttcaggtcagctaagattgacaactaccgacacaaacactcctcttttctcatttcctggcacaaacaagtgttttaagcaacgaaatggcatccactccgtggctggggctgctgagtccaccttcgcttgggctcaccagcacgtggcaccgcggcgtgccggccactcgcttacccaggctacattccagccagcggggcgcaggcacaggttgggcgtgacagacggtgtttaattcaaacatgaactagcaaactacaaccaaagtggcacctccagagttttccaggtaacaattccacttgctatggaaagaaaatatttaaaatctaggcccagcagagggtcttcagggagtggagctgcactgcgtgatgctctcatggggttcctcatccccccacacaccaggcatgcaccccgatgtgagtgatgggtccctgagggactctactcgggggggggtgtctgtggggcaggaggctgtccaaagggggaattcaggacacaccacactccattttgctataaaccaaaaactgctctaaaaagtaaagtctactggccgggcgccgtggctcacgcctgtaatcccagcactttgggtggccgaggtgggcggatcgcgaggtcaggagttcgagaccagcctggccaacatggtgaaaccccgtctctagtaaaaatacaaaaattagccgggggtggtggtgcgcgccagtaattccagctactcaggaggctgaggcaggagaatatagcttgaactcgggaggtggaggttgcagtgagccgagatcccaccattgcactccagcctgggacagaggacagagcgagactccgtcgcaaaaaaaaaaaaaaaaagtttattaaaaggaaaaaacccctgaaaaccaggcccaaactgtataaaggccagaccaactgcccttaaatacaatatcaaaacattcacggccctgtggcagtttagaaggtaccccatggaaaatactaaatcctctgaaatgatctttaaaacagacccaattcctagtgactggccagactgttccctgacctgaaccataagagataatctgatatgcataatttacagaatgccacacacagaacaactgaacattctgcagtaactgtatgacagcaaaaatactggaacagagcagtcctgaagacaatcaaccaagccacgcagcagcctggaacttccaagcggtcacagtcccgaggggcgtgcagttaacccagcatagccagctctgctcgcgctcgccctccaggctacaccggccgtgcaggtgtcaccgagcctaggtccagaggcggctgactcggttcggcaggccgggcggcgtcaacagagaagcggtttcaccctcagcctggaccctcggtgagaggaacgccagcgacttcctacggagcccggtgtagggcccggctggagaacctgaaggccaggaggagggaggcagggaggtgggggaatgcggaacaggtggaggccaggggggaaggtgggggaggcaaggggcaggcccggaggggtggagacagaggaaggggagggggaggccgggcagggaggcctgagagagaaaggcggggggccgggggggaaggtgaagatctgggaaggccacggggaggggaacaggtgggggccaagggagaggtggagggaggtgggggaggggcggtggagccggagaacagggagggggaggccgggcagggagatctgggacagggagatatggggtggggagcaggtgaaggcccggcggaaggaagcggagttggggagactacgggagaggtgggggaggtccaggggaggtggaggctaggagagggaagccgaaagggacgaggacagtggtaggctggggagagagccggggttgggggcagcaggaagagagagagacggggggtgggcagagggaggacagggagagaggcggggggcagagggaggcagggtagagagacgggagtgagggcagggggaggccggggagagagagacggagggagcagggggaggctggaagaaagagacgaggggcagggggaggacggcgagagagagacgaggggcagggggaggccagggagagcgaggcggggggcaaggagaggccgaggacagagagacgaggggccgggagaggccggggagagagacgcaaaggaagaaggagaaggccagagagagagagagagagagcgagaccaaggtggggcgggggaggcggccggagagagacagagaccgaaggacgaggcgggaggcggccgaggagacagaggaaggccgaggggcgtgtggggacggaggagggaacaggtggaggctgggagtaggggaaggccgaggaggaacgcaggagaggggaaggaagccgaggcgggagtcagaggccgagggaacgggggcgccgggccacacagggcc

SEQ ID NO: 12282 - DNA, 1892 bp, Artificial sequence
  DNA replication origin
ccctcgccactcctgcgcacgggccctgtggggagagccaggcagtgggtggcgtgggacaggtgatgcccatgcccagtactcaggagacctgcatggcagctcctaagatgggtacaagcgatcataaggagggatgtacgtgtctcatctccccacccaccacgggatcaggttgaggccgtccagggagtgcatgggagggctgcgctcggcgcatctgcagagatcccctgaagaggggccctggctgcctcccactggggtaggtgcgggcccaggtccccgacaccgtgacggtgctgtgggactttgatggacctcacccggggagcccaggcctgctccacggcaaggtggccacgcactgcctctgcagtcctgagcacaggctccatacgggacctgaggcctgggctccatgacacttgggctatgtgcttccctggtgcttccctcctggggatgaaatcacacccataggtaaaggtttgggagtggagggagacagcaggagacaaagcaaggggacgaggactctggcagccacaaaggcagcgggagggccctggaggctcctgttgggcagcgcagtcaggaaagggcccactaggtgggagaggcaggcgcctggtgagtgctgagatctgcaccacgagaagggctgggctcccaaggcatgcatggggcctgggagtggagggagtgtgagcgggtgttaggacggggtctggggcgagcgggtgttaggacgggcctgggagcggagggagtgcgagcgggtgttaggacggggtctgggagtggagggagcgcgagcgggtgttaggacggggcctgggagtggagggagcgagagcgggtgttaggacggggtctgggagtggagggagcgcgagcgggtgttaggacggggtctgggagtggagggagcgcgagcgggtgttaggacggggtctgggagtggagggagcgagagcgggtgtcaggacggggtctgggagtggagggagcgcgagcgggtgtcaggacggggtctgggagtggagggagcgcgagcgggtgttaggacggggtctgggagtggagggagcgcgagcgggtgttaggacggggtctgggagtggagggagcgcgagcgggtgttaggacgggtctgggagtggagggagcgcgagcgggtgttaggacgggtctgggagtggagggagcgcgagcgggtgttaggacgggtctgggagtggagggagcgcgagcgggtgttaggacggggtctgggagtggagggagcgcgagcgggtgttaggacggggtctgggagtggagggagcgtgagcgggtgtcaggacggggtctgggagtggagggagcgcgagcgggtgtcaggacggggtctgggagtggagggagtgcgagcgggtgtcaggacggggtctgggagtggagggagtgtgagcgggtgttaggacgggcctgggagtggagggagtgtgagcgggtgttaggacgggcttgggagtggtgtgtgttcatgagatgttgagggttggttgttgggtcagtgtggtgagaacatcaggctggtttctgctgttgatctacatccgaggtgcactggcctgggccctgattatattgcgccctgtaagttgcttctggtaggtgagaagggtcacatggtaacactaattggttatcacaacgaacattagtgcagttggattaagcagctccaagagcttggagaatcaagatgttgcatagctgagtgacttttccccgtggatctgttgatttggtgctgcgtgtgaggcctgggctggctctgagtccctatcaggacctctgcctgtgggctctggctgggctctcctccagggcgggcaggtggg

SEQ ID NO: 12283 - DNA, 2197 bp, Artificial sequence
  DNA replication origin
atcctctgacctcagcgttgcccgctgcggagctttgccaggagctggcgtccgtgacttaagtgaaaagctgggtcaaacccagagctccctggctctgcgctacgccgtgtacatgttttctctgggctgacaggggccctgcccctggggcactgagccctccctgtgggtcctcgaacagaagccagggtctgtgcggcacccaccagctgctgggccatggcggagtgttctggtgcgggccagcgcctgaccggtgcgggcggcctcaggagaggagagcttgctcagtgcgtcacgtagtcagggctcaggctggggcccggctccagagcctggtcacattcccaagcttcattctcttcacctgtgaattgcaggcttccctggtgtgccctgcacatgagggaagacacgcgtgaagcactgggtccctccatggccttgggccgcaggaaccgtgggcgcacgagcttgggaaggacatgtcggaggccggcgcctgtgcgggcagaagctgtgtcctccagcccttccaccaccagcatgttctcatttccaggtttctctgtttaaaaaacaaaagtagcgcatcggtggtcttcacgacgtacacccagaagcacccgtccatcgaggacgggcctccgtttgtggagccgctgcttaacttcatctggttcctgctgctggctgtggacgggtgcgtcttgggatcctgcagggggagggggctgtgaatgtgcgggttgtgtgtagacgtggtgtggatagctgtgtgggtgtgtgtgcaagtgtagccatggtgtgggtagccgtgtgggtatatgcatagggtatgagtgctgggtgtagacgtggcataggtgtgtgtgcaggtctgttgggtgtagacatggtagtgcgggtagctgtgtgggtgtatgtgcaagtgtagacatggcgtgggggagtgtaggtgttgggcctctggtagtgtgggtgtgtgcaggtgtggggtggtgtgggtgcagacgtctggggggttgtgtgcgggtgttgggtatccatgtggtgtgggggtgtgtagacgtgtatacaggtgtgagtgcaggtgtagacggcgtatgtgcaggtgttgcgtgtctggtgtgggtagttggggtgcgtgcaggtatgtgtgttgtgtgtagacgtgtgggtagctgtgggggtgtgcaggtgtgtgtactgggtatagacgtggcatgggttgctgggtgtgtgcaggtgttgggtgtttgcaggtaagtgttgggggcgggcgtggtggtgtttgcaggtgaggggtgtaggcgtgtgtgcaggtgagtgttgggtgtgggcgtggtggtgtgtgcaggcgagtgttgggtgcgggcgtggtgatgtgtgcaggcaagtgttgggtgtaggcgtggtgtgtgcaggtgagtgttgggtgtaggcgtggtggtgtttgcaggtgagtgttgggcgcgggcgcggtggtgtgtgcaggtgagtgttgggcgtgggcgtggtggtgtgtgcaggtgagtgttgggcgcgggcgcggtggtgtgtgcaggtgagtgttgggcgcgggcgcggtggtgtgtgcaggtgagtgttgggcgcgggcgtggtggtggttgcaggtgagtgttgggtgtgggcgtggtgtgtgcaggtgagtgttgggcgtgggcgcggtggtgtgtgcaggtgagtgttgggtgcaggcatggttgcaggtgagtgttgggcgcgggcgcggtggtttgtgcaggtgagtgttgggtgcgggcatggtggttgcaggtgagtgttgggtgtaggcgtggtggtgtgtgcaggtgagtgttgggcgtaggcgtggtggttgcaggtgagtgttgggcatgggcgcggtgtgtgcaggtgagtgttgggcgcgggcgtggtggtgtgtgcaggtgagtgttgggcgcaggcgcggtggtttgtgcaggtgagtgtggtcctgttctgctcacccagcacatccctgtgtgtctctgtcccagtgggaagctgacggtgttcactgtgctgtgtgagcagtaccagccatccctccggcgggaccccatgtacaacgaggtgagagcttggggctggggagggaggaggggaccccacggtctgggtccaccccctctgagcccgctgcctgtgccttgcagtacctcgaccg

SEQ ID NO: 12284 - DNA, 1163 bp, Artificial sequence
  DNA replication origin
atcacatcacgtggctggctgcgtgctcccccgtctctctgtgcgccatgctaggtggcctccgtgagcctggtgtgcccgggacgctgccagccgtcgtgctggggcaggcagtgctgccgtggctttggggtcgcggcggggcgggtgtctcactgtgggtggtggttcgtggcaccgcgggagaggcccctcactgagccgcctgccttcccagcgtcacctgtctgggtttattttagtgggaggtgtgaggtggtgacctctccccacagatgtctgccctggtgcagctgcgtcctgtggcaggccctgtcctccccggatgccccccccagacaccctggccctcaccgtgccccgtgacacaggcacctccaccccaacacccgtcaggagcgccctgactcttctgactctccagtcgaaaccgcagcctgagctcccgttccacagaagcgccgtcagggcgtgtcctgagatggggtgacgtcgtggataagagagggtgacactgccacggccgtgtctttgtattcaaagaacacggtgtaacgtctcgtttgggttcaggagacttttggagctttggctttgtacgtacagagtagttgttgattggataaaaatcagatgacagtgaccgcagttggcccctgtgggagcagccgttgaagctttggcacatccagttgattcatgtgtcactgtagggcgcagtgtgctctacagccccacttctctgctcaaaaatctctttccgtgaggtggtgttggttctgtaggtccctccgtggctcctgttggtgggtgtggagggtggttctgtaggcccccgtggctgctccatggccccgttggtggacgtgggagggccgttctgtggagtcccccgtggctgctccatgtttgagtatctctgtggtcgtcggctccctggcctccagagtgtcctgtcccggggttcctgggtcgtagacagtagcgatgtgaggcttttgcttgttccatgggacactgggacaccttgtgagacgtttgtgggaaggaggggcttgggggcctgtgggaggctgcccaggcgtgactgccacggtgttcttctttccagggaaccttctgaccagcctcatgggctcctcagagcaggaggatggggagga

SEQ ID NO: 12285 - DNA, 1028 bp, Artificial sequence
  DNA replication origin
cacccagccaacctgcccctccctgacccggggccccctttcctccagggcccagtctggctcccgagctcagacacagcccccaggagccgcccaccacggctgtgggaacttccaggcctcagcgcagagccctgcttggggccagcacggtgggcagctgccggccgctggggactgggccctgctcgcatgccgccccgccctccccccacctccacgactatttattgagcgcctgttgtgtgtcacggggctatgagggccgtggggtgtttgggtggattatccacacaggtcccggcccctgcccgggctggagttgccacagcctgtgctcctggtcctcacctggaggggccagcaggctgccgtcccaccacacgtggcctctgcgcccagcacggtgctcgccgacagtggtgtctgaacccttggggacgagggcctgggccgcggtgaggccaccagaggcaggagtggccctgggggtcccgggcactgtcgcgcttgctgcaggcggcccagccgtgtatttatttttcacctatctccttcctgtcaaggcaggccgggctccagggctccccttgcgtggggcatgtaggtgggggaggcgtctgcaggtcacctggggggcccagccctctcccagccttgcctggctgagctgtgttccaggggagccctggacaagccctcataggcagggagggggtttccgaggccaggcatccgccgccccgtgtcgcatcctggaataaaatgtggctctggcatggttccagctgtgtgtccgaggatggagtggggaggaagttgggctgggaacacgtggccctgcctccctggcttcaggagaatcttcgtctgctcccagggacctgacagggccctcgctccctgaggtttggagggaggacacggtgtctgagctagtcacagcgccatgctccttgtacacgggagacggtccctacccgaggtgccccccagcaccccttccccaggtgccccccttccccagg

SEQ ID NO: 12286 - DNA, 2599 bp, Artificial sequence
  DNA replication origin
gcctgggctatgggccctctgttccagggtgctggcccaccccacgctctccagaggaccagggcggctccctggagagcagttttgctctctgcccactctcggtaggggccacagctccaagggcgtttataaacagatgagcctcccttctcccaccaccccaagacttgcttgagctacaaaataaggatcttcataaaaatagcaccatctgaaaggaaggcaagttggcccaggccccagcagcaccagggccacagagtgagcttggatggcagcccccgaccctgtccagcccggcccggcccggcccttcggcccttcggcccttctcaggacttcgccgggggaggctgcacctgccctcccgcagaggggcagcccctgtgtagcagccccggcctcagcgtgggcacaggggccaggcctgcggcaggactgctgggagctgaggtgccggggaggaggaaggggctgggctctgggggaagcggcccctctgtggggaccccagcccctctgtggggaccccagcgctgcagcctcctcagcccaagcctgtgcccacctttgcccctaggagattgtggactggttcaatgcactccgagctgctcgcttccactacctgcaggtggcattcccaggggccggcgacgcagatgtgagtggcggccctgcggtcagctccagggcagacaggggtggtggggtggggggtggacggagccctcgtgccctgagtctgggatgatgttgagccctagggtgggcctgggactggccaagggctcaccctgacgtgcctgcagccctcctgcctcactctagaacttcagctcagccaaaggggaaagcggggagggaaggggtggcaagcagaggcagaaatgtggatcctgcggaggctaagccaggcctgggccctgacctggtggcccggggtgaggggagcacagaggggcacagccagggaggggctcggcctgagctgcacttctgaggtcccctgcctggtgtgtcctgccctagctggtgccaaagctctccaggaactacctgaaggaaggctacatggagaagacggggcccaaggtgggtgtgccgcacgtgcggcctggggtggcctggggtacgccatggtgggtctcggactgaagtgcagcagccttgccagctgccgcctgtgttttaaactggtgtctggtgggtcctcacagccccttgtctgtgcctggccggggtccccgaggactcgggccactgtcctaggctttggttagaccctccctgcccgctcacgtctgaccagcttcctcacccacgggaccgtgcacctgcgcggccaggggcccacatcttgccattccctgaggcataatgtgggagggagacacaaatcctgggagtcttggtggtcccggaggagaagtgcaggtgtgagggctcgtaagtgaggcctgggcccccatctggggcccagggagggctgggggacctggaggagcaggagggaggtgccgtgtggaggctggaggacaggcgtgtgcggaggcctcgtggggcgtggccagcggcaggcgtgagtgaatggaggtgactgacccgggccagtctgggccctgccctccggggtgtgctgtggtcagctggatgtagggcctgcctcggcgacctgccggtcacgggccctctctgacccacagcaaacggaaggcttccggaagcgctggttcaccatggatgaccgcaggctcatgtacttcaaagaccccctggtaaggaggagctgtggccccagcacgggagggcagctcactggctggggttgccagatgcgtgaccaggagggcgggtggcctcccgagtcctggcctgagtgaagcggggctggaagggacatggccccgcctccagtgcggtccccacccacaggacgccttcgcccgaggggaagtcttcattggcagcaaggagagtggctacacggtgctgcatgggttcccgccgtccacccagggccaccactggccacatggcatcaccatcgtcacgcccgaccgcaagtttctgtttgcctgcgagacggagtccgaccagagggagtgggtggcggccttccagaaggcggtggacaggcccatgctgccccaggagtacgcaggtgaggggggcgggcggccggcggcctggaagggctcccagctccccgccgctgtgacaacgctggaccctgttccgttgcagtggaggcgcacttcaagcataaaccttagcgagtgcggctggaggaccacggacattggactcactgtggctggacggaggggacccgtggatgggggggctctggcgtcctgaggccacctggccccacctgctcctcagggcagcccggcgcggccaggtagggcccgagcttcagcttccaggatgcttctctggaacctcaaggcaggcagcccaggccctgggcctgatctctaaccccgtcatgctgctgctgaccacacccagccaacctgcccctccctgacccggggccccctttcctccagggcccagtctggctcccgagctcagacacagcccccag

SEQ ID NO: 12287 - DNA, 1285 bp, Artificial sequence
  DNA replication origin
acctcaggtgatccacctgcctcagcctcccaaagtgctgggattacaggtgtgagccactgcgcccagccgcaatttttgtatttttagtagagaccgggtttcaccatgttggtcaggctggtgtccaactcctgatcctccaaagataattccccccgcccagggcagacgcttggcccccagctgtgggagctgagggagtttccgctgcagcctgcagggtcacagagctccagcgtggagtgcaccaggcatgccccgtctgcccggagccccagagtcggctccatctcctgctgggggaaaaggggcgattttccaaccagttctgcttagagccccctgcatttccgggggacctggagctgtgaattcccaaggcctttggggcagtgtggtgtggacgggttcagcttcctctaggaggagggagggcggggccaaatgggacggggcgggccggaggaaagggtgggcgggggaaggaggggaggcggggcctcgggctggttgggtggcgtgggtgtggcttgtgggcgtggcctaggaggaagggccacaggagaaagcagggctggaggccgatgaggggcagtcggggtgggtggggctttgctgggtggggccactggaagaggacagggcaatcccactgctatgggaggagcctggggctacaccatcctccagctggtgctgggccgggtgccagctggagaagccgtgactggattggtccagtgctgggggctttgcctgtgggacaaaagtcaaggccaaaggggctggggagaagcctgaggagggatggggctccctggctcttcctgggcaggagagggtgcagccaagagtaaagatgggcacctttccagaggtcaccagctccaggctgtaggctgaacaggaggcccagggcgcaggttataatgtcatggggccaagggtctgggcagaccccaggaggggcgctgggtctaggggcaggggacagccaggctgaagtctagacccagagggcacccgacgtggggctgggtgccaggcctgggctatgggccctctgttccagggtgctggcccaccccacgctctccagaggaccagggcggctccctggagagcagttttgctctctgcccactctcggtaggggccacagctccaagggcgtttataaacagatgagcctcccttctcccaccaccccaagacttgcttgagctacaaaataaggatcttcataaaaatagcaccatctgaaaggaaggcaagttggccc

SEQ ID NO: 12288 - DNA, 3341 bp, Artificial sequence
  DNA replication origin
cagccccgggccccacacggcacggcagctcccacaggggcaggccccagccaccagcccacctccagccagtgcccgccacggctcagggcgggtgcttctgaccatcagcccatgggtctggggccaccttgtgaagaccccactgttcttgccaatgtgtttgtcctgtcccagtccagtctccccagggtacctccaggaaaactaggggctttctggggtcctggctggctccagaggggcccagtgactaggttctccctctcccacggctgggcctgagttcagggggccccgcccggccgcccaggctcctggaaagcctcagctgccccaccctgggggacgctgggtccggcacacagaggctcagcccaacacaggccggttctcctggagcgtccccatcggggggggcagcagggagggcagctgcggatggacgcggccaccacaggccccagtgtgggaggccgggatgccgccctgggacaggcccccaccccacccccgtctgtgactcacatcatttctgttgaaatacttcagagcaccctctcgttctgtcagcacaaacttccggctcaaaaactgcccgttgtcccggccacgcttccagagaaaaccctcacggtaccctgtgggggaaaggggacacgagtcggtgacagtggatgggggggaggaaacaaaaggagtgacgatggacaggacagaggggacatggggagaagacacgggggacacggacgggggacacggacagggggagacggacggggagaggggacatggaggagacagggagataggaagatgggcagggaaagggaaagggaaaggagaaaggagaaaggagaaaggagaaaggagaaagggagaaagagaaaggagaaaggagaaagggagaaagggagaaagggaaaggagaaaggagaaagggaaaggagaaaggagaagggagaagggagaagggagaagggagaagggagaagggagaagggagaagggagaagggagaaaggagaaaggagaaaggagaaaggagaaaggagaaaggagaaaggagaaaggagaaaggagaaagggaaaggagaaagggaaaggagaaagggaaaggagaaaggagaaaggagaaagggaaaggagaaaggagaaaggagaaaggagaaaggagaaaggagaaagggaaaggagaaagggaaaggagaagggagaagggagaagggagaaaggagaaaggagaaaggagaaaggagaaaggagaaaggagaaaggagaagggagaagggagaagggagaagggagaagggagaagggagaagggagaagggagaagggagaaaggagaaaggagaaaggagaaaggagaaagggaaaggagaaagggagaaaggagaaagggagaaaggagaaagggagaaaggagaaagggagaaaggagaaagggaaaggagaaaggagaaaggagaaaggagaaagggaaaggagaaaggagaaagggaaaggagaaaggagaaaggagaaagggagaaaggagaaagggaaaggagaaagggagaaaggagaaagggagaaaggagaaagggagaaaggagaaagggagaaaggagaaagggaaaggagaaaggagaaaggagaaagggaaaggagaaaggagaaaggagaaaggagaaaggagaaagggaaaggagaaagggagaaaggagaaagggagaaaggagaaagggagaaaggagaaagggagaaaggagaaagggaaaggagaaaggagaaaggagaaaggagaaagggaaaggagaaaggagaaagggaaaggagaaagggagaaagagaaaggagaaaggagaaaggagaaaggagaaagggaaaggagaaagggagaaagggaaaggagaaaggagaaaggagaaaggagaaagggaaaggagaaaggagaaaggagaaaggagaaagggaaaggagaaagggagaaaggagaaaggagaaagggaaaggagaaaggagaagggagaaagggagaaagggaaaggagaaagggaaaggagaaaggagaaaggagaagggagaaagggagaaagggaaaggagaaaggagaaaggagaaagggaaaggagaaagggggcgggaaaggggacatggacaggggacacgggggacatggacatgggggacgggacatcggggacgggacatgggggacagagtacataggggacatggacaggggacatgggggacaggggacacgggggacgggacaggggacatggggggacatgggtcagatggtgatggtggatggttggtgaggggatatgacagtggaccagcgctgttggctgcaaccctggcccaagccagcctgaggacggcctggatgagcgggactccagctgtcctttactggcccccagggaccctccccatcctgagtggacatggccagagccaccatgggcagaggcagggctgggtccaacctcgtgctgcccgggaggaccaggctggcctcctccctcctccctcagccgtccgcagctgctgggtccaggtggtgccatcccctcttttttcaggaaagctcatctgaggggagtccagctcaagccctcatctccgcctgtggcctcacgcacaccacacacagccacagaaaagtagcccgggcatccccctgggagcctaagcacctggacacgccaccttctatggcaaaacacaccgtgcacgggtggttaggacgctgctgtggcagacgatcacaggggagggaggcagagatatgaggacaggagggaaggggacgtggccgtggaaactgaggccagagggggccccagagcccaggagcaccagggagaggccagaggacccgtcctgagcccagaaccagctctgcccactccgagtctcgggcccgtgggatcgtcctggagctctgccagagctgtgggagaacaaacacgtgtggcttcacgtcactgagctgcggtcagtgacccacgtgtggccactcagaggggcgttcccatcccccccaggccccgctcccacttctgctccctgtccgtggttcctatcgttgcccgtcctttctcctgctctggaactctgtgtcctgcggactcagatgcagcttcttctatggccctggctgtcccgccccaacagcatgtggcttgcagcatccgtgtcctgggctccgtctgccaggccttgggtcgcgtgcaggtcccgccgttggcagcagctgcgtggccagggtcgagcaggtcctcagtgggtgcagactctcctgggatcacggggccgtctgccaagcatccccagtgggc

SEQ ID NO: 12289 - DNA, 1210 bp, Artificial sequence
  DNA replication origin
ggtccggggttcccgctggcgcctgctgtcgggaggaccggggttcccgctggcgcctgctgtcgggaggaccggggttcccgctggcgtctggaccccgagaacaccggagcagctgcgcgcgtgcagaggggcagtggcctcccagaccccgcggcctgcgcgcttccggagcactgctgtcacctgctgggcgcggcgggcatggcaggggcgcgtccccaccctgtggcctagggagcccggtcgctggaaggggcccccgctgtgtcctgggcaggggtctgtggaaccgacacactggacccagccagctccacccccgtgggcgaggtggcccaaacttgtcgtctgcattggtgacacggacacgcacgccttggaggctccccggggtgcacacaaggccgtgagcggcagaggccgggaagcgccgctgggcccgctgctgcgatgcctccccgggcacttctcggcgtccaccctcagccacgaagcgccgcgtccaaagaggtcctgatgtcggaggcagagccgtggggacacccagctgtgcctgggcaggggctcactgagtcaacaggcgttctgagcaggccttacttgggtctgagggacactggtggcctcgctctcacagtgagaagcaggagaagggggttcttccatgggaagggggctcctggctgctgctgtgcgcacggggctggggcagcagccttgtagaggcttggggagcggggagctccgggcagtgaggggagcaggccccgtctggcaccatccaagacagcccagggccccctccccgagggcaccagctgtcccctccccaacgccaggcgttttatggcttgcatctcagcagagaaaatagcccctggtctctggtgtcgggatggggctgtctgagctggggaggggatgctggggagcagggggctttggtggtcagggctgatgggcggtgtctgcaatctgagcctctgtctggcctgttggctgctgcagggggctgtttagccccgcctggagcccacagccccctcgcgtccctgtggcgtaggtcagcagcccctgccctcagatgaccggggctcccaggccacatggccagcaggatgggatgctgtccccaagcaagtgctctctgaagtcactgaggggtcacggacaggcccacggatgctcagcagacggccccacgacc

SEQ ID NO: 12290 - DNA, 782 bp, Artificial sequence
  DNA replication origin
cagtttccacagcgccttcctgcccagagtgacgtgtggatgcccccatccccgccaggctgcccaggctgcaggaggggccaccctcagggccaagtcagccccagggtacccccctccccaagccccaaaccctgaggcccccacacaggggccccagcgcccaagaacagcgaaccctgactcctgtaagacaaacatgccaggaaaggggcggggatcacacggagggccaggaagggggcgggggtcccacggagggccaggaagggggcgggggtcccacggagggccaggaagggggcgggggtcccacggagggccaggaagggggcgggggtcccacggagggccaggaagggggcgggggtcccacggagggccaggaagggggcgggggtcccacggagggccaggaagggggcgggggtcccacggagggccaggaagggggcgggggtcccacggagggccaggaagggggcgggggacccacggagggccaggagccgacacccacccagagaggggcaatggggcagccctaccacctctggccaggccccaaacacccgtccccccgaggggcagccccacagctctggcctggccccaaacacccgtcccctcatgggccacgtaaagcctcgcgctgcctgcgaggaacggctggtgatgttcccagtagcgccctcgtgccgcacaccatcgtccccactatatggacggggaaaccgaggccccagacctcgtgcacagccccagccccctcctgggctccg

SEQ ID NO: 12291 - DNA, 806 bp, Artificial sequence
  DNA replication origin
agtagcgccctcgtgccgcacaccatcgtccccactatatggacggggaaaccgaggccccagacctcgtgcacagccccagccccctcctgggctccgtctgccctgtgacatttacggcaacggtcggcccatccctgcctggtaccaccaggaggggccgtcctgaaccacaggggaaccacagaagctccgacaggagcacggggtccggagcctagagcaggaagccccgcgtctcagcgagaccagggcctggccctcaggacaacatgaggcattgtccaggcccctgtgaaagccgccattgaggctgcggcccgaggcggggccagcccgcggtgggagcagctgtcaccagggtcacccccaggggcaggcggggggcaagtctggctcagacacaaggataaacccccacatctgggggaggggtgcggcgcgtccccacgcagtgaccttggcccagggaggcggcgcagagggtgggggagccctgctggctcagcgggctgaggttcacctggggccacagcgacgcaccttccgctacgcaccgacaccaagggcttctcccccggtcctttgtcgtcaaagagcatcttggggagacacagcggccacagaggggcttccctgccacaggttactgcaacgtgcacctcgagaggtgtttccgcttccctcactcctcttgcatttattttattttgatacggaatctcgctgttgcccaggctggagtgcaatggcgcgatctcggctccctgcaacctccgcttcccaggttcaagctattctcctgt

SEQ ID NO: 12292 - DNA, 935 bp, Artificial sequence
  DNA replication origin
tgccagctctaccggggaggtgcacaggaggggtgcgcagtgccagctctaccggggaggtgcacgggaggggggcgcagtgccagctctaccggggaggtgcacgggaggggggcgcagtgccagctctaccggggaggtgcacgggaggggggcgcagtgccagctctaccggggagttgcacgggaggggggcgcagtgccagctctaccggggaggtgcacgggagggggggcgcagtgccagctctaccggggaggtgcacgggaggggggcgcagtgccagctctaccggggagttgcacgggaggggggcgcagtgccagctctaccggggaggtgcacgggagggggggcgcagtgccagctctaccggggaggtgcacgggaggggggcgcagtgccagctctaccagggagggctgggaggggttggagcactgggggtcaggggcttctccactgaacccacctacaacaccaggactgtgttcagccatttcagggccgcctctctttcacatattttgagacagacttttgctctgccgcccaggctggagtgcagaggcgcaatctcggctcattgcaacctccgccttccaggttcaagcgattctcctgcatcagcctgccgaggagctgggattacaggcacctgccaccacacctggctaatttttgtattttttactagaaacagttttgccacgttgaccagattggtctcgaactcgtggtctcaagtgatccatccgcccgcctaggcctcccaaggtgcttcttttattcttggggtgagattcacaaatacgattcatcttttttcttgttacagacacactctcgctctgacgtccaggctggagtgtagtggtgcaaccttggctcactgcagcctccgcctcccaggctcaagagatcctcccgcctc

SEQ ID NO: 12293 - DNA, 942 bp, Artificial sequence
  DNA replication origin
cgtgggcccagcaggaagccacagggttcctatttgttctttgccgcgtaattccctgggagtggaaaaggctggggcggctgcctgtgcacctgggccgtgccgggcctgtgtgtgggtcgtggtttctgcaatggtattggcttcactcgagtgagtcacggtggatggggaggccgtggtgggtggctctgggcagggatgtctgggctcagtgggtgccgtggggggccctcgtcccgggctttactctcgggggcttctcctcatcccgggtcttcctggattcttgggtatttgccggtagtttctcctgatgccccggacgcctcctgacctcgacgggtgccctgatagctccgtcctgtgtctcagaaccacgtggagggcggcacggcgggtggagggcggcacggggggtgcaaggtggcagcacggtgggtggagggcggcgccgcggccacttcccagatccggtccaacgaggtggggagggtcggggagggcccaggggcgtgtgactcggggtgggggggcctggctcaacccctgtaccccagccctgtggggcatcagctgaggccaaggtgggaaggagaggggaggcaccagcccgtccaccgggaacgcttgtgcagaacgtgaggcctgatgctccgggggccgaacgcacaagaaaccaataaactaatatcagagtgagaagcgtcccgggcaggaggctgaccctgcatttcttccgggatcttgtgcccagaggggcggctcgagtctgccgggggtccctatgagcctcttgagatgtccagggtccgggccagagagcggcgtgtgctgggtcggaggccgccttggcccagtggctcagtctctcctctccccacaggctccttcgagagcagtggatccgggccaagtacgagcgacaggagttcatctacc

SEQ ID NO: 12294 - DNA, 1019 bp, Artificial sequence
  DNA replication origin
gtaggaggcccaggtgggaggattggcctcaggagttccagaccagcctgggcaacagagtgagctcccacctctacaaaaaataaaaaattaccaagtcgtggtggtgcacacctctagcccagctactcgggaagccgaggcaggaggatccttgagtgcaggtgttggaggctgcgttgagctgtgatcgcaccactgtgccccagcctgggagacacagtgagaccctgtctctaaaagaaagaaaagtaggatctttgcagatgtcttcaggttaagataaggttgtgaggttgtcctggagtagggtgggcccaaaccccacagggaaggccaggtgaggacggcgccgaggtgggggcactggcggcttccaggggtgggagggaccctggaggagattctccccagaacacctggagggaccagctcggccgacgccttgatctcagacgtttggcctccgtgaccgagatgatacatttctgttgctttcggggaccgaattttggggtgatcgttgtagcaggtgggggacacacacacacctggggccaggggccagagacccagctgggacccatcacccatcagatcctgtgggcgaggattcccgcccagtctccaaggctgttcacgtgggcccagcaggaagccacagggttcctatttgttctttgccgcgtaattccctgggagtggaaaaggctggggcggctgcctgtgcacctgggccgtgccgggcctgtgtgtgggtcgtggtttctgcaatggtattggcttcactcgagtgagtcacggtggatggggaggccgtggtgggtggctctgggcagggatgtctgggctcagtgggtgccgtggggggccctcgtcccgggctttactctcgggggcttctcctcatcccgggtcttcctggattcttgggtatttgccggtagtttctcctgatgccccggacgcctcctgacctcgacgggtgccctgatagctccgtcctgtgtctcagaacc

SEQ ID NO: 12295 - DNA, 1277 bp, Artificial sequence
  DNA replication origin
tgcatgcacctctcccttcccacccgggcaggcctggcgccctggccccccgtactctcattctgaggccccaggtgccagctgctgtctccccctgagccctcacaggggaaccctgccctggccgtgccccgggctctcggtatgaatcatggagccccagcacagctatttttaagacattattttatcaccccgcccccagctgctctgtggcctgggtcactgtctccaagttcctcccactccctggctgttctgagtcgggaccgggggctgacatgggtgcggggggctgggggtgctcgtggactcaggggctgctgctgttgggtcctgggtgaggagactcccagggctgacacccactatctggggtggggtgtgaatccctgtatgagccgtggatgctggggcatggcaggggtgcagtgtggacctgcagtataacttggagggcggggggtgcagcgtggacctggagggcagggggtgcagtgtggacctgctgtgtaatctggagggcggggggtgcagcgtggacctgctgtgtaacctggagggtggggggtgcagcgtggacctgcagtgtaacccggagggcggggggtgcagcgtggacctgcagtgtaacccggagggcggggggtgcagcgtggacctgcagtgtaacccggagggtggggggtgcagcgtggacctcgagggtgggggaggggtgcagcgtggacccgctgtgtaacctggagggcagggggtgcagtgtggacctggagggcggggagggggtgcagcatggacctgctgtgtaacctggagggcggggggtgcagcgtgaactgctgtgtaacctggagggcggggggtgcagcgtggacctgcagtgtaacccggagggcggggggtgcagcgtggacctgcagtgtaacccggagggcggggggtgcagcgtggacctgcagtgtaacccggagggcggggggtgcagcgtggacctgcagtgtaacctggagggcggggggtgcctacatcctgccattttgtggtccggctctgtggctcgtggggcccaaacgtccagcctggcgaggtgggcaggggactcgtccaccttcctcccacgtctgcccccaccaagattctcccagccccagcagcgctggtgcccacggcctccgtgcagcctggacaagcccgggtctgagttgaaggtcttcaggggaaagctctgctgcacagatgtccgggtggcgtcttcgcaggagctaagagtggcg

SEQ ID NO: 12296 - DNA, 1356 bp, Artificial sequence
  DNA replication origin
agacaagcccccaggcctgcctgagattcatctttggtttttatcgcaccagtgaacgtgcagacaacagaatggggatggaatctccttgtggcccccagctcagtgctctcccaaaggccccatcgcaccagacctctgcggcaggaatcaggggtttcttggtaatacccacggtgggccctccccagccttcctctccagccttcctctccggccatcaccccaggcagatcaggacagcaccaagttggcccctgtcctctcccgctgattacatttagggtttttccaacaacagtgaacgccccacccctgggcccttgccccgtttgccctggaattatggggacaatagccacgtcttctccccgagccaaggagtctgtgcccctggaggccctccagggactcagggctgtttcctccaggagtgatggcagagcaacttggagacgggacacccgtcccatcatctttctgacattggtcccctgttgtccggggagggggatggtccaggggccaccctgcccattttttagggaaggaaacggaggctcagacaagcccacagcctggcgaagggatggatgtcacatcccagtgtccccccctgggtcagtgaaggtgggtcgaagggcgaagggacggatatcacatcccagtgtcccccacccaggtcagtgaaggtgggtcgaaggcggtgagcccaaggtgggccggggtcctgaggggattcgcagggacgccctcaactcagggtgtgggggatcacggcattaagtgcagaagctgatttggggtcgccctgggtgggtcagggactctgctgtccttgggtctttttctgtctcccaggctggagcacaaaggtgcaatcacaactcactgcagcctcgaattccttggctcagccaggcatggtggctcacgcctgtcatcccagcacttcgggaggctgaggtgggtggatcacctgcggtcaggagttcaagaccagccttgccaacatggtgaaacccttctctactaaaaatacgaaaattagccgggcgtggtggcgtgcacctgcaatcccagccactcgggaggctgaggcaggagaattgcttgagcccgggaggtggagcttgcagtgagccgagatcatgctactgcactccagcctgggcgacgaagccagactccgtctcaaaaaaaaaaaagaattcctgggctcaaacaatcctcctgcctcagcctcctgagtggctgggattacaggcaccacccccacacctggtcgaggcactgggatcccagctgtgatttctaacaagcctccaggtgtgacccatgcaccaaggctgcctg

SEQ ID NO: 12297 - DNA, 1801 bp, Artificial sequence
  DNA replication origin
ccttgccaacatggtgaaacccttctctactaaaaatacgaaaattagccgggcgtggtggcgtgcacctgcaatcccagccactcgggaggctgaggcaggagaattgcttgagcccgggaggtggagcttgcagtgagccgagatcatgctactgcactccagcctgggcgacgaagccagactccgtctcaaaaaaaaaaaagaattcctgggctcaaacaatcctcctgcctcagcctcctgagtggctgggattacaggcaccacccccacacctggtcgaggcactgggatcccagctgtgatttctaacaagcctccaggtgtgacccatgcaccaaggctgcctgttagaagcaaatgagctactcccaaccaggggcaggggtcagtggtgctggagagccgggggccggggtcagtggtgctggagagccgggggccgggggccggggtcagtggtgctggagagccgggggccggggtcagtggtggtgcagagccggggaccggggtcagtggtgctggagagccggggaccggggtcagtggtgctggagagccgggggccggggtcagtggtgctggagagccgggggccggggtcagtggtgctggagagccgggggccggggtcagtggtggtgcagagccggggaccggggtcagtggtgctggagagccggggaccggggtcagtggtgctggagagccgggggccggggtcagtggtggtgcagagccggggaccggggtcagtggtggtgcagagccggggaccggggtcagtggtgctggagagccggggaccggggtcagtggtgctggagagccgggggccggggtcagtggtggtgcagagccggggaccggggtcagtggtgctggagagccgggggccggggtcagtggtgctggagagccgggggccggggtcagtggtggtgcagagccggggaccggggtcagtggtgctggagagccggggactggggtcagtggtgctggagagccgggagccggggtcagtggtgctggagagccgggggccggggtcagtggtggtgcagagccggggaccggggtcagtggtgctggagagccgggggccggggtcagtggtgctggagagccgggggccggggtcagtggtggtgcagagccggggaccggggtcagtggtgctggagagccggggactggggtcagtggtgctggagagccgggagccggggtcagtggtgctggagaaccaggggctgggatcagtggtcctggagagggggtgccagagtcagtggtgttggagagggggggcccagggtcaatggtgctggagaggggagagacatgtacaggaggccaccagcctctacgaccctccccatccccacagcagcccccagaccaccactctcacctccatgcggcccttcggtcccactcacagcagtcaggaagatcaatggcttccagaccccaagtcccacgagtggggctggggtgaccctcccaccgggtcttcaggccccacgctccatccgacctgcagcccccagccggggtcttgttccttctccacctccctcggggtctccctacggggcccttcctgccgcctccagcatgcgtggcccctccctgcacgccagggcttcctggttggctcacacccgtctccctccccataggggcgtctctagggccccacgaagcatctgtggctggtgtccctgcctggccatgccaagtgctccgtgaagcctcatcagatgcatgggtgagaggtgggcagtgg

SEQ ID NO: 12298 - DNA, 1399 bp, Artificial sequence
  DNA replication origin
ggcctcctcccaggcgtccaggcggacggacttcaccttgctgacctgggggatattccggtggattcccgagcagctcaggcagatgaagacgcccagagtgtaggaggcccagtcgggatctgcaagggaaagccggacgttcacggaggctcagcccagggaccccggagggagggtggacggagcctcgagtcaggagcccccggccatgcagtggggggggcttcagcggagacccccgggtacaccaggctccgtgcgccccacaggcacctaaccccagctccccccccgccctctgcccggtgcagacggggctctccccagacaccccacggcatctgaggaagccgatctgcatgcacctgctctgccccgcgggtgccgggaacctccagcagaggccggccccacaggagcccatgccccgggctggagggcacccggcactcgtgaggatgggtccacctgctttcctcgtgtccgctgccctgggagaagtctgtgggcccgaatcctcctgggtgatggggccaagattgggaaattcagataggatctgagtgcagggggtgcctcacacccaacgcgctgcacacccccgaaggacggatggtagccgcggatgacgacgcaccctgcgtggggtgacagcgcccggcggccactaactttgcaggtgtgacagcggcgctgtggcttcaccctgcatgtggcctgtctagggattccacgtctcgatgtctggtttgccttaaaaggtccaacaaagctggacacagtggctcaggcccgtaatcccagcgctttgggaggctgagggagcagaattttttttgagacatagtctgttgcccaggctggagtatgatggcacgatctcggctcgctgcaacctctgcctcccgggttcaagcgattctcctgccttagcctcccgagtagcgaggcacgcaccaccatgcccggctaacttttgtatttttagtggagatggggtttcatcatgttggccaggctggcctcgaactcttgacctcaagtaatccacctgctcggcctcccaaagtgctgggatgacaggcgtgagccactgcccagggtgtgggtgccacagcgcagtctttctgctgctgcacgtgtgaaatgtctcattctgaaacggcaaaatgtggggagcgtccagccccgccctggggcgatggctaagagggctgctgtgtgactctcctgttttcttctggctcccaacgacccttcacaataagtcaagggagtggaatggctgaaaggcaccctagagagaacagtctctctgggggagatgagtcatctctgaactgcttttatttttaagtggaggctctcctgggtgaggctggtggaaatcgaggcg

SEQ ID NO: 12299 - DNA, 1121 bp, Artificial sequence
  DNA replication origin
gtcacgcccgacctctgggatttgggggtcacgcccggcctctgggatttgggggtcacgcccgacctctgggatttgggggtcacgcccgacctctgggatttgggggtcacgcccggcctctgggatttgggggtcacgcccgacctctgggatttgggggtcatgcctggcctctgggatttgggggtcatgcctggcctctgggatttgggggtcacgctgcacatctgggatttgggggtcacgccgggcctctgggatttgggggtcacgcccgacctctgggatttgggggtcacgcccggcctctgggatttgggggtcacgcccgacctttgggatttgggggtcatgcccggcctctgggatttggaggtcatgcccggcctctgggatttggaggtcatgcccgacctctgggatttgggggtcacgcccggcctctgggatttgggggtcacgcccgacctctgggatttgggggtcacgcccggcctctgggatttgggggtcacgcccgacctctgggatttgggggtcatgcccggcctctgggatttgggggtcatgcccggcctctgggatttgggggtcatgcccgacctctgggatttgggggtcatgcccggcctctgggatttgggggtcacgctgcacatctgggatttgggggtcatgcccggcctctgggatttgggggttttctgtcacagctgttaggctccctgattaatgaagcctgtctccccattaacgtgggcttcttgaggaccccagacccagcacccccggatctggcacagagctcagtccggagcaggtctccacgggagtcatgaatgaaggggccactaacagccctacttcagcagagcccctgtcttcgagagagaccacaggctttctcctcacccctcagtcagtcaaacatttgcccaagtgaccctgtctcgggtaccaggagttttgcctgtgctgagtagggcggcttttgggagaaagaatgcggttacaggatcagccgttgtttggttttgcggggttttttttgtcttgtattgtattgttttgttttgagacagggtcttgccctgttgcccaaggtggagtgcagtggt

SEQ ID NO: 12300 - DNA, 1403 bp, Artificial sequence
  DNA replication origin
aacctggtaggcagaggttgcagagagccgagatcatgccactgcactccagcctgggcgacagagtgatattctgtctcaagggaaaaaaaaggacatagaatcttggatgccccgtaaacgcgttttcaggaaggagtactgggcacctatgggctgggaggtgggtcagggaggagcaaactgaccccaagtcactgtccaggtggtggtggtgacagcttagcaggtgaatgagaggccagagggggtcgtggcacctggagatgcatttggagaagttctgctaagaccggggcagagacctgcagtgggagctcggcctggcatgcaggggaaggctttggaagtgactgttttcctcatggaggacgaggccaggccatgggccggcggggagggaagccgaaactcgggccaccatggagcgcttctgcagggcgtgttccattcagaagctcaggcctcggtgggtacagaggtgggctccgtactgaatgatggagggaggggtgaggggcagagggcattgcactgatggacctgggatcccacccgggcaagggggcagggcagacatggggtgaggagggagggacagacatggctgggtcaggtcctgcagattcaggatgggggctggggctcgggggttgtgagcgggaaaggcccagctggaatagagtgggttcagggcaggccgtggggtggccaaggtgtggggtgaggagcaggtccctggcagtgctgggtcctcagtggaggagggagacggcccctccggaagagggagtggggtaaaggggctggtggtgtcgggggtgggggcagccgtgcacctcgcaggtcaaaggagaagtgaggaggccagtgtgcccagagccagggcggggagacggggtcagaggtggctgtggggccacgcagggctgggggacgctgtgagggctgcgctgtgactctgggtgggatgggaaccatgggaattctgtgagccgaggagtgtcccagcccacgacgcgtcacagggtccagggcaggtagggccagcgcgggagcgggaggtgggtgggacgctgctgcagtgaccgaggccgggtggcggtggctaggcctagggcggggcgtgagtgtggggagggtcaaagcctggatcgtcttgaaatatttgctggtcaacgggatgtcggggtgtggtgggcagagtagaaatgaggacacccaggcctttagccagcacctcactcgctgagatggggacgtgggagcagtgtccagggagacgggagggacctgcgatgtgaggctctgtgagaagccacggtggccgccaaggggacagcagccacacgggcagctctggaggaaagaggcccgagctagagacaggggttgccagtgtg

SEQ ID NO: 12301 - DNA, 2020 bp, Artificial sequence
  DNA replication origin
ggcctgagactcaaagaggacaatatgtgtgtttttcttttttttgagacagggtctcactctggcctaggctggagtgtgatcacgactcactgcagcttccaactcctggcctcaagcgatcctccggcctcggcctcccaaagcactgggatgacaggcgtgagccaccgcgcccggtccctgtcctctgttgcgatttggcaggcagctccaaggatgtacggaggcacccctccctcccccaaaccccctcccaggatggagacccccacccaggtcttgcaggacagtgggtccaggcacgccccaactcgcccacctgccaggcctgtgatgagaggctctctgggtggccgccgggcgaggccccctgttcaaggtcaggggaacccactattgggacaggtcatggggagagtttggaaggagcttctgtgggggccgcagagaccccaagactgcttccctcacacggccagtgggtggggcctgctcaagtccaccccagcagccccaggcctggcgttcagaggtggtctgggactgtctgatgtcctgctgtccaggtctgcaccagccgtgagccagtgcacaggacagtgttctgaggacagcagaacgtgccggccaccccagcccccatcaacactggagtggctccttgtcacccagctgggccacagcaggtacaggaggccccagagcagctggcatcagcaaagaagcatagagccctcgaggatgtgccatggggtcatggggggctaggcagccccctgcctcctgacaccgcctgttccaccctgtggccacagccctggggagcggggacaagcagagcggccgggtgtggctcatgtcccctaagacagctccctttgcaaggcatcagtctccctggctgtgaaatgagagtgacccctcacagcatcccccctccatggcgctacccgacagaggagacaagtcactgaggtcatggacagattctgaaaaggcagaggtgcggccctctacccggcagcgtggggcatagggacggcagagaacagctctggggtgggccaggctggaagcttagcaggtgggccgggcacacctgcacccactgggaggggaggaccactgaaggacccagcaggccaaggaagtcccctcttcctcctgccaggctgggaggcccagagggtggctggagaggggccctgagtccagagaagctgctcccaggctgtgtggccagggagcagaggttcagaggcaagcccagctcccctccccgtgggccacagcaaccccaggccaggccctttcccactggctttcctggggagcgttcctgaacaggaggaaataaaggtctgtggggagagagtctggggtgagccagcccagggggccacccccaccgcaccattgcacgggccctgtggccgtcctgtctcaggagaccatggaaaggccgtgggtcctgcctgtctttccagaaaagcctgtcgctatctcccctctgggacaccccagctcctgatgtggcctttccagccaagctgcagctggacagcagccaccacgacctggggctggcagagacccctccatcccagagggaatcagggacacccctttttccggggtgtccagaggctgcatattgaaccagggccttggaggcaaatgcaaggtcttcccccgctccctccctgggggcctcagtcaccgccggtgagtttaggtttgttccgaggggcttagactattggcccccagattcctggtgtgcctggggtggcgggactgctccggcggggccctctctccacagcgcagccggcctggggctgacagctcccgagcagggcagggctggtctgggcactgggccccgttcacagccaatgacaggaccagtggcctggaagggagggactccgcgcctttggactccagtgccttgaaatcccacagacctgggaaccgagtcagggatgcccggccgggagaacgaacgggcggg

SEQ ID NO: 12302 - DNA, 1935 bp, Artificial sequence
  DNA replication origin
cgctccttggccatggccgcgatgcgcccgcgatgccgatgccggggccggggccgggagcgtcagcccggctcgctagggccccgcgcaggccgcccgccgccgccgcccctgcgccatcccgggcggcctcagcccgcgcgccggttccgcattcccgccgccctctgggctccgccgccgccgctcgtgtctccgccgcggtcgctgagcgagtgccggcgcggggcccggggcgcacgctgcgctctggccggcaaggcccgcgggcggcccccagcggtgcaggcgagcgtgtggcctcctccctcggccgctccggcgcccccagcccgcgcgccccggggacccgctgggaaatcgcccgccgcccgccccccatccgcgcgcagcgtcccacctgcctgggcgcgaggccgccccaaaacctggccggcctgggtgggaccctcgtgccgccgcgcgcggtgggacggagcctgcacacctactgtggggggcgcagagggcacctgccgagccccccaagaccatgggcatgggggtgctcgtggaaggcaggtgtgcgtgtcctgtgctacggaccaggaccagggcgctcacaccatccctgcctgggagggacggccagcaggtgacaaacgccagcgtcccagggcactgaggccacacagggcccagacggagcctccccctgagacccacccagccgcccaccacccacagatgggaccctctgggcacccctcccactcaggcaggctgaggggccccgccgggacttcacatgggggctgacaggtaacaaaaaacctggttttgatgtcacctcttcccagactcgcgtgcccttcctctgcacaccccagcatcttttcaaattctttccattttcttcttgcagggttaatgcagtacacccggctgaaaacaaactggaacataccagactgaaaaaggaaagcctctccccactgccttccaggcaaccactgttaacaaattcctcagcaccttccagaacgaacgtctgaggcctgtagcctttcatttatttattcatttatcgagacagggttttggctaacggctgtaatcccagcactttgggagaccctggcgggtggatcacttgagctcaggagtttgagaccagcctgggcaacatggtgaaaccccgtctctactaaatacaaagaaattagccaggcgtggtggcgcatgcctgcaatcccagctacttgggaggctgaggcaggagaatcgcatgaacctggcaggcagaggttgcagcgagccgagattgcgccattgcactccagcctgggcaacaagagtgaaactccgtttcaaaaaaaaaaaaaaaaaaaaaaaaccaaacaaacaaactcaaaaaaagttcaactgaaccatgacttgttcacccagtcactggcataggggcatttagagcgttttgaatgcatcagaatcatggtctacacaacctcatctttgcaagagttttgtgtggatttgctctcaaagtggcatcgctggggcaatggtatgggatgtggaatggcctccactgaggctgcactgaccagagtgccaccaaaggcacctgtccccctgctccagctgacgtggaatcatggagctgcttaagctctgtctacctgaagcagaacgcggcagcccgttttggtctgtgtctctgggatctgtgccctgtggcatcacgtgctctttccctgtaaccgttcacatgggtctttctcctccctcagacgggaggctttggggtggggacaggtggcattttcatctctgggtccctgtgccaggctcggaatccaccacacagcatgagcttggagaatgtcgcctaataaagacagacgaacattaatagcagcagctcagcactaggtattaggagaaatagcctga

SEQ ID NO: 12303 - DNA, 1072 bp, Artificial sequence
  DNA replication origin
agcagggcccagcccggcctcagtccatttgccccttccctggggagagcccccttctgcctgtgctgagaggctcaccccgcagctgcaggcctgggaggagccagcttccaatcaaagtcgcctgctggcctaccacgcgcaggccccgtgctcaggcgacgctggaggagctcgccctgctctcgggagccccctgcccagggtctgctgtgtggccgagtggtcacaggaggcggctgcctctggctctggactagggagatgcttgaggaatgagtgtcagggtccctggtgcagccgtgcgggtcagtgacaaggggcaggaggctcagcagagcttgtaggccactgggcatgagcaggagcaggcacgccgcctgtccaggcccctcgccagccgctgctggccggaacagcctttgaccagcactggtctgggtctggcccaccctgagctatgctgttaccttccggattcttcctgagtcctgggctcccctactgccccgcccagccctgaccacagccagtcagggcagcaggatttcaggacggctgtgctctcgggtccaggcaggtacttgcggatctcggccgagcagcctcctctttggaagaatccccctcagccccgacatctcttagatctgaggggttcacccacctctgtctcatcctcacgccctcctgccccccgagcaatgccacagttcccttagcgggatggaaggacagagaaggcaagacactcgcctgctggagctgccccacggaggaggccccggaacagcaggcagtagatggccttggcttgtgccagaagctctggcctgttgggcaccggctcccctgaggcctccctgctgccttttctatgccttgtatgatggcctccccgtctttggggaccttgggtaacggctatgttagggtgtgttgctttgttatattgttttatgtatattccagtcctgaggtgtgtggcctccagcaagggatcgaacctccccgtgcctcagtcttcccagctgaaaatggggctttaataagaaaatacatgtcggccggt

SEQ ID NO: 12304 - DNA, 993 bp, Artificial sequence
  DNA replication origin
cacgcctgtggctctggggctagctgggctcagccgggtggttcacacgcaggtgtgacgaggctggagtcactgagctctgccctccaggggagggttccagcccctgggcgggcagggctgggcccagcacctctgttcctgggctctgtccgcgtggcctctgcagcgtggaggctgcaggggagcccagctgtgtatgtggaggcggggcaggggcgaggggcaaggcagaagccgcattctcctgtgaccccatgtcagaggttataggccactgtcctgaacgggccgggacggtcacggccccttgcccacattgatcctgcatgggccgggacggtcacggcccctcgcccacattgatcctgcacgggccgtgacggtcacggcccctcgcccacattgatccttcacgggccgggacggtcacagcccctcgcccacagtggtcctgcacgggccgggacggtcgcggcccacatcgcaggtgggagtgagaggagtgttacgtgttaaacacactgtggggaggaggggtcagggaggggagggaaccgctgggagaggataggtgtgtagatggtggatagagatgatggcggtgacggatgattctcagatggcagataaacagatgacagaggtagaggacagggagactgcttgatgatggataaacagagatgacaggtcatatagacacagatgacagatcgcacagatagatgatggacggatggacagagggggatggtgagggtggggggcacagtcagggccccttgggaaaggcaagccccgtctgagatggcctccgcctttcctgacgcgcgtccatgcctccctctctgtgaggctctggggcttctccagcctgattctgcagggtgctatctcgtgcctgcctctggcacagacaggcctgtggctcattcccgcaaaagcccccatgagatgggtgactcagcctcagtctccctgtctgctaaa

SEQ ID NO: 12305 - DNA, 1178 bp, Artificial sequence
  DNA replication origin
tggaccatccccatcttggtcccaaacaacccgatctgccatgtaagcaccatgttcacaggtcccaggggccaggatgcagacatcttcagggacatttttctgtccccacacctggttgtgaggcgtgtgggtggctcagtcttggcccggggcggcagcaggtccgtctggtcccctcgtggctctggacggctgtgcacctcgacaggtgtccccactcagaggggaggctgggggcttactcatccactctgaagagccagggggtgggggtcatccctgagggcagtggggttggtctgcggggccgcctgccagacagggccgggcagagcgtggtgctttggggcgggggatgggagcccacccctcttagcctgcaggggctgcgtgactttggaggaagcagaagcgctgtggtgggggtggcccctgctggacggcggcagcaccacagcacccttgagggccacctgcagaggcagagccaggtgcgtagctgtcggctgcggcggggacggtggcttgtgcagttaggcccgtgctccaggagccacaggctagggccagggtcgtgtgtcctgaagccccaggccttcctgactgggcagccccctcctaccacctgcccccgctgacacctgcctgccaccaccctcagccccccactcaccccccaccactcctgccagctcagttttcaggggatttggagacccagatgtggcccagatcagggcagcacagggcaggtgcctatgaagtgtggggttcagtgaggggctgcaggggctgagccagagcctgggcggggcaggggtctccccactggtgggggctgcaataggggctgggggaggatggtccaggtaggggccctttgggcagcagagccacagaccctccctggggtcccagctcttctcaaggcagacatgggaaggcaccagccctcatgggcgtccactggggtagggatcctgcttcaccgaggcctctctttgagaggagtggtctggacgtggggctggcggggctgggattctctgaggccaccagtgcagataccaatccctgtgtcacagaccaccccaaactcagggcctcacacagcatcttccggctcccacgcctgtggctctggggctagctgggctcagccgggtggttcacac

SEQ ID NO: 12306 - DNA, 1114 bp, Artificial sequence
  DNA replication origin
aggccagacacgatggcccacacctgtcatcccggcagtttgggaggccaaggtgggaggatcgcctgaggccaggagtttgagaccagccctggcaacgtagtgaaaccctgtctctacaaaaaaaaaaaaaaaattgtttttaacttaccctggtgtggtggcatgcacctgtagtcccagctactcaggaggctgaggcaggaggatcgcctgagcctgggaaatagaggctgcagtgcacaatgatggcaccactgcacttaagcctgggagacagagcaagaccctgtctcaaattacaaacagcccaacagggctgtgtcctctcggcaggctctggggggaaccgtttcccgcctcggcaggctctgggggggaaccgtttcccgcctcggcaggctcttggggggaaccgtttcccgcctcggcaggctctgggggggaaccgtttcccgcctcggcaggctctggggggaaccgtttcccgcctcagcgggctctggggggaaccgtttcctgccttctctggagtcgaggcacctcagtcagggctgggacttggtccaacctccagccagcagtgcagccccttccgatccctccgacccctgcccctgtgctcctgtctctccggctctgacctcctgcctccctctcaggacccttggaactgcaccgggtcctgctaatcctggaccatccccatcttggtcccaaacaacccgatctgccatgtaagcaccatgttcacaggtcccaggggccaggatgcagacatcttcagggacatttttctgtccccacacctggttgtgaggcgtgtgggtggctcagtcttggcccggggcggcagcaggtccgtctggtcccctcgtggctctggacggctgtgcacctcgacaggtgtccccactcagaggggaggctgggggcttactcatccactctgaagagccagggggtgggggtcatccctgagggcagtggggttggtctgcggggccgcctgccagacagggccgggcagagcgtggtgctttggggcgggggatgggagcccacccctcttagcctgcaggggctgcgtgactttggaggaagcagaagcgct

SEQ ID NO: 12307 - DNA, 1112 bp, Artificial sequence
  DNA replication origin
tcctgccagctcccacctgcagggtccatgccgcagcagtgacccagggctgggtggggcggaggggcgggccgccgtgcctcagtttccccgcctgcaccgcgctagatgccggcaccccatagggctccgcgctgggccgcgacccagaccccccatcgcagacccctgcccgccgaccttccgccgctcacctaagtgatccagcgggaagctgcccttgtccgggggccgcggctggaagctcttggtcccgaaattcatggcggtcgacatgttggcgactccggagtctgcgagcgccttgcgagcgtacgcagggcggccggcggagcgccgagcaggcaccccgggagcgccgagcacgtcgagcaggccccgtccccgccccttgcccaggcccggccccaccccttgcccaggcccggccccaccccctcggagtcagcaagctcctgagccccggtgggcgctgcccgggctttcccgtcccctgggaccctcacagcagtcggtagcagaatcagcttttggaattggtgagaaaccgaggcccagaaaggttcagcgaattgcccgaggacacatagcggtgccggcgtctctgcatcccaggtgtctgctggggcctcggtttccccatcgcacagagacctcatcacggggcccatccggggaggaaggcggcacaggagggacaggagagcctgtggactcgctgcctgcggctgctggagccaggtgacaccaccgagcagcttcaacaacaggaatgtgctctcagtcctggggtctggagtccaagcagtgggcagagtgggggccctggggacagtcccagcctcccagcttctgggggccgccagcctgtgaggttccttggcttgcagaagcaccacctggtctcggcccctacgttcccatggtgtcctgcgcatgtccaaatttactatttttatttatttatttgagacagggtattgctctgttgcccagactagagtgcagtggcatgatcacgactcactgcagcctcgacctcctgggctcagcgatcctctcaccccagcctcctgagtagctgcgaccacaggcacacaccaccacaccag

SEQ ID NO: 12308 - DNA, 1473 bp, Artificial sequence
  DNA replication origin
aataaaagctcccattgttcacagccctggaaacgtattaatgagtaacccagtgtgtgggcccctggttctaaccgggtaaaaagagttgtttatatgacaggaacaagctgcaattttccttttgtagttttcagtgggcccagagccacaggccaatcaaggccctgacaactagatttctgcagccctgggccctccttggggccttggcctgaggtccccactgccctgcggttcagaaacattcagtgccagactcgcggctcagctctgggcacacagagcagagtccgaccttgggcgcaggaatctaatggtgtgcgttgcagaggggcgggctcaccagggcccagcaagggggagagctggaagcctcatggggaggggacgcctgggccaggcttgaagaagggcaggccccggggtgggggctgttgggccgccttgaccaagcccttgtctgcaaacaacccctgggaagttgcaggaactggctcctaagcaacagtgggttcaggtgtcaccagggtccagagcggggggccaggcagcgaactcggtgttgctggggacccactgtgcttaccacgaaggcctggccagtgattgtgaaatgggtgggatggatgagtgagtggaggctggagcttgggccgcccatggtgctctaaacgggccagtgttcgacttcctcatggccagggcatgtgggtacaggttcagggctgggagagactccgcgggtggacgctggggtcttcactgagccctttcccacgactgctgttgccatgacaacatcgacacgcaaaggccgggccttaccgcttacagtacactttcattctgccctaggttgagctgtaactaccctccacccccattcgtatggtgaagccactaggaccttaggatgtgacctttgctttggaaataggtgccaggtgcggcggctcacgcctgtcatcccagccctttgggaggctgaagtgggcggatcacttaaggtcaggagttcgagaccagcctgggcaacatggtgaaaccccgtctctacgaaaagtacaaaaaattagccgggtgtggtggcgcatgcctgtaatcccagctactctggaggctgaggcaggagaatctcttgaactcgggaagtggaggttgcggtgagccgagatcgtaccactgcacgcccgtctaggttacaaagtgagactctgtgttgaaaaaaaatatattagcttagctgggtgtgttggtggcgcctgtaatcccagctactcgggaggctgaggcaggagaattgctttaacctgggaggtggaggttgcaatgagccaggatcgagccactgtactccagcctgggcaacaagagagagactccgttttaaaaaacaaaacaaagaaatagggttgctgctgatataattagttaagatgaagttattgggacggcccctaacccaacatg

SEQ ID NO: 12309 - DNA, 1445 bp, Artificial sequence
  DNA replication origin
acaggccaccacctgcatctccctgagggtgttctcgccccaggtagcagcctgctccttttcgagggctgccgcccgggcaggggatgcaaccctctgagctaggacaggaacatggaagggctgccgggtggcaggtggcggggtttacgagccctgtccatctgtctcctaaaccgctgtgaggggtgggagggctgctggcagcagaagcggccgggcctgctttgcacagcctgccctgacatgaggcagctggagctggtgccagcaggcgggaccctccccacagcctgtctctggggcgttgcccatgccctgtacgaaccgcagagccgaggcagcctgaggccctcacccctcccgggttggtcccccttgattagctgggagggaaagccccaggcacagttgcacgcctcctgtggtggggagctcactacctctatcctgctgtacagcctcagggccagggctgggcggctgcggcggggagggagtgcctcataccagggccactactgggtaggctgggggtcctacctgcctagcaaagcttacttaattaattcagggaatacttttgatttttgtgtgttttgtttttgagacagggtcttgctctgttgcccaggctggattaccgtgctgtgagtacaggctcactgcagcctccacctccggggctcaagccatcctcccacctcagcctcccaaatagctgggactacaggcatgcaccacccagcctagctaactttatttatttatttatgtagaaatggaggtcctgctacgttgctcaggctggtctcacactcctgggttcaagcaatcctcctgcctcgacctcccaaagtgttgggattgcaggtgtaagccactgcacctggcctaattttttaagttttgggtttttgttgtttttgagacggaatctcactctgttgccaggctggactacaatggcgtgatctcggctcactgcaacctccgcctcccgggttggagcgattctcctgcctcagcctcccgagtagctgggattacaggcacatgccaccacacctggctactttttgtatctttagtagagacggggtttcaccatgttggccaggacagtctcgatctcttgacctcatcatgatccgcccgcctcggcctcccaaagtgctgggaattttgtaagtttcttttagagacggagtctagaggctggtcttcaactcctcctgggctcaagcgatcctactgtggccgcctccaaaagcgctgggattactagcatgagccaatgccgggccggcctctttttcttttcttttctttttttttttttttgagatggagtctcactctcgtcatccaggctagagtgcagtggcatgatcttggctcactgcaacctccatcgcccgtgttcaagtgatcctcctgcctca

SEQ ID NO: 12310 - DNA, 1262 bp, Artificial sequence
  DNA replication origin
ggtgcgggggggacggggcccaggaggggagtggagcctcaccagccacgtcctcatggccctgctgctcttgctgttcctgggcctcctggggctctgggggctgctctgcgcctgcgcccaagacccctccccagctgcccggtggcccccggggcctcgcccgctgccgctcgtcgggaacctgcacttgctgcgtctgtcgcaacaggaccggtccctgatggaggtaagtcagggagcccgggcagctcttgccgcttggacagctgccgtgtcctggcccccctcctggggaagcccagcccggtttccactgcctgttcccacatggtgccgggcccagcggggcacgcaggaggccggagggcccaccctgcttttgggaggggaaagccaccccgtcccacagggaagcagacacactgagtacgaagaagccctggaggtgccacccagggcccggcgcgggagcaggagtctggagggctccctggaggcggtggcgtctgctgagagcccgcaggaggccaggcttagggacagcagaggggaggagggcctgggcctgtcggctgcctgctcagcccccctcggccctcaggtgttcaacagcaaacacttcccacttttgagcctctgtttcctcatctgtgaaatgggaagaggacctgtgcctcctgggcagggatgctgaggacagagggtacggggacacggcacggggcagcctgactagcactgtcgctctgtcctcgctcaggcaggcagggtcagtgggacagggctgaccagtcaggcccgggccctgcctccggctgcccccaactgcgggctggggtgctgctggccgggctgtagccgaagacggatcagggtctctgggggccgagcctgtcaggccctcactctgtgcagactctggcctttcagaatgtgccaccccagcagacagccagcccccgaccttgccgcctggactcagggcttgagccccccaggaattttggctaaaaagaaaatcccacaacagccatgccaagcaccagatggcgagagggctctgtgggctccaggctgggcgctgccccctccaccctgcaccactggctttatggcatctaggcgtgccccctccacctgcccccattttccctctgtccccacccctacccagcacaggcccggcctgaggggacctaaggggggtcttgtgggtgagggctgcccgggtgacccccgccatccctgccagctctcag

SEQ ID NO: 12311 - DNA, 1488 bp, Artificial sequence
  DNA replication origin
agggccctcccagagcagtccgagctgtggggtgggaggagagagggtgggaggacccagggctgggaggggagtggtcaggaggacctgggggctgggggagctcctagggcctgggcaccgcacacagggcctgggccctcggcctcatggtaaaagcccgggcgggcgtggtgtccagggaggccggactgacgccaggcgggggcagcaggcggtacctctgcaggaggccggcaaacagcaggaagagctcggtcctggccaggcgctccccaacacagacgcggcggcctgcgggggatgtccaggcacagagtgggctgcaccaggcctgctcctggaggggaggggtggggacctccccaggggagcacaggagcagccaccacagccgccttcagaacctgagatcaggaggtgggtgcagaggcggcaggcggagctggggccgtcccacccctggagccctggaggtgccgccccaccccggccccgagggctgctgacctgcagagaaaggcaggaaggcctcccgcttcacaaagtgcccattcgcgtccaggaaatggccggggttgaactggcctggggtctgccactgtgtctcatccaggagcaccgaggtcagcaggggaatcacgggcgtgccctgtgggggcagccggggcacagagagaggggccccggggaagatgggatggggcctgggttgggaagtttcattccaggatgtagctcctgccacacccaccacacctggtgttagcccaccttgcaggtgaggcacccaaacccagggaggccacatgaccccagggcacacagccaggggccccaaggatagagaggacacccaggatgcatggagagggacgccccaggacacacagaggggacccccaggacacacagaggggaccccccaggacacacagaggggacccccccaggacacacagaggggacccccaggacacacaggggacccccccaggacacacaggggatccccaggacacacagaggggacccctcaggacacacaggggatccccaggacacacagaggggacccccccaggatacagaggggacccccaggacacaccgaggggatcgcctaggacacatggacagggatgcccacaggacacacggaggggaccccaggacatgcagggaggcgccaggtctgctggccaggccaagtgctgggctgtggggtgagagggctgcctccctcctgctcctggctggacgccctttattgcctccggtcggggagcgctgggccatcaggcacccaccagacgctcagccgtcccagtgcccctggacccccgccgaggcctaccccagaggagatggaaggggcaagggaggcccagccccaccttggggagcaggaagccgcccagctgtgtgtcggccgcggtgcagcggggcacgtgcggcaggagcgtgatgaaccgctgcacctcgtgg

SEQ ID NO: 12312 - DNA, 1100 bp, Artificial sequence
  DNA replication origin
catgttgggcaggctggtctcgaactcctgacctcgtgattcgcctgcctcggcctcccaaagtgctgggattacaggcatgagccaccgcaccgggtcagtgtttccatttttgccactgcagtgctgcttgtcttcaggggctgaggtgccctccccccgccccaaggaagcctctggcgccagtgcctgtctctgaaggagaatgtgggccttgcctccctgcaccagtcatacgcatggccccagtggcttggctcagagtctggcactgcaggccgactgcctccaggcacagctgcaggaagtgttccaggagcgggaatggagtggggtctgcaggagtcccaggacctggggggtgcagggctcgcacgctgaggacacccacctgcgcctgtctctggctggatgcagccacccgttgtctccctgcagccccagctgtaggtgctggggggccctggggggagctaggtgggtgggagtgcagcttcaggggtgggagagtgggcggggccctggaggcgctcctgggggctggcagggactgagctgcagacagcatcagaggggtgggggtcccacagggtcgggcaggggtagtcctgggtgtaaccggaagcagttgctgaccctgtgggggtgggggtgagggtgggagtcctcagggccctcccagagcagtccgagctgtggggtgggaggagagagggtgggaggacccagggctgggaggggagtggtcaggaggacctgggggctgggggagctcctagggcctgggcaccgcacacagggcctgggccctcggcctcatggtaaaagcccgggcgggcgtggtgtccagggaggccggactgacgccaggcgggggcagcaggcggtacctctgcaggaggccggcaaacagcaggaagagctcggtcctggccaggcgctccccaacacagacgcggcggcctgcgggggatgtccaggcacagagtgggctgcaccaggcctgctcctggaggggaggggtggggacctccccaggggagcacaggagcagccaccacagccgccttcagaacctgagatcaggaggtgggtgcaga

SEQ ID NO: 12313 - DNA, 1689 bp, Artificial sequence
  DNA replication origin
ccaggtcctgggactcctgcagaccccactccattcccgctcctggaacacttcctgcagctgtgcctggaggcagtcggcctgcagtgccagactctgagccaagccactggggccatgcgtatgactggtgcagggaggcaaggcccacattctccttcagagacaggcactggcgccagaggcttccttggggcggggggagggcacctcagcccctgaagacaagcagcactgcagtggcaaaaatggaaacactgacccggtgcggtggctcatgcctgtaatcccagcactttgggaggccgaggcaggcgaatcacgaggtcaggagttcgagaccagcctgcccaacatggtgaaaccctgtctctactaaaaatacaaaaaaattaaccgagcatggtggcacgtgcctgtaatcccagctactcaggaggctgagacaggagaatcgcttgaactgggaggcagaggttgcagtgagccgagttcgcaccactgcactccagcctgggtgacagagcgagattccatctcaaacaaacagaaggaaatgtcgagccacacagtggcacatgtgctgggggcggtgtggtcggcagtgtgacagtggcacgtgtgctgggggcggtgtggtcggcagtgtgagtggcgcgtgtgctggtggcggtgtggtcggcagtgtgagtggcacctgtgctggtggtggcgtggtcggcagtgtgagtggcgcgtgtgctgggggcggtgtggtcggcagtgtgagtggcgcgtgtgctgggggcggtgtggtcggcagtgtgagtggcgcgtgtgctgggggcggtgtggtcggcagtgtgagtggcgcgtgtgctgggggcggtgtggtcggcagtgtgagtggcgcgtgtgctgggggcggtgtggtcggcagtgtgagtggcgcgtgtgctgggggcggtgtggtcggcagtgtgacagtggcgcgtgtgctgggggtggtgtggtcggcagtgtgacagtggcgcgtgtgctgggggcggtgtggtcggcagtgtgacagtggcgcgtgtgctgggggtggtgtggtcggcagtgtgacagtggcgcgtgtgctgggggcggtgtggtcggcagtgtgacagtggcgcgtgtgctgggggcggtgtgatgggacacctgctgtctgagacggccctggcccccgtcccagcgctgaccatgcacgtgagcggcaggcggcccctcaccgagaagagaggataagccgtggcacattcccacctgcgccacgtgaagcggcgccccaaggccaggacgtggtggccgggacacacgggtgcacggcaggcctcacactcccaggtggggccgcagggtccctaagtcatgggtggggctgctgctacggaggctgctgcaaggacgagaaggggacggagggatggaggctcggctgcgtccgctcacctatttctggggaagagcagggagcgagtgctggcttcactattctcccctcagacatttgaaatatgacactgaaaacttgaagggcagaaagaacggggtcctggcgccaggtggggccacgcgacgccccgcccagtgtgactggtgagcccctctggagctctggagggtgcggaacattccagggcaggggctgtggaaaatccctcccagctgttgtcagggctcccg

SEQ ID NO: 12314 - DNA, 1238 bp, Artificial sequence
  DNA replication origin
agtgtctggggcagggtctgtggccaggccgcccacaccctcgggccgcagtgggaggacggaagcctgaggcccgggtgtccttggctgcagcgtcttgtctcctgctgttcagcggcccctccctgccccgcccctgaccaactcgatctctttcccgtccaggttcccgatgagcacttctccaccctgctggcctacctggaggggctgcagggccgggcccgagagctgacggtgcagaaggcggaagccctgatgcgggagctggatgaggagggctctgatccccccctgccggggagggcccagcgcatccgacaggtgctgcagctgctctcctagtgggttcagcgcggggcggggccgctgcccagtgcagggctgcctcagaccacacagggtgcagctcctccggcggtgggggccgggttcaccagcagggcagcggctgagcaagggctttcagctcctccggtggtgggggccgggatcaccagcaccagagcctcgcaagggccccttccctcctccagaccctccttggccggtgacggctgtgacagtgatggcaggttcagtgccttcagcgcagagcgtggatgctctggaatcacccggacccctggccttggagggaccctccagccccaggaatctgctttggagggaaatgtctatttttctaccgggaatattttagagattggggcatgctggctcctcccgccagctgcaaacctgcaccttccgcctgattcccgatccccctgcgtgggccgcattcctggtcccctgcctgcgtccatcgaggggcctggctgtggcctgttttcctttgaccccacacagcgtcattgcgggtcatggggagcccctggtgggagcttgtggagtcggatcacgtacctgtgcagaaaccgcctctgtggctgcatttgaaataaaacccgacccagcagcagccgtgggtcctgctctgtgcggtgcgtcccctgcctgtggactgcggaattcgtgtcccccatgccagcgcacgccaggctgagaccccgcccttggtggccaccccaggatggcattgggggcgctctgtgtgtggcgttcctggcagtgggtgctggctgatcgcttgcgttcaggccggccgtttcccagcgctggcagtgactgaccctgccaggaaacacacttaggccgcacagaatcaagccacacacttcctgttcccagcagca

SEQ ID NO: 12315 - DNA, 3551 bp, Artificial sequence
  DNA replication origin
tgctgggcaaaagactcccgggcagctgtctgccctgagagatcggggacgcctcatcttaggagagggagccccaccaggtactacacaccaaggcctcatgtgaagagggtttttggagcccctcccctgcccgaggcgaggagccgcaaccccacgccctgctgccgcctgaccaggaagcatgtggacgccactcttaccttggccaccccggggctcaccactgaccccaagtccccgtgggctcccccaccccatgggtcacacggattttacagggggggaaggatgaagtgagtttctctgggaggaaagggagcgatgtaattgatgatgtattttctacatgaaaatgggaagactgtaaggaacaataccctgagtcccaggccctcacaacaaggggccagtgggcctggggacgagcagctcccggctgctagaggggccgctccccagggccacaaccaccccgcccccgtcccgctcctgcactagggcctgtggacatcaggcagctgcggatggagcgaagctggcgctgtgggtagggcagggccaggcagggtttactccagagacctcctcccagatacgtgtttccagggccaggcagggcagccgagcccagaagcctccatcagtgtgcaagcccaggtctgaagactgtaggctcagcacgggggagggccctgtgcctgttgtgagcgctgcccagcttgcctgaccccactgccatgtgggtgagtggagtcctgtgggtgtggagccctgtgggtggggagtcctgtgggtgagtggagtcctgtgggtggggagtcctgtgggtgagtggagtcctgtgggtggggattcctgtgggtgagtggagtcctgtgggtggggagtcctgtgggtgagtggagtcctgcgggtgagtggagtcctgtgggtgagtggaatcctgtgggtggggagtcctgtgggtgagtggagccctgtgggtggggagtcctgtgggtgagtggagtcctgcgggtggggggtcctgccggtggggagtcctgcgggtggggagtcctgtgggtgagtggagtcctgtgggtgagtggagtcctgcgggtggggagtcctgcgggtggggagtcctgtgggttagtggagtcctgtgggtggggagtcctgtgggtgagtggagtcctgcgggtgagtggagtcctgtgggtggggagtcctgtgggtagggagtcctgtgggtgtggagccctgtgggtggggagtcctgtgggtgagtggagtcctgtgggtggggagtcctgtgggtgagtggagtcctgtgggtggggagtcctgcgggtggggagtcctgcgggtggggagtcctgtgggtgagtggagtcctgtgggtgagtggagtcctgtgggtggggagtcctgtgggtgagtggagtcctgtgggtggggagtcctgtgggttagtggagtcctgcgggtggggagtcctgtgggtggggagtcctctgggtgagtggagtcctgtgggtgggaagtcctgtgggtgagtggagccctgtgggtgagtggagtcctgtgggtgagtggagtcctgcaggtggggagtcctgtgggtggggagtcctgtgggtgagtggagtcctgcgggtgagtggagtcctgcgggtgagtggagtcctgtgggtgagtggagccctgtgggtgagtggaatcctgtgggtggggagtcctgtgggtagggaatcctgtgggtgtggagccctgtgggtggggagtcctgtgggtgaatggagtcctgtgggtggggagtcctgtgggtgagtggagtcctgccggtggggagtcctgtgggtggggagtcctgtgggtgagtggagtcctgtgggtgagtggagtcctgtgggtggggagtcctgtgggtgagtggagtcctgtgggtggggagtcctgtgggtgagtggagccctgtgggtgagtggagtcctgcgggtgagtggagccctgcgggtgagtggagccctgtgggtgagtggagtcctgcgggtggggagtcctgtgggtggggagtcctgcgggtgagtggagtcctgcgggtgagtggagtcctgcgggtgagtggagccctgtgggtgagtggagccctgtgggtgagtggaatcctgtgggtggggagtcctgtgggtggggagtccttgggtgagtggagtcctgtgggtgagtggagtcctgtgggtggggagtcctgtgggtgagtggagtcctgcgggtggggagtcctgtgggtgagtggagtcctgtgggtggggagtccttgggtgagtggagtcctgtgggtttggagtcctgtgggtagggagtcctgtgggtgagtggagtcctgtgggtgagtggagtcctgtgggtgagtggagtcctgtgggtggggagtcctgtgggtgagtggagtcctgcgggtggggagtcctgtgggtgagtggagtcctgcgggtggggagtcctgtgggtgagtggagtcctgtgggtgagtggagtcctgtgggtggggagtcctgtgggtgagtggagtcctgtgggtggggagtcctgtgggtgagtggagtcctgcgggtggggagtcctgtgggtgagtggagtcctgtgggtgagtggagtcctgtgggtggggagtcctgtgggtgagtggagtcctgcgggtgagtggagtcctgcgggtgagtggagtcctgtgggtgagtggagtcctgtgggtgagtggagtcctgtgggtggggagtcctgtgggtggggagtcctgtgggtgagtggagtcctgtgggtgagtggagtcctgtgggtggggagtcctgtgggtgagtggagtcctgcgggtggggagtcctgcgggtgagtggagtcctgtgggtgagtggagtcctgtgggtggggagtcctgtgggtggggagtccttgggtgagtggagtcctgtgggtgagtggagtcctgtgggtggggagtcctgtgggtggggagtcctgtgggtgagtggagtcctgcgggtggggagtcctgtgggtgagtggagtcctgcgggtggggagtcctgtgggtgagtagagtcctgtgggtggggagtcctgtgggtgagtggagtcctgcgggtggggagtcctgtgggtgagtggagtcctgtgggtgagtggagtcctgtgggtggggagtccttgggtgagtggagtcctgtgggtttggagtcctgtgggtggggagtcctgtgggtgagtggagtcctgtgggtgagtggagtcctgtgggtttggagtcctgtgggtggggagtcctgtgggtgagtggagtcctgtgggtgagtggagtcctgtgggtggggagtcctgtgggtgagtggagtcctgtgggtgagtggagtcctgtgggtggggagtcctgtgggtgagtggagtcctgcgggtggggagtcctgcgggtgtggagcccagctgtgcagctgctaggtgacacgccagccccatgtgcagtgacgcagggctcctgcgtgatgagaggggcctccagggag

SEQ ID NO: 12316 - DNA, 1519 bp, Artificial sequence
  DNA replication origin
ggaagctaagacaccatgctgtgctgggcaacatggggacctgaggagggtgggcttgggctgccccacggcaggagtgacttgctctcgtcctcccgcaggtgagtgggggaccccgtcccggctggatccgtgtggcccgggtcccagttcctctctctcctgtgggggcaccacctcccgcctcgagcagacccaggcagggggccggcccccgaaaatggtgagctaaagcctgcagggaccagggaggcagcggtcacctcgccacctgcccccaacgtgaacacccagcaggcgtgttcttttcttttttcagttatatggaaagtaaatcttcaatttcctgcgttaagcatataaataaactcttttttctctttaatgaggaacaggcttgcccgctgacagccgtgtgcctcgctcgtgtaactaccacagtggacccagcaacccagagacccacagaaagtggagggactgcttccagcactcccaaacttccgcctatgcaaggccagagcaacacggctctgagctggaaaaacagagctgggtgaccaagcctggggcccctgctgggaaaacgaggggacagtcacagcacagggaaagagcacacgacggccacagtgcagggaaagagcacacgacggtcacagcacagggaaagagcgcacgacagccacagcgcagggaaagagcgcacgacggccatactgcagggaaagagcgcacgacggccacagcgcagggaaagagcacacgacggccacagcgcagggaaagagcacacgacggccacagcgcagggaaagagcgcacgacggccatactgcagggaaagagcacacgacggccacagcgcagggaaagagcgcacgacggccacagcgcagggaaagagcgcacgacggccacagcgcggggaaagagcgcacgacggccacagcgcggggaaagagcgcacgacggccacagcgcggggaaagagcgcacgacggtcatactgcagggaaagagcgcatgacggtcacagcgcagacaaagagcgcacgatggccacattgcagggaaagagcacacgacggccacagcgcagggaaagagcgcatgacggccacaatcccccatcccaccctctggaccctcctctccccagccctgctgcacagctcccaccagccccagcttcacacaaagccaggagcaccccaggaaggctgcagagaagatgaacccttgagatgcaagaacagcccagggtatggtcacaggtcacaggccaaggtcaccgtgtggggatgctgcccagcctgcgacccgggttctagggacggggcatgaagaccccacgggcgctgggtcgacgtgtcttgggggcagagccttcgggggatctggaggggagacccccagggcatcctggaatgggtggggtgcctcccagagagatgagaggaaactctccaccatgagggctcaccagaacaatccggggtctcctccacacacagcc

SEQ ID NO: 12317 - DNA, 1579 bp, Artificial sequence
  DNA replication origin
agcagcggggcctgcgtggatgtgcacgctgcgtgcacgtgcacgtgtacgtgtgtgcatgtgtgtacgtgtgtgcatgtgtatgtgtgtgtgtgtgcgtgtatgtgtgttcgcatgggtgtgtgtgcacgcatgtgtgttcgcatgagggggtgtgcgtgtgcatgtatgcgcatgtgtatacgtgtgttgtgtacgtgtgtgcatgtgtatacgagtgttgcgtacacgtgtgtgcgtgtgtttacgtgtgtgcgtgtgtatacacgttgtgtatatgtgcgtgtgtacatgtatacacgtgtgtacatgtgcgtgtgtgcgtgtgtgtttatgcacgtgtgtgtttatgtgtggacatgtgtgttgtgtgtgcatccccaggacggtcctccacctacaggagaggggctcttggctgccctgcaccaggctcagcgccgggctcaggaaatggggatgggggcaagcctcctgtttctcggagctgaggctgccttgggggtcatagaatgagctcagccatagcgttgggtggatccggctggaaccagttgagtcatcatgggtctctgcactggtcagttctctgggaggcttagcttccctctccctgaggaacgtggggctgaggccaggtgcccagggctaccccaagagctctttcttgctccaagaacgcgcttggcccaggggacccaaggtgctggctgtggtgtgaggctgctgcctcctgcgcttgctcctgcttctctgcaggcagggccacaagccaccgcagggtcagtcgctgtagacagagagggcttcagaggccgttagtgcagcgtctcgagcccaggtgtgggcaaggtgtgggctgggcagagcaggtggacacaggcctggaaggtgccagccgcaggaatggactgtaggctccctgtgggaggcagagggcgactggggcctgcagctgtgccacctgcaccttgcctgtctccactggcaggtgcctcggggcgtggctgttctggacctgccctgatgcctggggtgggcggggtttgtccgccttcctccccaggcctgccagcaccttccgctgctctcagtgtggactgttagacaagggggacgttggggacgtgggcaggagaggggggaccatccgctccaccacgtggctgccactccctggtcttcaccctggaggcgccctgactcccctcccatgatcacacaccctccgagcaccccacgggaaggtcctgagtgcctgggagcatgccctgctcctgtcctcagcctcaccctcctctccccctctgggaccttcccgtggccccctcatgctactcgcaaccccccagcggcaagtcctgtgcggaggcactgtgtcctgcgtgtgggaggaggggggactcttacttctcagaaacaaagcagccccttcccacaggagcttcttccaaggcctgggatccacacaccaggaggccagccacagacacgggcaccccggcaggagcttctcctctttcctgggggtctccaagggtgcccgcaagcccagccgcatctggctgccagatcagag

SEQ ID NO: 12318 - DNA, 1597 bp, Artificial sequence
  DNA replication origin
caggtcgggagcgctggtggccagaagcaagagtgggtgtgaaggaagctgtttccgcagcatccaggctggtgcctgacacaagaagcagccctgcaccgggcgctcaggaagcctgcgggaaacagctgggcctgcgggtccccggcttggccccgatatgggacggcctgggttcccctcgccatccaccccaggccagcgcccacgttgctgttgcccacagccttggccccgtcctcaccactctggccaccaacctgggaccctaccacagggccctgcccacctgctcagggcctgtccgggtgccccacgcatgtgggctgacagaccctcggccaccgcggcggcccctgtgcagccctaacagtgttatggactttggcccgtgtgatcagccgtggactgcgtggcccatggagtgggggccgaggctgggcctgtgccaggagggtttttacctttcagggccagttgttgtgcctgccccgttggcggctgtgggcggctgtgggcctaggaggtgagcatggagctggttggagccggtcagtcaccaggctcccctgggggtgtccacatccccaccatgaaaatcttgctccccagagccctgcgtgcctggcctggtgggtctcagagcttcctgcctgtgtgtgtgggcggcccaggccttcccaccgggactcttcagcctctctgtgccaggcatctgccagggacggtgctcctcgtcccccaggccctgtctcttgctgcggacccctggcaggctctaggggtgtggctgtgggtgtgttggcgtgtgtgtatggtgtttgtgggtgtctgtgggcgtgtgtgggtatctgtgggtgtctgggtgtgtgggcatctgtgggtgtctctgggtgtgtttgggtatctgggtgtttgtgggtgtctgggtgtgtatctgggtgtgggcgtgtgtggctgtgggtatgttgggatggtgtgtggatgtgtttgggtgtgtttgggtatctgggtgtttgtgggtgtctgcaggtgtctgggtgtgggtgtgtcagggtgtctgggcgtgtgaaggtgtgtctgggtgtgggtgtgtctgggtgtctgtgggcgtgtttgggtgtgtgggtgtttctgggtgtctgtgggtgtttgggtatctgtgggtgtctgggtgtctgtggatttgttggatgtgtgtgggtgtcggtgtgtgtggttgtatgtgggtgtgtggcatgtgggggtgtctgggcgtgtgggtgttggtctatgtgtgggtatctgggtgtgggtgtgttgggtatgggtgggtgggtatgtgggtgtctgtgggtgtgggtatgtgtccgtgtctgtgggtgtgggtgggtgagtgtgggtgtatggtgggtgtgggtgggtgtgggtcggtgtgggtacatgggtgagggttgggggctgtgtttggctgtaggggtgaagtctgtgaatgtgtgtgtctgtgtcgggggggtgggttgcatatatatctgtatgtaggggggcttgcctcactcttctttgctctccctggggtgggatgcgtaggcgtgggctgtgcccggcctcccttcct

SEQ ID NO: 12319 - DNA, 970 bp, Artificial sequence
  DNA replication origin
acccaggccgtcccatatcggggccaagccggggacccgcaggcccagctgtttcccgcaggcttcctgagcgcccggtgcagggctgcttcttgtgtcaggcaccagcctggatgctgcggaaacagcttccttcacacccactcttgcttctggccaccagcgctcccgacctggcaggagtcacagcccaattcccgtgtccccgagggagccactgtggccacgaggtgggaagctcaggagtgccacccactgccctgggctgtgcctgacactggccggtgcacctttaacttttccaaactcctgctttctgtgctgggcctcaacagaagacgcaggggcagctggagtgagggtgctgcgcccggagagccaggggccttgggggtgcccggctccactctgcgccatcggctgccccgtgctcgcgctcgctgccttgggggtgccggctccactccgtgccatcggccgccctatgctcgcgctcactgtcctggaccaggcaattccccaaggctgtgaccacgacgtgagcgacctcagctatcttgggatgacacaggcgggccccgggagggtgtgcagctggagggggcgggaggcagcaggtccaggcaggctggagggcacaggccgcggcaggtcgtggggaatgggagcagcgcgggagggtggtggggccgccaggatcgggcgtggtaatgccgggacctgctgcttgctctgcttggcctgcacagtgtctggcccggagagcacaggtgagcaaggtaggacggctgtcacccacagacgagcagcggagaactttctctaactgccacccacgtgccgaccctccaaagaacgcgggtttcactagcaaataagaacgtgggtttaattagcaaatacttttaacaaacttgacactatcacatagagctcccaaagttgccccaagggcttgtaaattacctaa

SEQ ID NO: 12320 - DNA, 2456 bp, Artificial sequence
  DNA replication origin
cagggatgctccccaagggcccgatggcagcgacactggagccctggccccgtcacccggctgacatcgtaggacagcagcgcctgcctcatgcacaccatcccctgcatggctactggacggggtccaggccaggtgaccccttcacccacacagcagggcacggcaggccaggctggtggtgtccttccctgcagccccttcacccgcacagcagggcacggcaggctgggctggtggcgtccctccccgcagctccaatttgagcagggagctccttatcttccctctgagagacagtgggtcctttctctgccattctttgatgcagcacggccaccacttccccagggagcctgagcctggggccagaggcagaggcccaatgcccacagcctgaggtgctctgggcccgcgtggccctcagaccaaggcttccgagtggtccgggctctccgcagaccccacaccctcaatgacatgcacagcagaggaccagggtgcgtgggtgggcgctgctgtgtgctgctgtgtgctcctgtgcgctgctgtgcgctggtgtgtgctggcgtgtgctgctgtgcgctggcgtgtgctggcgtgtgctgctgtgtgctgctgtgcgctggcgtgtgctgctgtgcgctggtgtgtgctgctgtgcgctgctgtgtgctgtgtgctgctgtgtgctggcgtgcgctgctgtgcgctgctgtgcgctggtgtgtgctgctgtgtgctgctgtgtgctgtgcgctgctgtgcgctgtgcgctggcgtgtgctgctgtgcgctggcgtgtgctgctgtgtgctgctgtgcgctggcgtgtgctggcatgcgctgctgtgccctggcgtgtgctgctgtgcgctgctgtgtgctgctgtgcgctggcgtgcgctactgtgctctggcgtgcgctgctgtacgctgctgtgtggtgctgtgtgctgctgtgtactggtgtgcgctgctgtgcgctggcgtgcgctgctttgtgctggtgtgtgctgctgtgcgctgctgtgctgctgtgcgctgctgtgtgctgctgtgctgctatgtgctggcgtgcgctgctgtgtgctggcgtgcgctgctgtgtgctggcgtgcgctgctgtgtgctgctgtgtgctggcgtgtgctgctgtgtgctggcgtgtgctgctgtgcgctggcgtgcgctgctgtgtgctgctgtgctgctgtgtgctgctgtgctgctatgtgctggcgtgcactgctgtgtgctggcgtgcgctgctgtgtgctggcgtgcgctgctgtgtgctgctgtgtgctggcgtgtgctgctgtgtgctggcgtgcgctgctgtgtgctggcgtgtgctgctgtgtgctgctgtgtgctggcgtgtgctgctgtgtgctggcgtgtgctgctgtgtgctgctgtgcgctgctgtgtgctgctgtgcgctgctgtgtgctgctgtgcgctggcgtgtgctgctgtgtgctggcgtgacaccggagggggagcgtgttttgtctgggatcctcatgtgacacctcagacactagatggtcctgcccagacagacgccggtccagggtcactgaggggcgtcaggagtatttccgtctggtcaggtgacatcagtgtcacatgggcattgctcacagaggggcccctggaggaaggagagtggcggtcagcactcgatgacctttggcctcgcttcaccgtgggtgaggagctgcccaccgaggaagcccgggctgggtgttgggatgcgctcctgccttggtgcctccacgagggctgggcattaggggcccacaggccgcagcttcagtccctctggccctctgggttagtcctggccccgcccaccaaccctctgggttagtcctgggtcctccctgctctcctgggtcagtcctgggtcctccctgccctctgggtcagccctgggtctccccactctgccctcctttcttaggtgaaggctctgctcccttagacttggggggaaacaggaaggtctggctggaacagatgactttttctaaaccctgagtccagagcggcgtggatgcctgtgggcactggcagctgacagcttgcatgaacccagcctctgcaggggctccgatggcccaaaccctgttcatgagacagggacttgcacattcctccctgagcctcaggttgacaaagacctgctggtgcctgggggatggggagcccacacctgctctcatgcccgggggacggggagcccacacctgctctcatgcctcagggacagggaggccacgcctcttcccgaccccacctctctttcctcacccctcagcccccccaaacaatttagcagggacccaggagccacccaggtcacttcccatcacacctccctggtgtgaggccacggctggggaaggtcattcccaggctggagagactgggcaggggtcact

SEQ ID NO: 12321 - DNA, 1010 bp, Artificial sequence
  DNA replication origin
cttgtcctgggaccaccagctggacgagcctatcacccacccccgaggtagaagacctggggcgcagccctgatctattgatttttttttttgagggtctcactctcatccaggctggggtacagtggtgtgatcacagctcactgcagtctcgaattcctgggctcaagccagcctcccaccttggcctcccaaagcactcagattaacatgtgtgagccagtgcacctgagctccaccctgatttacataaagaccacactctgggctggaccccacccgcccgcgtgcacacctcagctggagcccacgccaggtgcctgctcccactgggcaggaagtgcggacctccgagaggcacaggctgggcctgctggccatgggtgtgcccatcacgactccctcgtcatgtctcctcatcacatctcctctctgctcggggccaggctctgagacgccacaggctgatggccggagccaggcggactttgagtctgggtctgagatggctccacgtgtacaatgcacactggtttcaaagctgtggagtgagaagaaagacgtgctttcgttagtcactttttatatgggttacctgttgaaggggcaaccccctgttcctgtagggcctcggctctcacttcctgacttggaccccacccgccaagccctagtgtgcgtgtcctgggcctgtgcttcctgcctggtgggagctggtgcttagccagggctcaatggagagagcagagatgatggcaggggtatgtgtgcacgcgtgtgtatgcgtgctcgtgtgagtggggatttctgcctagggtgtgggaacgtctgagccccgtggggactttgggtcattatttaaatttgggctaagttctactaggtcttctgtcacctgctggagttattttctttctgccacattttagaaaataaaatgcaccgaacaaacatggggtgttcctaccgcagcatgggaaaggcgaggcgccatcccaccaaggcgggtg

SEQ ID NO: 12322 - DNA, 2052 bp, Artificial sequence
  DNA replication origin
ctgcctcctgagcagcggatcccaacctgcctgcccctggggctgggtctccagcagtcaggactgagttgttgctagctgctgacaggtgtggggcgaagggggcgcatttgccgcatgtccccattggcagcatctccacgccttcccttgtgacacctccaaccagaatagagcaggtatgtgggagcccgcacctgctcccccagcgccccggggtcgtcttctgcctgctccttctgtcctccacactgaagagtgtgctccagctggggatgggcatgtgtgacgctggggaatggatacctgtgaaatggtggagtgtgcatcaagtctaaatagccgctcgcaggatctgggggctttttgttttcagaaacctgatctgatctttataaaaagtgctcccccactcagtcagcctgggtgtccctcccgtccaggccagcagcgctgtctggctcggcaaggaggggctgaaactggagagcccctgggaaggctcttgtgggccaggtggcagcggggagggtggctcttgttccccgccctcatcctagcgttcagcagactgccccacaccacaggtttccattttcacccttgggttaagagaaaagcagaaataaaaagtttctaatgttgcttgcgaaattcagcactggccaccaaaggcacctggggcttctgcgtctctcttgtcccctggggctcctgcgtctctcctgtcccatgggtccgtttcttgctgtttattgcaacccgcctacatcgttggtgtgtgcagctgaactcaggctgtttaggaagcccacgggcagggctctgtggggcccattcctggtcccacgtctctggcaagggctcctcttgagctgaggcttctgagctcctgcaggcgggagtagggaggcaggtcccactgtcagccaagctgcagggtttttaggaagaaagtgggggctgtgcaccgtgggctcacacctataatcccagcactttgaggctggccggaaggatcgctgtggcccaggagtttgaaaactcatgcctataatcccagcactttgggaggccggcaaggaggatcactttagctcaggagtgtgagagcagccttggtcctatctctataaaaaatttaaaaactggccaggcatggtggcacatgcctatagtcctggttgcttgggaggctgaggtgggaggattgcttgagcccaggaggtcgaggctgcagtaaactgtgatggtgccgctgcagtccagcctgggccacagagcaagaccgtgtatcaaaaggaaagggctgctgtggaagggcctccagtcccctggcctgggctgcaggggccgctgctccagccctgccttctacatgtgccgagatgtgagcagtcacccctggagatcctcaccccttctctgtagaacgaggagttgggctgccagggattggggtctgggcgcgttgctggtgtgtgtgtgtgtgtgtgtgtgtgtgtgtgtgtgtgtgtgtgtgtgtgtgtgtttcctgggaggaggcccccacagtcttcgtcatgttctccagggcccagtgggaaggagttggaagttggatggagagaaatgtggagtagggcaggaacctccttcctaggaaggagcctgcgggggaccctgcaaggggtcccaggttcccaggaggcctcgggtgtgctgtcagaggggcgctggggctgggagtctgtccatgtcttcagcctgggtctcgtgagttcagggagtttgaacctgggtggagaatgagcccctgtgcgtcttccctaacctccagctgacacgagcttccgcagaccccgcggtggcgggtgtgggcgctccccgtgccatctgttggggacacctcacacatcacttgcgctcagcccgtgtcgcggctgcaggagccaccagaccttgtaaatactcggatgcccacatctgctcgtctgtgtctccctgtggctgtgcatcagacctcacgcgtttaaaacgtccttctgagaaggggccacaggcaggtgccac

SEQ ID NO: 12323 - DNA, 1020 bp, Artificial sequence
  DNA replication origin
tgacccttgagagggcctgtgtcgcccgcagcgccgcctcgcccctccctgtgccggggtagaggaccccgtcgggcgctcggaagccaggggctttcttgcctgaggcaaggcggcccccactggcgcggtgggtgctagtgcgaagctgtgtcaactaaagcaaagactcatgatgaaaacaattgggatagcttcactcgggagccttcctgaggacggcggagcaggccggcagctccttcaagaggctctgccgctgctgcgtcggggctcagccgggtttgggttggagagcgcagaggtgcttggagtaggtcttttatcttctgaggaggcggtggcccgggcaggtggcggccccgtgctggtcctgcgctgtgtcctcggagcgtcctcagctgctgcgcgcacagccgggggccgtggaccaggcgtccgcacggacacgcgaaccgggctgcctagcctgctgctgggcctcacggctgcagagacggcgggaatggtgaccgttgcttcagagtcctttgcttatgagtaactcaccgaattgacagtgatttttatgaattcgttgtgttcactgaggagttgtggcaaagtgagaaaacctaacccgtacttagttcccagatgtgagtgttttaaactatgtgtaacaactaacaaaattgacatgatgatacacttcacggacatttaattttgatcctgccatttcctcattttagaggcggtaacatgttctggtttttttctcgttgctcaaacatcttccaggctcctgcacggcgggtgctgtgtctccgggcccaggtgacctcggggtgagaaggaaggggcctctgagatgagaacatagttttgctgttttcagtttatactcaaagccctgcagtttcctgacagcacagagcacacctgtcacgcgagcaggatgaagcccagaggctgcctggtgaagtgggcggcgcgctggaaaatccacgtagctttgttccctccacggggagcgtg

SEQ ID NO: 12324 - DNA, 1564 bp, Artificial sequence
  DNA replication origin
tgcgcggagttggcgcgttcatggaggcaggtgactgtgtgggctggcgcattcatgctggggacacactggggagtcagcacacaaggccactggggctcagaaggcccagaattgagtccctcccatgaaaccggtgactgagcacacacttccttctctgaaagcggggtgcggacaccagtggcagagacactaaatcggaagcactgctgcatagccgctgcaggcagtgggcaggacatcccttcctggcctcctcgtgtccaccagctccaggaggcctccagtccacccttgcctgccccgctgccaccacagagcaggcctctgcatgggaacaggcctggagatggtgaaacagctaggaggaaaacagccagccccaggcctgactccggccttgcagatccttattcagcgggggactggggtgcccacaccatctccccaggcaggggtggcctccagagcagggccccgcgaccagagctcagtgtgtcctggaccctgacgccttgagagggagtctaagcctctcctcgccctggaaccggcccagcctccgggctcactgtgctctgggtggccagtgcggctccctcgcaccataaaattgatctgcaaggcaggcaccgtggtgcatgcttgtaatcccagtcagtgctttaggaggccaaggcaggagaatcacatgagtccaggagttccagcctcctatgccaggcaacatagtgagaccccatctctccaaaaattaaaaattaggctgggcatggtggcgcacctgtaatccccgtactttgggaggccgaggcaggaagatcacttgggcccaggagttcgtgaacagcctgggcaacgtagtgagaccctgtctctacaaaaaatttaaaaattagctggacacagtggtgcactcctgtggtcccagctactcggaaggccaaggtgggaaaatcacttgagcccaggaagttaaggctgcagtgagctacaatggtgccactgcactctggcctgggcgacagagcaagaccctatctccaaaaacaaacaagcaaaaaaactgatctgcagtcttagtcccagggcagggaactcacaagccagaagagatctagacgccctctgtgtggtgaggaaaaggctgcgtgactcatccacgtattcagccagccggtattgagcacctcccctttgctggacacgtggatgccatgggagggctaggcctctgcctgcagggcctgggcaggggagatgggggcagactgggggagatggggggacatggagtcagactggggagagatggggcagattggggagatggcagactgggaagatgggggtagactggaggagatgggggccatggagtcagattgggggagcgatagggacagatggcggcagactaggggagatggggacagactgggggagatgggtctatgggggcagattgggggagatgagaggataatggaggcagatgggggagatgagggaagtagggggacgataggggctgggtgggggcggtcagaggcaagtacgt

SEQ ID NO: 12325 - DNA, 917 bp, Artificial sequence
  DNA replication origin
ccacctgcccagagagtcccacctgcccggggagagagagagagtccccgcgtgccccgggagagagagagagtccccccctgccccgggagagagagagtccccgcctgcctggggagagagtcccacctgcccaaagccacaagcctatgtgtgccttcatgggtctggggacagcacagccctacaggtgggtcactgggcaggacctaggaaggcatagcagctggtatgtgtccacctttgctgggcttggttccccctctgtgaagtgcaaagagcagggtagctggaagcgtgagatggagtggagtgaagcccctgggtcctcagccggcaccacgtccccatccctgtggggctagtggcccagcccgggggactgcaccccactgccaggccagcttctcccgctcctgctcttgtccttgtctcccaaagcagcccagagccaccagcacagaactacggggagaagaaacctggtccccgggctcaggtgtggaggcgggtggctgtgcgagttggtgcgttggtgaagacggcatatgagcaggattggcgcgtttatggaggtgggtggatgcgtgggtcgttgcgttcgggaagacaggtggatgcgcggagttggcgcgttcatggaggcaggtgactgtgtgggctggcgcattcatgctggggacacactggggagtcagcacacaaggccactggggctcagaaggcccagaattgagtccctcccatgaaaccggtgactgagcacacacttccttctctgaaagcggggtgcggacaccagtggcagagacactaaatcggaagcactgctgcatagccgctgcaggcagtgggcaggacatcccttcctggcctcctcgtgtccaccagctccaggaggcctccagtccaccctt

SEQ ID NO: 12326 - DNA, 827 bp, Artificial sequence
  DNA replication origin
gcagggagggcagagtggtccgggggggcagagacctgcagggagggcagagtggtccgggggaccagagacctgcagggagggcagagtggtccgggggggcagagacctgcagggagggcagagtggtccggggcggcagagacctgcagggagggcagagtggtccggggcggcagagacctgcagggagggcagagtggtccggggcggcagagacctgcagggagggcagagtggtccggggcggcagagacctgcagggagggcagagtggtccgggggggcagagacctgcagggagggcagagtggtccggggcggcagagacctgcagggagggcagagtggtccggggcggcagagacctgcagggagggcagagtggtccggggcggcagagacctgcagggagggcagagtggtccggggcggcagagacctgcagggagggcagagtggtccaggtgcggggggcggccagcaaacaccacccggggaacgggccgagagtgcggggtggctgcgaggacgtgccgagggggtgagagcaacctggtcaccaaaccttccccaggtaatgagaattcgccttcgaaacctgggcccaggcaccccaagaccatgtggaacattctgagtcattcaaaaaagacataactatgtctgacgcattcttttaattaactgccctgctcaggtggtcagtgggccccacttcccagacacaccacgccccagagaatgcagggtagatgggccccagatccagagaactgctcccggcccacggggctgccccaacacgtccctcgcactcggcccgc

SEQ ID NO: 12327 - DNA, 1055 bp, Artificial sequence
  DNA replication origin
gcacacctgtcacgatagcccaaatccagagaccgacatcaccaaatgcgggtgaggatgtggagcaacaggaatgcactcatcgctgtgggaagtgactgcaaaatggcacagtcacttggaagtcagctggtggtttcttaccaaagttggcaaaatcctgccacaggattcagcaaatgtgccccttggtattcacccacatgaactcaaaatttaggttcacatgaaacctgcacacagatatttcgagcagttttattcataactgccacagattggaagcaaccaagatgcccttcagtaggggactggataactgtagtccatccagacagcacaagaaaggctctgtcatgccgtgaaaagacgtgagcaagtttaacagcattctgcgaagtgacaggtgccggctgaaaaggctgcacgctgtggggtcccaccgcatgacattctggaacaggtagcaccatggagccaggaaagggttccgtggtggtcagtggtggtggggagggagggatgaatgggtggtgcacagggcccttttggggcagtgaagctgctgcgtgtggtgctgtaacagtggatgcacagtggatattcatttatcaaaacccacagagcatgccataccaagaggggccccccataagctgcggacttcgggcggttgtgctgtggccatgtagggttcgggtgctcgtgctgtggccgtgcagggttcgggtgctcgtgctgtggccgtgcagggctcgggtgctcgtggtgtggccgtgcagggctcgggtgctcgtgctgtggccgtgcagggctcgggtgctcgtggtgtggccgtgtagggttcgggtgctcgtggtgtggccgtgtagggttcgggtgctcgtggtgtggccgtgtggggttcgggtgctcgtggtgtggccgtgtagggtcatcactgttgtaaatgcactattcagggtgcagggtgttgataatgggggaggccgtgcatgtgtgtcaggagggtgtacatgcaaactccatcatctgctcaattttgctgtgaacct

SEQ ID NO: 12328 - DNA, 1386 bp, Artificial sequence
  DNA replication origin
gcggagggctgacccccccacctccctcccggacggggcggctggccaggcggggggcttacccccccacctccctcccggacggggcggctggccgggttggggggctgacccccccatctccctcccggacggggtggctggccgggctgaggggcccctcacttcccagtaggggcggccgggcagaggcacccctcacctcccggacggggtggctggccgggcggggggctgacccccccacctccctcccggacggcatggctggccaggtggggggctgacccccccacctccctcccggatggcacggctggccggtcgggggggctgaccccccacctccctcccagatggggcggctggccgggcggggggttgacccccccccacctccctcccggacggggtggctgccgggcggagatgctcctcacttcccagatggggtggctgccgggcggagaggctcctcacttctcagacagggcagctgccgggcggaggggctcctcacttctcagacggggtggttgccaggcagagggtctcctcacttctcagacggggcggccgggcagagacgctcctcacctcccagacggggtctcggccgggcagaggcactcctcacatcccagatggggcggcggggcagaggcgctccccacatctcagacgatgggcggccgggcagagacgctcctcacttcctagatgtgatggcggctgggaagaggcgctcctcacttcctagatgggatggcggccgggcggagacgctcctcactttccagactgggcagccaggcagaggggctcctcacatcccagacgatgggcggccaggcagagacgctcctcacttcccagacggggtggcggccgggcagaggctgcaatctcggcactttgggaggccaaggcaggcggctgggaggtgtaggttgtagtgagccgagattcacgccactgcactccagcctgggcaccattgagcactgagtgaacgagactccgtctgcaatcccggcacctcgggaggctgaggttggcgggatcactcgcggttaggggctggagaccggcccggccaacacagcgaaaccccgtctccaccaaaaccagtcaggcgtggcggcgcgcacctgcaatggcaggcactcggcaggctgaggcaggagaatcaggcagggaggttgcagtgagccgagatggcagcagtacagtccagcttcggctccgcatcttcctttctgttctaaaagccttttcatttctttttcttgccttattgtactgttccaaactttagggaggaggcatttctcctttactattaagtatgacataactacagattttttgtagatgccctttatc

SEQ ID NO: 12329 - DNA, 1078 bp, Artificial sequence
  DNA replication origin
ctgcccggccagccgccccgtccgggagggaggtgggggtgtcagccccccgcccggccagctgccccgtccgggagggaggtggggggggtcagcccccccgcccggccagccgccccgtccaggaggtgaggggcgcctctgcccggccgcccctactgggaagtgaggagcccctctgcccggccagccgccccgtccgggagggaggtgggggtgtcagccccccgcccggccagccgccccgtccgggagggaggtgggggggggggtcagcccccccgcccggccagccgccccgtccgggaggtgaggggcgcctctgcccggccgcccctactgggaagtgaggagcccctctgcccggccagccgccccgtccgggagggaggtgggggggtgtcagcccccccgcccggccagccgccccgtccgggaggtgaggggcgcctctgcccggccgcccctactgggaagtgaggagcccctctgcccggccactaccccgtctgggaggtgtgcccaacagctcattgagaacgggccaggatgacaatggcggctttgtggaatagaaaggcaggaaaggtggggaaaagattgagaaatcggatggttgccgtgtctgtgtagaaagaagtagacatgggagacttttcattttgttctgcactaagaaaaattcctctgccttgggatcctgttgatctgtgaccttacccccaaccctgtgctctctgaaacatgtgctgtgtccactcagggttaaatggattaagggcggtgcaagatgtgctttgttaaacagatgcttgaaggcagcatgctcgttaagagtcatcaccaatccctaatctcaagtaatcagggacacaaacactgcggaaggctgcagggtcctctgcctaggaaaaccagagacctttgttcacttgtttatctgctgaccttccctccactattgtcccatgacccagccaaatccccctctgtgagaaacacccaagaattatcaataaaaaaataaatttaaaaaaaaaaaaaaaaaaaaatccaggctgggcatgctggcacatac

SEQ ID NO: 12330 - DNA, 850 bp, Artificial sequence
  DNA replication origin
ggtattctggctttttagatcagggtttgggactttgggccctcctagcagcccgcctaagagtaagcttcgttatctccatggtataaatggcccaagacctcagaatccctggtcagagtatgcaccgtgctgtctggtccctgtaatgccaggctctgtgggtcctacccacaggggtgctctgtggctggggaatgctagaggttagcttcctctgagccactgagctttcaggtcactgcagaccgccttatctgcagagacttcctgtgccaagcaggccagtcctgccagggagaatggcagaaagctcgtgtgtgtcctggggagatcgtcagagggaaccaccctccacctgaaccacaataagtactcgtagctggaggtgtaaacactctccagaggctgcagctgcgtatccaagggtcctggccagcccctgtacaagactcagttggtggggggaagggtgggcacagattggggcgtaggggggcgtgtggccctgactcagcttcgcggttgcaccctagtctagtgttgatggttgaagtcacgtggacgtggcctcccctgtgtggctgctgagggtgtttgagggcagttgtgtgctcctggcctggggtcatgtgtttgtggctgtgtgccgtggctgctgagggcatttgagggcagttgtgcgctcctggcctggggccgtgcctctgtggttgtgtgccgtgtgtgttgcgggtggggggtgccctagttgtgcacctgattctgcagccccgcacactgccgaggctcctgtgtgccgtgtgtgttgcgggtgggggatgccctagttgtgcacctgattctgcag

SEQ ID NO: 12331 - DNA, 980 bp, Artificial sequence
  DNA replication origin
atgctggctagagaggcaggatgacacgtggacgccagcacggatgtgtgtggcgtcgggcagtgagctgctctggccccgacctcttctctgtgaaaaggcacaacagtattcaatacatataaactatgttcttaagtcacttgtcttcagaggccttcttcattgaggaagacaacaggggttctggttggggagccaggccttacagtagttcttgaaggagctgcacagcaggtcatgggtactgtgagtgtgcacttcgtctaattattaacagtgcctccgttcactctcaacggtgccccagttaggacggtagactatctcatcaccactatgcgtgaggagcctgggaacatggtcagaaccattttactcatacaagtttgcagaggcctttaaagcaagcctcttggccctctgttattgaatgctggcctctgctaggtgctgcaggtagcaaaagataaaagatgtcgtgctgttccgtgtggacaggagctggctatttaaagtggaatggaggactcaagtacatcttcatgggcagggaagagatcaaaggctgtggacgacgaatacagaattatcctctggtccaccacgtagcatgcatgcagagataagccactgtgaccagtcacatcaagattcatagacttatgcctaatttagagaactgacttgccaggtttgtaatactaacttaatagtgggttttctgctgctggtagtggtggtttggcggctggagagcactgccttccagtgaagctttgaaagagccgtcccatgccctgccaactgtccaagacaactgacagcagatccgacacctccatgtagacacagatccaaaactcactttaaaatactaatcacagaaggggccgaaagcagtcaccatagtggcccaggagagcaggatcagtggtgccctgtcggacatgggagagccggtggcggcgctgtgccgc

SEQ ID NO: 12332 - DNA, 1146 bp, Artificial sequence
  DNA replication origin
gctatgatggtaccactgccctccagcctgggtgactgagagagatcctggctccaaacagaaaaataaaaacagaaggaggaacagatgaatcccatttgtgacattaatgaattctcttatagggaaaataaaacgattgaaactgggccatcttggacagctgaggcccaggcagggccagctccttccaccttcccagccaagatgctgcctgcagcccctcccctcctggcccgagatgctgtcattgtccctaagagaccctgaggcctgctccaggctgagtgggtgaggagcctctgagcaggcgcctgcgtcgaggcgtgccctcctgagaggcaaggctgacctgcagcgtccagctcggctggggacactcgcctgagaagagcccagtcctgggtgcctccctaggggagggccttggggctgcttgtgctggcaccgacgtgggcctggggagggacctgtgtgtgggtggcaggtcttgaggagtcgtgggggagggtttcggggggagatgctggtggtaacagtgggaggtaggcagtgaaaccagcagtgtgactttggaggtgctggaggagcagggcctggcggaagaagtgggggagccaggaaggagcagctgccagggacggcctggcctgggagggtggccaggaactgggggagaagctggtggtcaagctggtggtctctcagtgcaagggtggggctggcctggaggagaggcccacagggtccctgctggctgagggtgcagtggcgggccccggaagctgaatatcacccccgccaccgggcaggcagtgctcagagtgaaacgggtgactggagggcatgtgccagctctgttcctcaagcctggcccaagagggacctgcagcatggggttggggggcaggcggcccttctctgtggtctctcctgccttctgagggagcctccagaatctttcatcgccgccacaacaaactcaggctttcgtgtaggaaaagagcccacttctgaagaggctcatctgggctttctctcccagcctctaagtctcccatcacctggctccccgttcctctttcccttgaaggaagtcagcagagtgcatggctgacgggaaagaaggcacagcgggcctgccca

SEQ ID NO: 12333 - DNA, 1194 bp, Artificial sequence
  DNA replication origin
gagggagcctggtgtgccccacattctcagagcccactcttcacgggctgctgcgaggcctgggtggtcgtcctgagttggttggacgggccccgcacagtgattcccgaagtttactagatgtctgtggtgttcgcatcttgccagcgccgggagggacaggcaatgtggacggtcagccctgagcctccctccctccctcccggcagctcaggacccggtgccttggagtccttgcagagcctgggctccagggagggtgacctgtgggtcgcagcccacaggaggctctggggacatggggacatagccagtcttgacgtcactgaatgagaacctggcggctggagccatcctagagtaagaatttcgccacccccacccccccaccccgccaaagcacaggcattcctcagggacctacagctatctcgggaagcctgatgtccaccatgtcatttggccccggctgacctcctactctcggagtggagtagaaagcgtctcaggcagacgagcagacggcatcgttcccatgcccggaggcaagagcagtgaggaggccggctgcgggagtgggtcctcacccgccactggagtcctgccactgcaagacccacaccacacacagggccacagcagggcgggaagaggaggctcgggaggtggagagcacggaggggccagggcccgaggtccccagtgccaatagcagtgtgcgccccacagcaggagacacggccctgtggctaggcatgcaggcagctggcagatgggcgggtgggtagatgtgggaattcccatccagaggctggtgggcaggacgggaggtgtgggtcattgtgcaatcctggtgaatgccgcccagcagccgcagtgagggtcaggtggtgacaggcatgcagagctaggccgctgctgggtgtgcccagccacagtgccgccacagcgctgccacagcacccccaggtcctgggtccaggctccctggcccctgcttctcacgtgctcatcttgtctagctcctcactaacacatcttgaccagcacctcctcggccaggcaggcagcaatctgggggatgttggtagtgggggatgggctctgggctccactcgccgggccagcacaagctccagacaggatgcacctgctccaagcacagtggcgggggccggtgaggggggcgtccgg

SEQ ID NO: 12334 - DNA, 1026 bp, Artificial sequence
  DNA replication origin
gccaccccacacgaagccgcacacgtgccgcgtgttgtacacgctggccatgtaggtccgcggcagtgcacgctcgatgtagtggtcgaggctcagcagggcggtggagtacatggccaccagtgaggacacattgaaggggatctgcagtgccacgtggacttcgccgcccacactccacagcgcccaccgggagctcggggggccgagcaggtgcacaggggccagggcgctgagcaccaggcctgccactgccatgttgacaaagtacacgtccggcatggtcatgctggccttgctgtgtaggttggccagcaccagcagggcgttgtagcacaggcccactggcacgcccaccaccaggcccagcagcgacaacagtgacagccccagctgcaggtcctggcaggcaggcagctcctccaccagccctgtgccgttgaaccagctgcagctccacatggcggccggcgaggctccgcgaccctgcggaaagaaggaacaggtggtcagctcgcgtcccgtcccaaagccctggcccagaagtgctgcaggtacaggggtgccttctcctggtgcagtaatcgctgcagaccacagagcgaggctgcctttggtgcatttctgtgaaagtgaagttgagcgttgaaaaatggccgtctcgggtcgtgaccgggggctgctgtggctgcacttatttcagcggctggggttggggaccagagagggagcctggtgtgccccacattctcagagcccactcttcacgggctgctgcgaggcctgggtggtcgtcctgagttggttggacgggccccgcacagtgattcccgaagtttactagatgtctgtggtgttcgcatcttgccagcgccgggagggacaggcaatgtggacggtcagccctgagcctccctccctccctcccggcagctcaggacccggtgccttggagtccttgcagagcctgggctccagggagggtgacctgtgggtcgcagcccacaggaggctctggggacatgg

SEQ ID NO: 12335 - DNA, 1460 bp, Artificial sequence
  DNA replication origin
ggcctgccgggtgtgccgcagtcaccacagggttctgagaacatttcacagaagtgcctgagacgcggagacatggctggtgttaaatggagctattcaatagcagtgacgcgctctcctcagccaccaaatgtccctgacaccctccccagcccccacagataacatcagctgaggtttttttcagtatgaacctgtcctaaatcaattcctcaaagtgtgcacaaaactaaagaatataaataaacaaaagaaaggtgtgttaggatttctgactgaataccagagctgaagggcccccaggggacagagggctggaggctgtgtcacacggggtctggtgggagggccagggtggaaccttaggccagctccgaaggcacctgggaccagcatccgtatctccgcggccctcgcagcctcagatggggcccggaccggcctgttccacttgagcgaacaggtctgcagtgaggagggtccatagtggggcgggtccgtagtggggcgggtctgtagtgaggcgggtcttagtgaggtgggtcttagtggggcgggtcggtagtgaggcggttcctagtgaggcgggtcccgagtggggcgggtcagtaggtggttcttagtggggcgggtcttagtgaggcaggtcttaggggggcgggtccatagtgaggcgggtccgtagtggggcgggtctgtagtgaggtgggtcttagcggggcgggtcttaggggggcgggtccgtagtgaggcaggtcttagtggggcgggtccgtaatgaggcgggtcttaggcaggcccgtagtggggcgggtctgtagtggggcgggtctgtagtgaggcgggtccgtagtggggcgggtctgtagtggggcgggtccgtagtgaggcgggtcttagtgaggcgggtcttagtgaggcaggtcttagtggggcgggtccgtaatgaggcgggtcttaggcgggcccgtagtggggcgggtcttagtggggcgggtctgtagtggggcgggtccgtagtgaagcgggtccgtagtgaggcgggtcttagtgaggcgggtctatagtcaggggcaattgttcctcgtcagcctggctggagaccttccacccattgggattttgtaaaacatctactttaaaatgtggccgtgagaaaagcccccattcctccccaccatctgttcgcctctccccgattttctaggattaaagtataggcctgcaatcccctacctccaattctaaagcccacaaagctctgaaaacaggaagatgttccccccaagtttgcggcaaattcactgggcagcgatccctgacctgaaggggtgtgagagcttcatgtccatgaggaccccaccccttctgaagacgggcgatgtggctgtgggagctgccctgagcgccccggggttctgtggcacacttcctccccacagcctgaacgcgctggaatt

SEQ ID NO: 12336 - DNA, 1036 bp, Artificial sequence
  DNA replication origin
aactacagaggggtaaccgaaagtattaagacgtacaattcgaggggaaataaccaattttatgatactttctgttacggttactattcctgctttccctctgtcgtgtgctgtgtatgaaagaagacgtgtgtagatttcctgatctcttcgccacaattcacactagatccagcttcctacaataactcttagaactttaatgaagtgaatctacaactaaactccctttctggaatcttacttaaggaagcagggcaaggtttttttgtggataaacaaaaataagatgaatgatttttgaactatagtagtcaagaagtgttggtagcaatatcattgaccctgggacgtcacgcgctgaaaaactcgcatcctggtgtctcacaaactggggaagaattggggagttgggcagacggctgcctggaagaattaagcagttggagagatggctgcctggaagaactagggagtcggggagacggctgcttggaagaattggggagttggggagatggctgcctggaagaattggggagtcggggagatggctgcttggaagaattggggagttggggagatggctgcctggaagaattggggagtcggggagatggctgcctggaagaattggggagttggggagacggctgcctggaagaactggggagttgggcagatgactaccttgactttttacaagtagctcctttttctgccccgagtggctcaagttcttgtgttctgtgtgtgatgaggtgaaggctttgggaatctctcaggggcggcaggaggctcaggaggtgccgaatcttcccaggtgaaggcaacatagaatatagatgagcaggtgtctcaggaacagtcagcgacgcagctcctgggaagcagccacagagactggcgggagcctggggatgaggacggaggccttggcgctcagtggagggtctcaggcagcagaggctggcgggaacctggggatgaggaggggactcgctgggtagggggttggggcaggccatggtgcaca

SEQ ID NO: 12337 - DNA, 990 bp, Artificial sequence
  DNA replication origin
tctcggcactttgggaggccaaggcaggcggctgggaggtgtaggttgtagtgagccgagatcacgccactgcactccagcctgggcaccattgagcactgagtgaacgagactccgtctgcaatcccggcacctcgggaggccaaggttggcggatcactcgcggttaggggctggagaccggcccggccaacacagcgaaacccggtctccaccaaaaccagtcaggcgtggcggcgcgtgcctgcaatcgcaggcactcggcaggctgaggcaggagaatcaggcagggaggttgcagtgagccgagatggcagcagtacagtccagcttcggctccgcatgagagggagaccgtggggagaggggagaggggagaggggagaggggagagggagagctatttattgttttttgagacggagtttcgctctgtcgcccaggctggagtgcagtggcgcaatcttggctcaccgcaacctctgcctcccaggttcaagcgattctcctgcctcagccttcttcgtagctgggattacaggcatgtgccaccacgcccagctaattttgtatttttagtacagacggggtttctccatgtggtaaagctggtctcgaactccagacctcaggtgatccgcccgcctcggcctcccaaagtgctgggattacaggcatgagccaccgcgcccggcctaaacgtgagacttttaatgacggtcttgcaagatcgggtgtctggtgggcaggcacacccagcacggtcacaacaagccatttatcccccagtacgcaggcccctcccccggttcctcacaggctgagtactctggggtcacagtcttcccggacatcacctattggttgtcgggcaggggctgtaggtgtttttttagggttgtcctgctgcattttgttgcagcccacaatgcgttgcaatcctagtcagctcaggggcttttcaggtatttgacttatgacctaagtagc

SEQ ID NO: 12338 - DNA, 1254 bp, Artificial sequence
  DNA replication origin
atgtgcgtgcatgtgtgtgcatgtgtgtccgtgtgcgtgttgtgtgcgtgtgtgcatgcatgtgtgcatgtgtgtgcgtgtccgtgtgtgcgtgtttgcgtgtgtgcacgtgtgtgcgtgtgtccctgtgcacgtggtgtatgtgtatgcatgtgtgcatgtgtgcgcgtgcattcgtgtgcccgtgtgcgtatgtgcgtgcatgtgtgctggccgggcagaggggctcctcacttcccagtaggggcggccgggcagaggcgcccctcacctcccggacggggcggctggccgggcggggggctgacccccccacctccctcccggacggcacggctggccaggcggggggctgaccccccacctccctcccggatggggcggctggccgggcggggggctgaccccccccacctccctcccggacggggtggctgccgggcggagacgctcctcacttcccagatggggtggctgccgggcggagaggctcctcacttctcagacggggcagctgccgggcggaggggctcctcacttctcagacggggtggttgccaggcagagggtctcctcacttctcagacggggcggccgggcagagacgctcctcacctcccagacggggtctcgccgggcagaggcgctcctcacatcccagatggggcggcggggcagaggcgctccccacatctcagacgatgggcagccgggcagagacgctcctcacttcctagatgtgatggcggctgggaagaggcgctcctcacttcctagatgggatggcggccgggtggagacgctcctcactttccagactgggcagccaggcagaggggctcctcacatcccagacgatgggcggccaggcagagacactcctcacttcccagacggggtggcggccgggcagaggctgcaatctcggcactttgggaggccaaggcaggcggctgggaggtgtaggttgtagtgagccgagatcacgccactgcactccagcctgggcaccattgagcactgagtgaacgagactccgtctgcaatcccggcacctcgggaggccaaggttggcggatcactcgcggttaggggctggagaccggcccggccaacacagcgaaacccggtctccaccaaaaccagtcaggcgtggcggcgcgtgcctgcaatcgcaggcactcggcaggctgaggcaggagaatcaggcagggaggttgcagtgagccgagatggcagcagtacagtccagct

SEQ ID NO: 12339 - DNA, 1104 bp, Artificial sequence
  DNA replication origin
tcatcagtttttgtggtttttaatgtattgtgtggccagtgggagccccccagctgcccccaccagtgcccaggcccacctcacatcagcttttctccaaggagctctggtcctctcagcgcacctgagactaccagtgctagtgccacagagcccggggccacagcaccttccggtttcaccactcaccaatgcatcgtttattaaagtttctttcaaaaagaatttttaagcctatgttgttgtacagctgtttctcgcttgcttttcttgccattgcacctgatctgctgctgacgtgcgggagggtcattaaaagattgacttaaatttgataccagaaatgtcagtgtggctttgcttgaacagccgcgtgcggggcctctatgagtggaatccagtctcatggcccccccatggctcctgttaccctggaggaggctactccatgaggctggctccggtggcactgcctcggggctgcatgtacatgtgtgtgcatgtgtgtgcatgtgcgtgtgcacgtgtgtgtgtgcccgtgtgcatgtgcccgtgtgcgtgtctgtgctgtgtgtgtgtgcatgtgtgcgtgtctgtgcgtgctgtgtgtgtgcgtgcatgtgtgtgcacgtgtgtgcatgtgcacgtgtgcgcacccgtgtgcatgtccgtgtgcacgcgttgtgtgtatatgtgtgcacgtgtggatgtgtgtgcatgtgtgcacgtgcgtgtccgtgtgcgtgcgtgtgcatgtgtatgtctgcgtgcgttgtgtgcatatgtgcgtgcatgtgtgcgcgtgtgcgtgttcatgtgctcgcgtgtgcatgtgtatcgtgcacgtgtgcgtatgtgcgtgcatgtgtgtgcatgtgtgtccgtgtgcgtgttgtgtgcgtgtgtgcatgcatgtgtgcatgtgtgtgcgtgtccgtgtgtgcgtgtttgcgtgtgtgcacgtgtgtgcgtgtgtccctgtgcacgtggtgtatgtgtatgcatgtgtgcatgtgtgcgcgtgcattcgtgtgcccgtgtgcgtatgtgcgtgcatgtgtgctggccgggcagaggggctcctcacttcccagtaggggcggc

SEQ ID NO: 12340 - DNA, 924 bp, Artificial sequence
  DNA replication origin
gcaggggcattcatgagcttcgctgcagtcgtgcgtgctttggacgttttccgtgccctcctcagcacacgggctgcagatggggagtggcgagagaagaagggcagcagaggcaccgtgggcgggtcagtgtgtgctgaccgtgggcagccaggatgcttacggctccaggaccatggggaggtgggggcactctgtgtgcatgggagggtctgggtatcggaaggccatcttggatccccgcttaggccagagtctaaggtgtctatggatgccttgcccagggctcttccatcctgagcgctgggcccctccccgctcttcccctgtgtggctgggtgactgttgggtgccacttgcccggagctgcttggctctgtcctgcagcctccccacgtgtgccgaccaggtgcagagcctgtgctgcggccgtgcggcctgggcctgggggtgcagtcttgggtgccgaagccctccttctaaggtgtcctaggctggctccgctcaggtgggtgagtcccacaggggcaaggctgcctgttgtatgtggtgtcgcccgcaggcatgccattccaccttgtcccatgctggtgacaccgaatgtggtcacttgactgaggtgggcgtgcatcataggacttccctggcaatgcgtcctgtggcgacggtgccctcctgacccctcccacccggtgcctttgcgtctcctgaacctgttcctgcccagggtctgtggaaacagtggcttctatgaagactcacagtggtacttctcctccctctcccctttcctccctctcctgcctgctttttggagtgtcgctgtggactcatcagtttttgtggtttttaatgtattgtgtggccagtgggagccccccagctgcccccaccagtgcccaggcccacctcacatcagctttt

SEQ ID NO: 12341 - DNA, 1120 bp, Artificial sequence
  DNA replication origin
cacaaaaactgatgagtccacagcgacactccaaaaagcaggcaggagagggaggaaaggggagagggaggagaagtaccactgtgagtcttcatagaagccactgtttccacagaccctgggcaggaacaggttcaggagacgcaaaggcaccgggtgggaggggtcaggagggcaccgtcgccacaggacgcattgccagggaagtcctatgatgcacgcccacctcagtcaagtgaccacattcggtgtcaccagcatgggacaaggtggaatggcatgcctgcgggcgacaccacatacaacaggcagccttgcccctgtgggactcacccacctgagcggagccagcctaggacaccttagaaggagggcttcggcacccaagactgcacccccaggcccaggccgcacggccgcagcacaggctctgcacctggtcggcacacgtggggaggctgcaggacagagccaagcagctccgggcaagtggcacccaacagtcacccagccacacaggggaagagcggggaggggcccagcgctcaggatggaagagccctgggcaaggcatccatagacaccttagactctggcctaagcggggatccaagatggccttccgatacccagaccctcccatgcacacagagtgcccccacctccccatggtcctggagccgtaagcatcctggctgcccacggtcagcacacactgacccgcccacggtgcctctgctgcccttcttctctcgccactccccatctgcagcccgtgtgctgaggagggcacggaaaacgtccaaagcacgcacgactgcagcgaagctcatgaatgcccctgcacacacgcagtggggcagacaccggttggccctgccaggccctgcacactcacgggaccacgactgctcctcggatttccagggtcaaatggggtccagtcaaggaagggctgtgcgttctgcttctgcgcttaggcatatgattaaacacatttcataattagatatgatcattgcatctgagacacagagctttccaaaacggtctgtgggctgaagttactgcttccctaaacgtctgaggggcaacaccagtgccgccagctaggcctgca

SEQ ID NO: 12342 - DNA, 1455 bp, Artificial sequence
  DNA replication origin
gaggaaggcgccagacgctcgctgacaggtcctgtgctgtgggacacagacaagggtgcgggggccgggaggcgtgatggcagcgggatgggggccggggggtgtcacggcagcggggtgcggggtcgggggagtgacggcggcggggtgcggggtcggggggcgtcacagtagcggggtgagaggtcgggcgtgacggcggcggggtgcggggtcgggggcgtgacggcagcggggtgcggggtcggggcgggcgtcacggcagcggggtgcagggttgggggaacatcacggcagcagggtgtcggggtcgggggtcacggagcgtgacggcagcggggtggggggttgggagtgacggcagcggggtcggggtgtgtgacggcagcggggtgaggggtcggggggcgtcacagtagcggggtgaggggtcgggcgtgacggcggcggggtgcggggtcgggggcgtgacagcagcggggtgcggggtcggggcgggcgtcacggcagcggggtgcagggttgggggaacatcacggcagcagggtgtcggggtcgggggtcacggagcgtgacggcagcggggtggggggtcgtggggagtgacggcagcggggtcggggtgtgtgacggcagcggggtgaggggtcgggggcgtcactgcagcagggtgcggggtcgtggggggcgtcacggcggcggggtgcggagtcagggggcatcacggcagtggcggctttgaacaggcgactttcaaggactttcttcgctttctccacggagcttctgttttcatgagaaccaaatatgggctggggaaggaaaccacagtaaaaaaagtgtctcaaggagttgtgagaaagtaagaaagctctacgatgttgaggagcagcaggtcgatgctgtggcagattccagcgggattagggggtgggaagcagagcctgaggggcggcgggagctcagctggggcgccggaggagctgcctgcgcggggagtagctgccggccacttgtctccgaaacgggagtggaatgcggtgaggaggtgaggagggagggcagtgttgcttgaaagctctctgcccttcccttccgctgccctctggtcattgtatgtattttgaaattcacaccgaaggagggtgtaaggtgttcctgtgtgtgaagctgcagagtgggtgagaaagaggccagaggagcgccttcctctcctgctgccagtcctggttttcaggacctggttttggtcggtgggcctaggacattttcagatccttctagagacaacagaatgacagtaagggaacgttgtaacaactttatgccaatactgggcacattgttttaagatacagattaccatactgacccaagaagaacttttgaaggctctgtcagtcctgtaacgattaaagaaattgactccaggccaggcgcggtggctcacttgag

SEQ ID NO: 12343 - DNA, 1798 bp, Artificial sequence
  DNA replication origin
tcagccgctggagctgggagtggggcgccctggagagtggcagccccgggctttggtgactcagactctgctgttcctacctgaggtcaggagggtttttttttttaataaatgtgacccgggctgggcgcgctggctcatgcctgtaatcccagaactttgggaggctgaggtgggcggatcacgaggtcaggagatcgagaccacggtgaaaccccatctctactaaaaatacaaaaaattagctgggagtggtggcgggcacctgtagtcccagctactcgggaggctgaggccggacaatggcgtgaacccaggaggcggagcttgcagtgagctgagattgcgccactgcactccagcctgggtgacagagcaagactcctactctgtctcaaaaaaaaaaaaaaaagtgacccgatttgttgtgcggccttggtcagcttcaagagccctaaaacggttgtttcttttcctttttttttaattttttttttgagacagaatctagctgtgtcacccaggttggagtgcagtggtgcgatctcggctcactgcaacctctgcctccccagttcaagcgattctcctgcctcagcctccccagtagctgggattacaggcgcctgcctgtaatttttgtatttttccccggctaatttttgtatgtttagtagagacaggattttaccatgttgaagaggctggtctcaatctcctaccttgtgatccgcccaccttggccttcctaagtgctgagattacaggcgtgagccaccgcccctggcctaaaatggctgtttctaaccacccgtctagcttgtcattgctcagatggcctaggaaccacacccctcccgtgtttggtcctcaggagaattcagtgaggccagaggacgggttgtgttggatggaggtggcggcaaggctgctcctgggatgctgcagggcccctgcacagacctttcggttcttggtccattctgcgccctcccatggcccacacatctgcagtcacaaggaggagccccccagctcacacgtcctcccgctcaccacacggggcagccaccaggctggagggacgtctgtcctgcgctcagccctgcacccaccctgggctctgcccaccttgccctctgctctctgatctgtgagaggaggaaggccagagctgatgacacatgggcgggtccctcgagcggctgctcggcaggctgcatgacatcccaggcgcgggcctcacctccccagctgctgtgctgtttcttcttcgtctcctcggtgcccctcctggccttggacacctgcgcgacctcagagcatggggccggggccatcggacacagacgccttagggatttgcaggttcttgcacagcagtgtttctgaggaaggcgttttttggggtgtctccaagtctcccagcgctgcttccttgccccccgccccgccctgctgtcatggtggctgtggtcactgagcacctctgatttgccgagggccgtgtgctgccgtctacgccgtctggttgtagttgatgcagtcctgtcccctgggttccgttgttgtgattgtccttttgtagatgaggaaattgcagtttagaaagcacctgttggaggggcctggcgggtctctgcaggggagggaggaaggcgccagacgctcgctgacaggtcctgtgctgtgggacacagacaagggtgcgggggccgggaggcgtgatggcagcgggatgggggccggggggtgtcacggcagcggggtgcggggtcgggggagtgacggcggcggg

SEQ ID NO: 12344 - DNA, 1225 bp, Artificial sequence
  DNA replication origin
acacaccaccttttccctctgcagtactaagctggctgcctcctaccagggctagtttgaattttcctaggtcacacgggcaagccagacgctgcttacgtgcattgagtgtggtgtgagcggcttcagaccagattcctgtcttctttacacaactctaggttttctgtgcctgttttcggtgagcacagaacaactgaaggaagcgcgggacagacacaagggcgggcctcggtgccacggctggccttgggcagagggaaatgctttgtgtactttctctgggaagcagcagccccagcgcggcctcggcgtcctctgccgccaactgctccgtgaccgctgggcgtgtgtgcggggacatgggagcaacttcacagtggtgggaagtttctctcctaaaacgaaagcttctctatactacagattggccccattaaataaaagaaaatacggtgtatttttacagcgtttgggattggaaatgactgagattcacggtggctctagtcctgtctcctgaagacggagctggacgaggtctgcggacagtcagaaaacacgtcagggttttggctcagctgccagatatgcagctatggtgggatttctgcggcagggcaaggaagtggagacagttcgcgtggcagagcacagcgggtgccctatagtgggcacgcctggagagcgtatattttcacagggcccgaaacctgaatggaggattctttccaccagctgcggggtgggggggggctcaggcacatcagttttcccacccagaagacgaaggcctgcgaagggggccccatgaggcctgggaagggggccccgtgagacctggggttaaatcttccacagcaagcagggaccccagccaggctctgcacaaggcaggcgctgcgctcaggtgggagtcctgtgagatgctcctgcaccccacactcccgtgaccacaggcgaggcctaacgccccccacgccggttcatctcgtctcctcaaactcccaccaagatgctcacgacagggcccaaatgcactcccggggggttggctagtctgcaggatcacaggctggcccagtgaaaacctgggcttcgctgccttacaaccatgcagaactcatagccaggccatgtgcccacctgcccactgggaccccgggacagtgcctgctccagacagaggctgggagctctgtgaggggcacatggagtgaagcag

SEQ ID NO: 12345 - DNA, 986 bp, Artificial sequence
  DNA replication origin
cctcagcttgtccctgaaggtctccccgagaaagctgtagatgagggggtttaggcagctgttggagaaggcggcgaggttgacaatgtggcccgtgagggggtgggcatggcggaaagactgcttgcagggagcggccccaggctgcgtccgctgcaggaggtgcacgctgatgaagacgttctccggcagccagcagacgaagaagaccagcaccaccgcgaggatcatgcggagcgccttctgccgccggggccgcagcccacggtgccggtgcgccctgaccagcacccggacaatgagggagtagcacaggccgatgatggcgaagggcacgatgaagcccagcgtgacctcgagccactgcacctcccggacatccgcgaaacagaagcaggcctcgtcggtgtgctgcaggtgcacggcggtgaagggcaccagcgtggctgacacggatgccatccagatgaggccacagctcagccgggcgtggtgcttggtgcggaacaggctgcagcgcatggccctggccagggcgatgtagcggtcgaagctcatccaggtgaggaagaagacgctgctgtacatgttgacctgcaggaagagcgacatgaaggtgcacaggacggcgatgtcgtagtaccgctcgtgcaggttgaacacctcaatgagggagtcggccaccaggatgaggtccgccaccgccaggttgatgaagtacaggtcggggatggtcatcttctcgcggaagctgatgttcaccaccaggatcaggatgttgcccacaaagccgatggggaagaggaagatggtgtagaggcacgagaggaacaggccgatcacgtactgctggtgctccgagagctcacctgtcccattggccagggcggtgcccaggagcgggtgggacaggttgagctcgggggaggtggtgttgggggccgcaggctgcgcggtgcctgggtacatctccaggcccacgcccc

SEQ ID NO: 12346 - DNA, 880 bp, Artificial sequence
  DNA replication origin
acactggagacccgcaccccgggaggaagcagaggagggctgtgtcccacactggagacccgcaccccgggaggaagcagaggggggctgtgtcccgcactggagacccgcaccccgggaggaagcagaggggggctgtgtcccgcactggagtcccgcaccccggggggaagcagaggggggctgtgtcccgcactggagtcccgcaccccggggggaagcagaggggggctgtgtcccgcactggagtcccgcaccccggggggaagcagaggggggctgtgtcccgcactggagtcccgcaccccggggggaagcagaggggggctgtgtcccgcactggagtcccgcaccccgggggggaagcagaggagggctgtgtcccgcactggagtcccgcaccccggggggaagcaggggagggctgtgtcccacactggagtcccgcgccccgggaggaagcagaggggggctgtgtcccgcaccccggggggaagcagaggggggctgtgtcccgcgctctgcggggaagcagaggggggctgctctccttggcgggccctgtgggcagctttgcacctatctgctgcggactccacgaatctcacggcccaaacgcacgggtgtgctgacttgtcaactgggggttcccatgaggcgggggcagtgcaaatctgcctggggttctgattctgtgcggatggctttctatccaccccagcttccctgccatgtgtctccgccagctaaaaggattttgtacctcccattttaaggacaagtggctctcggctaggagggcagttgagttccactctctgccgcctgagtgtctgagatcacccgggttgccgtgtcactgctgacacacacgccccta

SEQ ID NO: 12347 - DNA, 1073 bp, Artificial sequence
  DNA replication origin
gcgcgaggtcctctgtctcctgtgggcacccgctcgcctctgcgcttggggcagatttgcgtagcctccgtgtctgggcgtggagggcccgggagaaggtgccggcattggtgtcctccccacgctgccctccggctcattactgtagccctggacgcagcccacggcccggcgaggctgcgctcgcactggcatttgtggagagagcggaggtagttagagtctgcccgtgaggaggtgaggatggaggtggttgcctggtagacagagagatgtctttgctggcatctggaccgaaagtcacccgtggcgccgagacgcagaggcacgtgggaatcgggaagctgtgctgccccagggcccggcgggcgggaagggctccgccgcccacggaggggtgagtggggagggcccggcgggggaggggaagggccctgctggccatggaggggtgagtggggagggcccggcgggcgggaaaggctccgtcgcccacgcagaggtgagtggggagggcatgtccacctgttccgtgttcgcacctgcagactaaactcaccgcaccccagggtgtggagcgactgcgtgctgagctgcaagtgaaatggagtgttacactgtagcctttacgaaaatgagcagtgaaagagttttttatatgcttttaggaaccacgcaggaatggggggcctcaggggccacgcgtgtcggctggattcccaaggtgatcttcaggccggtggttttcagcctgttgggattaggaccacttgaagggtcttaattcttttattggattaaggtattttaaaattgtttaaaacaaatacatgcttgtcatgaaagtttaggtaatgcagatatatggaacttctgtcaatatggtggattggtcaacatgggaaatcgtcccttctgcctcacacacataaaaatactggaagaggctgggcgtggtggctccgagcactttgggaggctgtggcgggtggatcacctgaggtcaggaatttgagaccagtctggccaacatgttgaaaccctgtctctacaaaaaatagaaaaatgagctg

SEQ ID NO: 12348 - DNA, 1604 bp, Artificial sequence
  DNA replication origin
gtccgtagagttgtagtgatgtcatcatcctgcgtggacgtcggtgatggaagccggtccgtagagctgtagtgatgtcatcatcctgcgtgggcgtcggtgatggaagccggtccgtagagctgtagtgatgtcatcatcctgcgtgggcgtcggtgatggaagccggtccgtagaactgtagtgctgtcatcatcctgcgtgggcgtcggtgatggaagccggtcctagaactgcagtgatgtcatcatcctgcgtgggcgtcggtgatggaagccggtcctagaactgcagtgatgtcatcatcctgcgtggacgtcggtgatggaagccggtccgtagagctgcagtcatgtcatcatcctgcgtgggcgtcggtgatggaagccggtccctagatctgtagtgatgtcatcatcctgcatgggcgttggtgatggaagcctgtccgtagagctgtagtgatgtcatcatcctgcgtggacgtcggtgatggaagccggtccgtagagctgtagtgatgtcatcatcctgcgtggacgtcggtgatggaagccggtccgtagaactgtagtgatgtcatcatcctgcgtgggcgtcggtgatggaagccggtccgtagaactgtagtgatgtcatcatcctgcgtgggcgtcggtgatggaagccggtcctagaactgcagtgatgtcatcatcctgcgtgggcgtcggtgatggaagctggtcctagaactgcagtgatgtcatcatcctgcgtggacgtcggtgatggaagccggtccgtagagctgcagtcatgtcatcatcctgcgtgggcgtcggtgatggaagctgtccctagagctgtagtgatgtcatcatcctgcatgggcgttggtgatggaagcctgtccgtagagctgtagtgatgtcatcctgcgtgggccttggtgatggaagccggtccgtagagctgtagtgaagtcatcctgcgtgggcgttggtgatggaagccagtccctagagctgtagtgatgtcatcctgcgtgggcgttggtgatggaagccggtccgtagagctgtagttatgtcatcctgcatgggcattggtgatggaagccggtccctagagctgtagtgatgtcatcatcctgcgtgggcgtcggtgatggaagcgggtccgtagagctgtagtgatgtcatcatcctgcgtgggcgtcggtgctggaagccggtccgtagagctgcagtgatgtcatcatcctgcgtgggctttggtgatggaagccgtccctagagctttagtgatgtcatcctgcgtgggcgttggtgatggaagccggtcctagagctgtagtgatgtcatcatcctgcgtgggcgtcggtgatggaagccatccctagagctgtagtgatgtcatcctgcgtgggcgttggtgatggaagccggtccgtagtgctgtagtgatgtcatcatcctgcgtgggcgtcggtgatggaagccggtccgtagagctgtagtgaagtcatcctgcgtgggcgttggtgatggaagccggtcctagagctgtagtgatgtcatcatcctgcgtgggcgttggtgatggaagccatccctagagc

SEQ ID NO: 12349 - DNA, 1260 bp, Artificial sequence
  DNA replication origin
cctgcctcggcctcccaagtgctgggattacaggtgtgagccactgctccaggccctgcatttttattcttgaaagtattttattatgtactgtatcatgtttatcttccacaaaaagatgcatatacatttaaatttgaaaatataaaaaattttttgacccaccaagttctgagtgttaaaatttctcttctgcattgagctgtgtttaccattaggagcatgcagttgatcgaaacagcataatagattaggaattttcacaaatgattctacataaagtgaaatctgacgacgcgcgcgtcacatcgtggtaagagcattgtcaccccgtgttaccaccccgtggaagggcagggctttccgtgtctgcggatggcacactcacctgtggatccgcgctgtcattgctcgagagaaagcgggtttccacaggctttgttcctgttctcatgtcagatttcagtgctgagcgcccttgctgacatagatgagtaaatgggaacaagagtagtgttgtagctttgttgcttaagtccttaaactttgagaccattctgtggtttgggcacatattttcaggatttattttaaagctctatcagtaagtgacaggtggactgggtccctgagttgtgcaggggcccggtgctggcttgttacatttgttcacttccccagggtgacaccagggttcaagctttgccattgattagtgctggaggtctcgtgcctggggcagtgtgccattgtgagatgtggggtggcaggtggccctgtttttcatgaaatgagaaaatggccgctgtgcaaagggaggtggaaagggggagcccacgtgggcccttcaaagcggcttccagcaggaggtgggcacagccagtgcttggaggggtccctgggctacccagccacggatgcccgggacggtggagtgtgcctggttgctgggtgtggcccagctcactctgggatcctgtccaatgaggcagtgctgagctctcggaaggtggtgtgaaatcacgtccaccacgtctgtggctgcaggcggctcagcaggcgtgggtggaggggagaagctggggtgtgtgcctagaggagctcctggctgtctcagagggtcgtctctcactgccaccccccgggcgagggaagccagacagcaccccaagcacagccagacagcttgtcctgggctctctagcagaacaccccaaggtcacccggaggctgaggcctggcaggtgcagaggtcctgcg

SEQ ID NO: 12350 - DNA, 1543 bp, Artificial sequence
  DNA replication origin
ccttggcaaccagctcctctccaagcaactctaggcctctagagatggcgtcagtagcccgcgcccggtcctggaaccgccccccgtgctgccgccgcttgccattagccggcggagagacggacgcagacctcgtccaatgggaggctccgcactcctgaaggcgggactaacgcttacctggggcgcgggtccctgccggaaggcggcgtccgcgacgcagctgttcacgcttaggtgggcgacgtgggcgcaggtgggcgcaggtaggcgcgtggggcggcggcggggtggccggcgggtcagggcgccaggagacccagagccccggggcgggctcccgcggggctccgccccctccacgtgggtgcgcggaggcccggcgcggcgcgaccgggcggcggccctggggtccgcggtgctggggaggctggtgcggccggtgcggccggtgcgtcccggcgcgggctccgacacccgcacccgcctctgggttaactcagcgcgggcgagtggaagggactcagctggctcctaggtttcaggccgtcagggcttgcagtggctctggtttcattgtctttctctgaagacgccctgattgccctccgaggctttcagctcccactttctctttttcaatttttgaggcagtgtctcgctgtgccacccaggctggagtgcaatggcgtgatcatagctcactgcagcctccacctcctgggctcaagccgtcctcccgcctcatcctcccaagtagctgggaccacatgcgcgcgccaccacacccggataatttttaaaaatgttttttgtagaaatggggtctcaccatgttacccaggctggtctcgaattcttgggctcaagcgatggatcctcctgcctcggcctcccaaagtgctgggattacaggagtgagccaacgcgcttggcctcactttccatcataagcatgctttccgtttccttccttccgtcattcattcattcatttttaaaaaacgttcattgggttcctcctgcactgttcggggcattgggctacagctgtcaacaagtggagacaagtctgtgatctagtgaacttccattctggaggggagagacagatgaacaaggtgcacagagcaggtgatggtaagtgccatggagaagatgagaacaggggttttgagaatggaaaggaagcaggaggaggagtgaggcaccagaacattccaggtcgaggaaacagcaggtgcaggggaaacagcagggagcccagtgtggctgcagccaatttgggaacagagagagaaagaggaggtgagttcccagagatgcgaggaggggccagggcagtcgtgtggaccttaccaagtggcaaggaccttgactttccctccaagtggaaggggacagcttgggaagttttttgagtggaggtgacacaccatctgatttaggagtttaaaagccatcgtgagaggtggtggcttggactgggtacctatgggatcttaagggagtcacattctgggtgtatttcagtggtaaacca

SEQ ID NO: 12351 - DNA, 1736 bp, Artificial sequence
  DNA replication origin
gtagctgggactatatgcgtgcaccaccacacccagctaattttctatttttatttttgtagacatgaggtcttactgtttgcccaggctggtcttgaactcctggtgtccatccatcctcctgactcagcctcccaaagagctgggattacaggcctgagtcactgcacctggccatgattcactttttttttttttttttttttgagctggagtcttgctctgtcgcccaggctggagtgcagtggcgcggtctcagctcattgcaacctctgcctcccgggttcaataggttctgatgcctcagcctcctgagtagctgggattataggtacatgccaccatgcctggctaatttttgtatttttagtagagatggagttttgccacgttggccaggctggtgttgaactcctgacttcaagtgatccatccacctcagcctcccaaagtgctgggattacaggtgtgagccaccgcacccggccgacttctaatgaacagaatatggcaaaagcctagggaagtcacttctgagattagggtgcaaggagactgtgatgtgcgtcttgtgtgtgcctcctcttgtgtgtgcttgcaccgtctaaggcaagccagctgcagtgttgtgagcttccttgtggtaaggcccatgtaccaaggaactgagggtggcctttgggcagcagccagcaaggctgaggcccttctctaatgaccttggaggactgagtccttacaatatccgtgtgtgtgagcttgggagtggatcattccagataagctttccgatgaaaccacaaccctggggggacaccttgaccacaacttggtgaacccttgaggcaaaggcacagagcttagccacgcccactttcctgaccgcggataccatgaaaaaataaatgttcttttaggctgctaaatgttgggttaatttgttatgcagaaaaaggaaccaaatacaatcttctaccagtaaggaagagtgcaccttctttgcttgtcacctttggattcctgaggcaacgtacatcatacttgatacggctgccaagcacttaacttactgggtgacttgaaagcatgcttttttttcttttttttttttagacggggtctggctctgttgcccaggctggagtgcagtgccttgatcatagctcactgcagcctccatctcccaggctccagcgatcctcccacctcagcgtccagagtatcaggaactacaggcacgtgccaccatacccggctaatttttatttttttaatttattttttattttttaaaacagagtctcattctgtcgcccaggctggagtgcagtggcacgatctcggctcactgcaacctccacctcccgggcttaaacgattttcctgcctcagcctcccgagtagctgggattacaggcacctgccaccacgcctggctaatttttgtatttttagcagagacggggttacggggtttcgtcatgttggccaggcgggtctcgaactcctgagctcaagcgatccgcccgcctgggcctcccaaaatgctgggatcacaggcgtgagtcaccgctcccggacacaagcattattataacactacccaccctgtgtattttttagcacctatcctgattttttaaattcagcacgaagtttaagtcctagccctgttgatcccaatagccgtagctcatccatttcgactccgagccgagctccataccctggaccct

SEQ ID NO: 12352 - DNA, 952 bp, Artificial sequence
  DNA replication origin
gtgaggagcccctctgcccggccagccgccccgtccgggagggaggcgggggggggggggtcggccagccgccctgtccgggagggaggtggggggggtcagccccccgcctggccagccgccccgtccgggagggaggtggggggatcagccccccgcctggccagtcgccccgtccgggaggtgaggggcgcctctgcccggccgcccctactgggaagtgaggacccctctgcccggccagccgccccgtccgggagggaggtgggggggacagcccccccgcccagccagccgccctatccaggaggtgaggggcgcctctgcccggccgtccctactgggaagtgaggagcccctctgcctggccagccgccccgtccgggagggtggtgggggggtcagccccccgcccggccagccgccccatccgggaggtgaggggcgcttctgcccggccgcccctactgggaagtgaggagcccctctgcccggccacgaccccgtctgggaggtgtgcccagcggctcattggggatgggccatgatgacaatggcggttttgtggaatagaaaggcgggaagggtggggaaaaaattgagaaatcggatggttgccgggtctctgtggatagaagtagacatgggagacttttcattttgttctgtactaagaaaaattcttctgccttgggatcctgttgatctgtgaccttatccccaaccctgtgctctctgaaacatgtgctgtgtccactcagggttaaatggattaagggcggtgcaagatgtgctttgttaaacagatgcttgaaggcagcatgctcgttaagagtcatcaccactccctaatcttaagtacccagggacacaaacactgcggaaggccaaggccgcagggtcctctgcctaggaaaaccagagacctttgttcacttgtttatctgctgac

SEQ ID NO: 12353 - DNA, 1301 bp, Artificial sequence
  DNA replication origin
tcacttcccagtaggggcggccgggcagaggcgcccctcacctcccggatggggcggctggccaggcggggggctgatccccccaactccctcccagacggggcggctggccgggcggggggctgaccccccacctccctcccggactgggcggctggccgggcggggggctgacccccccacctccctcctggacggggcgtctggccgggcagaggggctcctcacttcccagtaggggcggccgggcagaggagcccctcacctcccggacggggcggctggccgggcggggggctgacccccccacctccctcccggacggggcggctggccgacccccccccccgcctccctcccggatggggcggctggccaggcagaggggctcctcacttcccagtaggggcggccgggcagaggagcccctcacctcccggacggggcggctggccgggcggggggctgaccccccccacctccctcccggacggggtggctgctgggcggagacgctcctcacttcccagacggggtggttgccggacggaggggctcctcacttctcagacggggcggttgccaggcagagggtttcctcacttctcagacggagcggccgggcagagacgctccccacctcccagacagggctgcggcccagcagaggcgctcctcacatcccagacagggcggcggggcagaggtgctccccacatctcagacgatgggcggccgggcagagacgctcctcacttcctagatgggatggcggcggggaagaggcgctcctcgcttcccagatgggatggcggccaggcagagacgctcctcactttccagactgggcagccaggcagaggggctcctcacatcccagacgatgggtggccaagcagagacgctcctcacttcccagacggggtggcggccgggcagaggctgcaatctcggctctccgggaggccaaggcaggcggctgggaggtggttgcagcgagccgagatcacgccactgcactccagcctgggcaccattgagcactgagtgaacgagactccatctgcaatcccggcacctcgggaggccgaggctggcggatcactcgcggctaggagctggagaccagcccggccaacacagcgaaaccccgtctccaccaaaaaaaaacgaaaaccagtcaggcgtggcggtgcgcgcctgcaatcgcaggcactcggcaggctgaggcaggagaatcaggcagggaggttgcagtgagccgagatggcagcagtaccgtccagccttggctcggcatc

SEQ ID NO: 12354 - DNA, 1255 bp, Artificial sequence
  DNA replication origin
ctgggtccccgacgagagccaggtacggggccgggattgcgcagacagggtctgccgggggtcgggcctgccttgaggtcaggttgctcgggggttcggcctgtctgctaggagtgcggctgctgaaagtccggctgcttgctggaggtcaggctgctgggggtccggcctgtctgctggggaccgggcctgccggggtctggctgctgggggtccggcctgtctgctggggaccgggcctgccggggtctggctgttgggggtccggctgtctgctggggaccgggcctgccggggtctggctgctgggggtccggcctgtctgctggggaccgggcctgccggggtctggctgctgggggtccggcctgtctgctggggaccgggcctgccggggtctggctgttgggggtccggcctgtctgctggggaccgggcctgccggggtctggctgttgggggtccggctgtctgctggggaccgggcctgccggggtctggctgctgggggtccggcctgtctgctgggagtccggctgtctgctgggggccgggcctgccatcggggccgtagtaccgggtcgcacggggtcgttaacccgccagccgagtgacagccacgtagatgtgtgttttcttgctgcgggcccggcccgccagggtagggtgttggtttcctaggacgggtgctgtgcgtccagaacaaaatcatttggggattcacatcaaactcttgtgaattccttgaacaaaacaatttcggaacgcctgctgtgtgtcgggcaccgggagctaatagtaaagcagcggatctgtagttggaagctgtgggcgaaggagggctgggaaaggactaatgggcaccttaagtagcgggcgtgtaacatagagggaactggggagggtgggaatggctttaaactgaggcgggaggggataactagacgtttgccatgggcgagagtgttccagtcttaggcgacagtctaggaggcctccaggagtggggagagagctgatgggaaggtcaggaaaaggccccgggaggggctggtgagtactagatgacgggacctcgtgagccccaggaaaaggccccgggagggctggtgggtactagatcatggaggggacctcgtgagccccttgattctctctcgagtgcggtagtttcaccagctgtctgcctgttttccatagtgacttaacagcttgcgcttctccctgatcaactccaggttgatgtcatcgagga

SEQ ID NO: 12355 - DNA, 1189 bp, Artificial sequence
  DNA replication origin
aacttagggaaaagcttcaagaataataccgaaaatgtcagtgtccccagcacctagatcccccagttaaatccttttccatttcaccgcgctgccccccgccccctggacggttatgtggccgcgtggggttggctctgcccagggccgcggtcactgcacagaacgccctgcacgtaaggggctccgcctgggtaagaccccgcccagctgggcaggaggagggcgtgggcccaggacatggagaccagcctgggcaacatagcgagaccccatctctgcagaaataaaatattagccggacggtgcacggtggctcaggcctgtaatcccggcactttgggaggccgaggtgggaggatggcctgaggttagtgtctcacatgtctgtgtgaagagaccaccaaacaggctttgtgtgagcaacaaggctgtttatttcacccgggtgcagcccggctgagtcggaaaagagagtcagcaaagggcgatgggattatcattagttcttacaggttttgggatagacggtggagttaggagcaatgttttgcaggcaggtggtggatctcataaggtacattctcaagggtggggagaattacaaagaaccttcttaagggtagaggagattacaaagtacattgatcagttaggatggggcagaaacaaattacaagggtggaatgtcatcagttaaggctgttttcacttcttttgtggatcttcagttgcttcaggccatctggatgtatacatgcaggtcactggggatatgatggcttagcttgggctcagaggcctgacaggagttcaagaccagcctggtgaacatgacgaaaccctgtctctacaaaaataagaaatgaacgcagcatggtggcatgcacctgcagtcccagcctcttgggaggtggaggcataagtcagctgtgaatgcgccctgcactagagcctgggcagcagagcagacccttcctcaaacccaaaaagcgtcgtgccaaccagaccagatggtcgcctaatcaatagagaccatgcccaatcaggtaaggacagacacaaccaggcatgctttttcttgttttgttttttgtttgttgttttgagatggagtttcactcttgttgcccaggctggagtgcagtggtgtgatctcggctcaccggaaccaccacctcctgggttc

SEQ ID NO: 12356 - DNA, 1187 bp, Artificial sequence
  DNA replication origin
gcttgcccatcaaagaaagggtacaaaagtgggagagtctgtggtttcctcatcagcttagaccaaagccgtgacaggggagaaccccaaactgctaattaaatccattcagttttgggggtgggggaagagtaaactccttctctgtgagcaccaggcagtgggttctgattcccacgcaggccagcctggtgctgtgggtgagggcagctactgctggctcctgccccagtctcctgccagctgctcagacccggaatgtcagggacctggcacccgccaccccgggctagcactgtcctacaccctaacacagaatccagccacctagctgcctgaactccagccaagagggaccagagaggacggaaaggccgtcggtacctgggctttgtctacctcgcccctagatgaccacctgagtgagtgggaggggctggatgaggagcagggcccctccccgggggcaacaaccacctgagagagcggggatggcctggacagagggggggaaccctccggggggtgatgagcacctgagtgagtggggaggggctggacaggagcgcaaagcctcctggaggtgatggacacctgagagagtgggtagaggctggacaggagcagtggggcctcctgggggtgatgagcacctgagtgagtagggggaagctgggcagggaggggggccctcctgggggtgatgagcacctgagtgagtgggcaggggctggacaggagcgcaaagcctcctggaagtgatggacacctgagagagtgggtagaggctggacaggagcagtggagcctcctgggggtgatgagcacctgagtgagtgggcaggggctggacaggagcggcggggcctcctggtaaggtccgttgtgctttgctttctgcctggcctcagcagaagagtttggtaattgattgctataatggtggctgtttttagagtttctgttgctggcaaaaaaggacacagggacccttttcaaagaatattccagggagtagcgggagcttcggggatgcagggacatagtgtgtccggaggtggttcctgctggtgggttcgttgtctccctgacttcgataatggagctagggaccttcgcggtgagtgttaacagctcttaaagatggcacggacccaaaaagtgaacagtagcaaggtttattgtga

SEQ ID NO: 12357 - DNA, 1777 bp, Artificial sequence
  DNA replication origin
ggggcccgcgccggccaggcctggttaactggaaaacgatggagccgcgccccgcccccgcacttgcggcctaattgttttccctcgcccgtccccatctgtccctctccgcccgtgtgtgttttggcctttgtctcgctgccccgcgctgacaccctctttcaaaggccgcttctgtcgcccttcaccgatctcttctgccccattaacccatcggcacgaggctccggcaacaaaggcctgaaatcggatggacgcgcgcgcgctctccccaccgtccgccgcggtctccgcgccccgctcagctcggcccggcccggcccgatggggcgggaacggagctggccaggaaagtgctcgcggtggtggcccgagcccgagtcccgcctgcagaagccggagccttggcaggggccccgaagcagctgcaccccgggaacgcaccgcgcgctgcgaaagctaatccggccgcgtccccctttgtccctccctggatgtgaaactgtcgagtggggggcccagggctgcgggaggagagaggcaggtcctcctcggagcctggtaaacaaagaccaggaagccgggaaccgaacctggggtgggacctcttcggattccccccacctcccggagaaggccacgcagcggccgaacctcagggcgcgcagatgccagcgctcatgcccacgccgcgaaacccttggggcaggaaacccacaatcccgggagggagcagggtcctgaggccccaggcgccctctccaacccaccgccctcacggaggccgggacctccgtgcagcctcttcgactactgctcatgggagaggaaggggtcgaggctttccctgggacctgtgcagtagcttgacgcctggcagctccttggagagggctgggggcagaggggagcctccaagccgcctgtctctgcagtgcggcctgcatcttccctctcctgggcggaggggtcctcccagggctgccttcttctgaccgctgtggcaggaggaaggtggaggtcacctgagtgtcatcctacaggccacccgaaggtcacctttctctgaagcggggcttgttctctgaagcggggcttgggacctcagcaggaggcctcacattagtccagctggtgctgagatgcccatgggtgcttagccagtgtagtctaggagtccagctcagagaaaacttttttcacccagcactgacctgtttttattttctgtcctatgactctgcaatgctctctgcagagccatcctaggagacgccgagctggtccccgggaggatggggacaccttgtgtccaggctgggtgaaggggttccagtgtcaaactcagcctgggttatcttcttgtttttcaaattcattaaacgtttgaaattaggaagttgcaagaacaagaaagggcatagcaaggccgatgcagacctcccagtcccctctgccaggacctcccatgcctgatgggcctctccatgctccacccttgcgctccttggaccagaggcccaattctgggagttctgccatttcctgcggctgatctggtgaaaggagggtctttgtattattccttttagagggtctggtgggctctaaggattcagaaagagcagggtcttcactgtctccctatctccctttgactggggctcaagtcacatttcagtttttctgctactggagttttttttttttttttttttttttttttttttttttttttgagacggagtctcaccccgtctcccaggctggaatgcag

SEQ ID NO: 12358 - DNA, 794 bp, Artificial sequence
  DNA replication origin
gcacggaggtcccggcctccgtgagggcggtgggttggagagggcgcctggggcctcaggaccctgctccctcccgggattgtgggtttcctgccccaagggtttcgcggcgtgggcatgagcgctggcatctgcgcgccctgaggttcggccgctgcgtggccttctccgggaggtggggggaatccgaagaggtcccaccccaggttcggttcccggcttcctggtctttgtttaccaggctccgaggaggacctgcctctctcctcccgcagccctgggccccccactcgacagtttcacatccagggagggacaaagggggacgcggccggattagctttcgcagcgcgcggtgcgttcccggggtgcagctgcttcggggcccctgccaaggctccggcttctgcaggcgggactcgggctcgggccaccaccgcgagcactttcctggccagctccgttcccgccccatcgggccgggccgggccgagctgagcggggcgcggagaccgcggcggacggtggggagagcgcgcgcgcgtccatccgatttcaggcctttgttgccggagcctcgtgccgatgggttaatggggcagaagagatcggtgaagggcgacagaagcggcctttgaaagagggtgtcagcgcggggcagcgagacaaaggccaaaacacacacgggcggagagggacagatggggacgggcgagggaaaacaattaggccgcaagtgcgggggcggggcgcggctccatcgttttccagttaaccaggcctggccggcgcgg

SEQ ID NO: 12359 - DNA, 1275 bp, Artificial sequence
  DNA replication origin
ctcgggccaccaccgcgagcactttcctggccagctccgttcccgccccatcgggccgggccgggccgagctgagcggggcgcggagaccgcggcggacggtggggagagcgcgcgcgcgtccatccgatttcaggcctttgttgccggagcctcgtgccgatgggttaatggggcagaagagatcggtgaagggcgacagaagcggcctttgaaagagggtgtcagcgcggggcagcgagacaaaggccaaaacacacacgggcggagagggacagatggggacgggcgagggaaaacaattaggccgcaagtgcgggggcggggcgcggctccatcgttttccagttaaccaggcctggccggcgcgggccccacgccccaggctggagcggtgccgaagcgcagagcagaccggcttctgctgcgtgcgcgagtcctgcaccccggcctgcaccccgccctgacccctccactccgtgcagggggtgggggcagaagggggcaggggagagggagggagggatggatggatggatggatgagtgagtgaatgaatgaatgaatgaatgaatgaatccccctgcccgtaaataacagaagagctgcgtcccggtgccgggggttggagcggaaggaggggcaggggagagggagggagggatggatggatgagtgagtgagtgagtgagtgagtgagtgaatgagtgaatgaatgaatgaatgaatggatgaatccccctgcccataaataacagaagagctgcgtcccggtgcccggggttggagcggaaggaggggcaggggagagggaggggtggatggatggatgagtgagtgagtgagtgagtgaatgaatggatgaatgaatgaatccccctgcccgtaaataacagaagagctgcgtcccggtgcccggggtgggggcagaaggaggggcaggggagagggagggatggatgagtgaatgagtgaatgaatgaatgaatggatggatgaatgaatgaatccccttgacagtaaattacagaagagctgcgtcccggtgcctggagtggcggcagaaggaggggcaggggagagggagggagggagggagggatggatgagtgagtgagtgaatgagtgaatgaatgggtgaatgaatgaatgaatccccctgcccgtaaataacaagagctgcgtcctggcggctgaccgtagccaccccgtgtctccctgcgggatgacctgagagcgtttcctggaagccgcgcagcccctctcccggcctcca

SEQ ID NO: 12360 - DNA, 1369 bp, Artificial sequence
  DNA replication origin
aagttaattaaagctagcatctgacaatgtcactcggctgtagaaaaagggatttaaatgcagcgtctcccaggaccgcgtgtcgagggctgcttcccatgcagttgtttggaggaacagggcccgcgagggagggggcgggggcgggggaggggcgggggagggcgcgggggagggcgtgggggaggggcgcggggaagggcgcgggggagggggagggggcggggggaccctttaaagcgaccgctccagcggcagcaactgacaaggaggcgattatgaaattttgatgttgaaaatggggggcggggtgggggggtgggggccgagagcagaagccgagcgactccccgcggcgccgccgcagccgagggcctctgaagagctctcgagccgggcgggggtcgtcccggccgcccccaccgtcattaaaggcccctctcaaacactcgaggaggttttcggagcgcgagccggcccgacagcatgaaaaacacagggcgattgaaatgcgagcattgggacgcacggagccgccgcggcgcggactcgctcttgaggtcaagtgacggacggattgtatgcttcttcataataatattaattaaacaatttgcatgctaataaggtaacaattatcagggcctctgttgaaagattcgggttattacaacacgccaatctgaaggccaggggtcagagagtgagaggcgagcgaaatttcaactcaaattaacattctgtcagctccagaaaatgggataaataaagtcgaattaattcattataataaagagagatgggcgagggagctcggccggcgcgcgcccctcctctgccctccccccgggccgaatagattacagctctgtattcagaaacacgcgccgcgcgcattcctcctcgcgaacccaacagaagaccaggcgcttgtggctgctggcgaaatcgagtcggatggacggagtttacatttagtatttatagagacagaaattaaattatggcgaaaagtagtgctcttggcctctgacctcggaatgaatactcgcagcgttttcctagtgagactggaaacagggagggggctccccaaattccaggccgcctctcggtctcctggattggctgggcctggtcctcaaccctgcgccgtcccctcctctcccgcaaggagagacaagagggtcattgaagtcggagtcagcgtggatcggcccgtccacgaccttcagttaggaacagggccagactgtgggtccagtcgcagggacaggcagtcgtgtggcaggacggggtggccttgcgcccgccaacccaagcattcccctcctgagcgtttccggcaccccccaccctccccggccca

SEQ ID NO: 12361 - DNA, 1180 bp, Artificial sequence
  DNA replication origin
tcatctcgcgcggggggccggcggggccggtggcggggcgcgggggcgcgggccggggccggggcgggccagcggcgggaggcgcgggcggcggcggcggagacagggacccggagccccacacatgcttcgcccgcactccggcgctttacttatcaacatcaagctcccgataattagccgcggcccggggaatttgggaccaataagaagcgctaatcggctctgacgtcagaggcgtgctgggtgcagggaaacgttttccatatcgattgctaattatacctgacatgcacctcaataaacagtatcaggaactgtcacaacaagacgggctgggggcggggggagccggagggagggagggagggagggaggggccgcccagggccgggcaggcgcgggctggtgcctgggcccggggcaggggcccccagctagccccccacttcactcggggccggccccgagcccgcgcctcccgccagccgccgcctccccgcccctccgcaaatcactaatagatttccctttaaaacattcagcgccgtgttgtggggatttttcaccagaaatgctgtactctctgaacctttaaagtgatgttgctccaattacagagagacattgagcggcaaatagactgatccaataataggagattcatcatccgcttttccgaaactgtcacattgaatttaaaactacaaggcttctcatctcctcctctccggctgcaggcggcgggagaggaggaaggaggaggaggaggaggaggagggcgatcccgaaagagaagaactacagaatgtagcaccctgtcaataaagaggcgtaactaatgccctctctgattgactggcagtcgccctatctacaaagacagaggtggggggggctgcggaggctccccgacccccatccccataaagcccgggcgcagaggaggagagagggatggggacaggaggggaaaagtaactttggggtggggccgatccgcccccacccccttacacgctcgaataaagataaatacatccgctctgactcggcctctgaaggatggggctgaagcacccaacccatttattataattaaattatgttctcagagaagtgtcactcccttctctgctataaaatattgatagactcaaagctaaatcactaaaggata

SEQ ID NO: 12362 - DNA, 2517 bp, Artificial sequence
  DNA replication origin
cgctgggcggcgtggtgggcttcccctacccgctgggccaccaccacgtgtacgagctggccgggcaccagctgcagtcggccgccgccgccgcctcggtgcccttctccatcgacggcctgctcgggggctcgtgcgccgccgccgcctcggtggtcaaccccacgccgctgctgccagccgcctgcggggtcggcggggacggccagcccttcaagctgtcaggtaggcgcggcgggcgggagggcggggaggagtgcggctgggggcgggggccctggtccggccgaggcgctggggggcccggggctggcgaaggagagccggctcctaggcggccgtctctgcgcccccccccccggatccaggcggccagcgggtagcgggagggaggggtgggggtcgggcctgggccggtggctgagccgcgctgcgtcctgtgactgcccgcagactcgggggacccggacaaggagagcccgggctgcaagcggcggcgcacccgcaccaacttcaccggctggcagctggaggagctggagaaggcgttcaacgagagccactatcccgacgtgttcatgcgcgaggcgctggcgctgcgcctagacctggtcgagtcccgagttcaggtaaagacccggcgtcgctcccggatctgccatccggaccccaggctctgggcgcgccgggacgcctttgttccaggtggcgagatatcgtccccttgccgcgggcccgcttcgcgctcgcctgctggggaagagtggaggggtgggggttctggggctcggcccctcacggacagcggggtgggtaactgccccccaaaagcctgggcggcttgagaagggccggcggcagcacccgagtcaccagaacagcggctgcgtccgaaccgggaagcggcgtggtgggttggcggaggccgggccaagtgaggtctccaggcaggggcgaggaggggaggaggggccggcttggctccgacccggaggagagagggaaggggacccccccccgcccccgcaccgcctcaaccttccgcgcgaggctctgtcacccagcctggagcgaacgagtctgtttaccttgcgcctgcaaaatattcagatggaaacatgtatttattcatcgctttgcagaagggaacagctgaggaaggggaggcagaagcttaaacagttaacacattgagaaagtgggagaaaaaaaggtgtctgaatttttaataataaccccggtctcatctttttcttacgactgttttcccgtaaatttgctatcatttggagatggctgatggtattgttttaaaaatacagtgtcagcttggtggattaaaaattccaagatgatttgtgcataattaaatgtttccctggagcaaagaaatcctctttttctgcggtgggtgcggtgtggggtccaggtctgtggtgcggtgtgcggttgtgggtgctaggcgttgaggcagacgctggcaaaacgcctgtttatcaccaatagctttgtctaaaaaggtgtgtttgtcctgcgcttggacctcctctcatgacctcttctgcttggaaatcctttcatccaatttgttctaagtgtcttaagtgaagtcaagacccctccatgtctcccctaatacgataatgactaattcttacaggcaaggcagtccggaattcgcaccaaaaaaaaaaaaaaaaaaagtttaaagaaggaaaaggcggttacagcgttgggggagggctcggcttcatgctggagacctccccatggacaaggctccctgcgacaaggctgggcctgctattgtgcaagtctctgtgtggccgcgacaaagaatccgtattaacgcgccctcctggggagggcaggactgcccgagcttccgcggggctcagacggatttgactgtgtgtgtttggtggctggcggttgagtgagggtgtagcgctgccgtccccggatgtcctgtgtggctccccaggacaaggactgcagagaggatggaagagacgcgatgggcccagcctctccttccggcctggtggtcgcctcttgcctccccacctgccttggccggtggcccaggccaaggaccgcaggtttgggaaggctccgttggcgccctggcccagggtttgcggaaagaaggctgtgttagctgtgccctgggagggaggctgcagaggcccacccaagtacggctccccaggcccttccggacgagaagcacccatatttcccttcaagggattccgcccccacccccgaaatgtgggctttgacacagtctccaaggggccgaagacaggtgtggagggcggctgtggctcagcggtccaacggcaggatggtcagcgccaggccgggcgggctgcttagaacacgagccgtgagcggccaggaagggtgaacaggggccttgctctctagcctccggaccaggaacccgacgctctccgtccggggccagaccggccccccaagtaaggggcggctcccaggtccccgaggtga

SEQ ID NO: 12363 - DNA, 1629 bp, Artificial sequence
  DNA replication origin
ccgcagactggccagccccgcgccccgctcctcccagctcggggtttctgtccccacgcgccccctccatactcacgccagctctgcccggcccggtggttccccgcgcggggggttccgtccgggccccctctgggcggcgccccgggcagaggggcccacgaggaagggtctcggggtgcgggcagccctcggccacagccccggctcctcgtggccaccgtgtccggggtgcgccagggagccgctgggccccaccaaggcctcccttcgggccgccccttccctccagtccctccaccgctaagtgagataaacagaaccaagcgcccaatatgcggccccgcgtccacctccacgcccaccccggccgcccccgaggctgacccacccccgccccggagtcgcagcggcgggcagggttccgggccgggacatcggcgccgggagccacgcgcgcctcctccacgcagcgacgcctgagacctgggaagggcggagagggcccgggatcggggcccaagtccgcttccgggaaactgaggcccggtgctggagcccggatttctctgggccctggcggggaggaaggaacgggcaatgctgggcggggagctccctggctttagaagaaagggaaggagtagcgagggcgaggctcccctcctggccctggctctcatcccaaactcgccgttttcactccttgcgcgccccctccccatcctcggcccgcggggcaggggctgacccggctgagcagtgaattgggctcggtccagaggcgtcgatctctcataatctttgtttaatgttgcatttctaagctccgtattaagcagcggtatgggcggctggatatttagttgtatataatttacaccctgatcctgaatcgatccgacacctccggatggagtctctctcatttttcacgctccttccgaggtgccgaaataataccctctcattaggagactgcgaggcctggctaatttatccaaactgtcaggggcttgtacaacctcgggttaaaaataaatcagcaaagaaacaacacccttctctcctcactccccactccccacagcccccgccccgtccccacccccaacgaaccgatttatcaacaaaattaaaccagtctgcatctaaccgattgactagcaaacagcagtgttcagaagcttggtgttgtggccaaggcgcccgccagggcctggccatttattagacaacctgggcccgtgaagcaatcaaacccgacagcccagggggacctcctgccccgcactcctagaccctggccagcccagggggacctcctgccccgcactcctagaccctggccgcgttgtggaggaggcccctgctccccgcccagaggcaccacctagcagagaagagcagccgcctagaacagccaggaacccctacctagcgaagcagggggccgcgtcctccactcccaccctctcctggcatcggacgcggagggagccgcagtggaaggccgccctcaccgcggcctcggttcctaacccgttctgggaccaaatgacccaagaacaaccacagtggttcccattgcccaggaggcctcgctatatccctctgctgcccccctac

SEQ ID NO: 12364 - DNA, 1837 bp, Artificial sequence
  DNA replication origin
gcctccctcccgcccccagcacagcgccccccagctctcagccggtccttgcggccgcgggatcccagccccagcagcgggaaactgaggcccgcagcaccgatgcgcgtaaggcagctcggatggggtcagaggggcgggaaggcggaaggcgggccgcaccccccggaccctcaggacctggagcgcgtggagggcgtggaccaccccggatcccccaccaccgggcgtgtctgccaagggtgtcattgggcgccgcgcagaaggggcttccgaggacccgcccctcccccgcagccgtcagggcgctgacggaggcagctgcgcctgtttaactgggagccggttgcttggcaacccgaggcggctcattaccgcggccacagtgattaaccaaaaaagaaaaaaaaaaaaaaaaggaaaaaaaaaagagagaaaaatacaaggaagaaaaaaataggggaaaagcgggaatatgaaagtaaaatggattatttaattagctaattgataatcaacttctttttaattattcacttaattaaaaaagtgtaactacaacactgccctcatcaagctgcggttgcaccagcagggtttcaaagccgcctctccctccccttcctccgcctgcccctgggccgcttggggctggagcaaccttcctcgtccccagccatgtcccccacccttaggagggactattgaaaacatattcttccccaacagccgggacagctccacccactggtgtccagggaccttcccggaggggcctgggcactctgccctccgcctctgcctcagtttccccatttccaggacctgatttcggtgctgaggtgcgtgtaggcagggcagtttgggtccccgcctttgtggaactggtgttctgtgcagaaggcgggcgggcagttgtcccctggaaaacaggaaaggagaggatagtgtttgggcctcggcgccagctgtgagcacagcgggtgggcattcctcacgcaggcagccttgcggagcagggaggtccagcacaagggtgtgttccaaaggctccactggtggccgggttttgagtgggatgagaagctggaggatgctggggctggggggcgtggcgataccgtggtgtcactccatctccctgtggggcaggtgcttgtggggctgaggggagctgcctctcctagcactgtgctcccgctctgggccacccacatccaacgcccgcctccctgcaggtgcgaggccggcctgggcctctggctgggccagctctgagggagctttccgtgggatggctgggcctctgttgcagttgcgaccaatgctgcggtttaaattctccctgggtccaatcctgcttccctcccctaagcctctcgcacacacacctcggctcaggctattcaccgggaaagccacgcggaggcagggcaggcagcgccccgccagagacccccggatggtggagatggtgcggtggagtcgggactgctgggggcacctgctgatgaggtgggagggtaaagccacgggggatgcgggtttctggacttgttcgggtgggcggggcgggaggggggtggggatgtggtggaggatttgggctgggaggggggtggggtgacctggcattgctctcagcacagtcccggtggtccccttctccttccttggcctcccctcttccttcatccccccgcccccgggttcctcccagtcccagattgtactttcccctatatcttccttcccacgctctccacggccctgaccctgggccaagcccccttaggctccttttaacctctgaaaagtcaacagtagcttcgtcacc

SEQ ID NO: 12365 - DNA, 1087 bp, Artificial sequence
  DNA replication origin
ctgaaggctggggggccttgcactgcccagatcctcattgccacacaggaggggctgggcctgaccctaatcagctcccagctactgaccagcgggccaacctctctgagccccggctttcccttctagaaaacaggaatgagacagggctcactgcacagggcccagtgagtggctcatgccccttggcggggaggcagggcagggtcccaggtggggcctggtgcaggcagggggaggggacacacagcagcacctcctggggatctgccacctcatgtgggctgggagcgggcaaggtttggggatccaggccccttccctgcagcaccctccgtccaccctggcccacccggtgccctggggcacagccaccaacccattggcccttctgttattctcgacccgtagggtgcatgggctgctgttctggggcaggagccgcaccagcctctcactgctgcagccctcaagctgtcctcggtgacagtccctggatggggcgacagtgccctggcacaggtggaactttcaggatgagctctgcccaatcccaccttcccacggaccaggagagacggagggatcaggcagcaggacccaacagctcagcctctgctctgcgcccctgcccgcacagggactctgtgctcagggagactccattatgctccaactgtgtaccgggcaccatcctttgtgccagacgcacagggggaccaagccaagaccctccccttatattggagttggggagccagagaatgagcaagtaagtaaacgaatataaactagaatgaaccccaagtaggcagaagtgctggcaaggtacggggaggaaatgagttgggagttcacgggccagggacgcagaaggtggctggtggcattttagctggggcaggcaggcaaggtgacatccggcagagacctcgctggagcacgggagcacgttacacggacacctgggggacgcgtgttccagaaggaaccacgcagacttaggcaggatgagctggtgtgcgtggggaaggcgggaggctgggaggctggggaggagcccctcgggcgcggtggaggtgaagtg

SEQ ID NO: 12366 - DNA, 1852 bp, Artificial sequence
  DNA replication origin
cccagtccccaaaggagcccacacccctgcagtccaggacttgaggcacctaccgccccgtcccctccacttgtccctggagaaagagcccagatgcccatcaggcaccccaggctcacccatccggcccaggaaaccaaggccagagagaggtgaggcggccacggtcaccggggagccagcggccaagctagggctggcacaggggagccggtgcatccagccctgccctgaccacgtgttctgaggctggatggggcaggagaaacaggaggtctgcagtgcggcaggtggcgaggacacggctgtgcccaggagcgtgaggagacccgtgacccctggtcaggtgcacggtcccctgcagacccagaccggcctcggcgcccacctcccctctccccgcggccgtggactctcccacttctcgccttctgtcctcgctgggagcagcggctcctgcgggtgcccggcctggcctctccagctgcctcagataatcgccctcgtaatcaccttccctcacgctgctcctttaaaacatatttccagggtgtttttcacggatagggctttgaatattcatctcagtgctgacaatttttcctgccttgttacggagagctggtgtcggtttttcattgtatctttggacagtcggtttattcggagccacttaaaggctcaaaagtgattctcttttataatttgagaagtttcatggaccgaacatcaaagtgattggctgggaatgttttctgctgctctccgtctccttctcctccctccctggcgttctccacctccgttttgctaaattattagcaagacactcttcagcccctcaccccagccttgctgaacctccaggccttggggaaggtcaggccctgcggtggttttggcctcggggggagggggtgatgccttttagtctggagttcctgatggactgggaggatggcaggggacggactgggaggatggcaggggacggactgggaggatggcaggggacggacagggaggatggcaggggcaggggaggatggcagggacggactgggaggatggcaggggacggactgggaggatggcaggggatggactgggaggatggcaggggcaggggaggatggcagaggacggactgggaggatggcaggggacggactgggaggatggcaggggacgggttgggaggatggcaggggatggtttgggaggatggcaggggacggactgggaggatggcaggggatggactgggaggatggcacgggcaggggaggatggcaggggacggactgggaggatggcaggggacggactgggaggatggcaggggacggactgggaggatggcaggggatggattgggaggatggcaggggacggactgggaggatggcaggggatggactgggaggatggcagggacggactgggaggatggcaggggcagggggggcttgcagagcatcagaggggctctcggcatggaaccttggacctgctgtgggtcccgccctgtctccagcctgcaagggccattttctcatctgtaaagtgggtgtcttggctcagagcagggccataaactcacacagtcccagtcatcaggcaagtctcctcgatgggcggtgccagctgggtttgtcagcagaagagcgctccatccatcatccatctatctatccatccacccacccatccatccatccgtccgtccatccatccatccatccatccatccatccatccatccatccatccatccagcagcgctgtgggcccggccgtgttctagggggtagggacgcggcagggaacaaacaggcaaagctccggccgg

SEQ ID NO: 12367 - DNA, 2187 bp, Artificial sequence
  DNA replication origin
agggttaggacgtaactcagtccatttgcacagtcgaggctgggctgggtacgagggtgacccatgtaagatctggagaaggaactcctctgggcagggaccatgggatccaccccacctgtccccagacctcagagctgatcgtgcagcagcccagccgggctgggtccaggagtgggcagagtagacacagcccccgagctcctgggtacacaaataaacatacttggtgcatacgagcagcttcaggcgcctggtaatgggcgctgcgttaacagtggagggggtcagtcacagggagctgcttcggccagggtgtgtcagatacggccccttggaggaggcggcacccacatacggaggaggcaccatgagggatctggtgagaagccctcccctcagagaactgtaggtgcagagggcccggactctgcccagcctggaaaagccccagtatggaggtgcccagggctgggagcagagggaggggggcggggatgtggtcagggagggcggcagggacagactgtgcagggttggggggagattgtgtagaattggggaacagattgtgtaggattgaggggacagactgtgatgggttagggggagattgtgtagggttgggggacagactgtgttggatttgggggagagaatgtatagggatagagggagattgtgtagggttgaaggaacagattgtttatggttggggacagattgtgtagggttgggggcagattgtgtagggtttttaggagggattgtgtagggttggagagacagattgtgtatggttggggggacagattgtgtatggttgggggagagaatgtatagggttggagggagattgtgtaagattagggagagattgtttatggttggggacagattgtgtattgttgttgggagggattgcgtagggttgtggggacagattgtgtagggtttaggggagagattgtgtaggattggggaagattgtgtggggttgcaggagagattgtttatggttggaaacagattgtgtagtgttgggagggattgtgtagtgttgggagggagattgtgtagtgttgggggagagattgtttatggttggggacagattgtgtagggttgggagagattgtgtagtgttcggagagattgtgtagtgttgggggagattgtgtagggttgggggagattgtgtagggttgggagagattgtgtagggttgggagagattgtgtagggttgggggagattgcgtagggttgggggagattgcgtagtgttgggagagattgtgtagggttgggggagattgtgtagtgttgggggagattgtgtagggttgggggagattgtgtagggttgggggagattgtgtagggttggggggacagattgtgtatagttgggagagagattgtttatggttggggacagattgtgtagtgttgttggcagggattgtgtagggttggggccatagatggtatagagttggggaacagattgtgtagcattataggaagagatgtgtaggattgggagagagttgtgtagggttggtgggatggattttgtagggttgtgggggacagattttgtagatttggagggatagatggtgcagggttgagggggacagattctgtagatttggagggatagatggtgcagggttgagggggacagattgtgtagatttggaaggatagatggtgcaggcttgagggggacagactgtgtagggctgggggacagattgtgtagtattgggtgacaaattgtgaagtgttgtgggggatagatcgtgtagcactgggggatagattgggttgggtatgggggagaggttgtgtagtgttatgggagatagactgtatagggttggggacagactgtgtagggttgcgggagagattgtgcagtgttgtgggagacaaactatattgggttggggacagactgcaaagggttggggatggagggtgcccctgccgcagccattctggacctggaagcctcacacctcctcttggcccattttccaggtcctgcctcttcctggaagccgttctgtcccctctcctgccccctctcttccactggttaactcttcctgcagaagggggtcagaggccacatgcctcctccctggaggtgaccttcaagcccctgtcccgctcc

SEQ ID NO: 12368 - DNA, 2913 bp, Artificial sequence
  DNA replication origin
cggtgcttcagccccttccctcaggacactgagcctggactcagtcccacccgccaggccgtccagagtggcccggtcaactgcagctgcctccatggccgggtgggctgaaaccaggacccctccccacaggccagtcaggagcaggcccccccacacacaccacagagcggcgtctaaggcccaggctgggctgccgcgcttccgggtgcatctgacggggactcacccggcccagggtgcctggctgtgggcggggccatgctggggacgctgcccgcagtgcaggggacagaacctgtccccaacgtttccagaggtgggcacggagtggaccctgaaggatgggggtgccccccaagcagggtagtggcctgggccatggcctcgagcagatgccctgctggggcaacggatgcccggtccacacctcaggactgcagggatggcccagaagggatggccagcaccattcagtgagcgtctgctgtgtaccacccaaagcacctcctagctgtcctccagcggggctcacatacccccaccacttcaggcctgcgggcaccccaggggcttctcctcccgtacgaaagaggaaactgaggtgggtggggggcgtggttccagggtgccaggctggaggactttggggcggcagagtccagggcagctcctgaagcccagccctatacccgcaccccatcccacagtcgcaccccatcctgcacctgcaccccgtccccaccccattccacaccctcgccctgtccccacacttgcacctgatccccacacctgcaccccgtccccaccccattccacaccctcgccctgtccccacacctgcacctgatccccacacctgcaccccgtccccaccccattccacaccctcgccctgtccccacacctgcacctcatccccacacctgcacctcatccccaccccattccacaccctcgccctgtccccacacttgcacctgatccccacacctgcacctcatccccaccccattccacaccctcaccctgtccccacacctgcacctgatccccacacctgcaccccgtccccaccccattcgacaccctcgccctgtccccacacctgcacctgatccccacacctgcaccccgtccccaccccattccacaccctcgccctgtccccacacctgcacctgatccccacacctgcaccccgtccccaccccattccacaccctcgccctgtccccacacctgcacctgatccccacacctgcaccccgtccccaccccattccacacccttgccctgtccccacacctgcacctgatccccacacctgcaccccgtccccaccccattccacaccctcgccctgtccccacacctgcacctgatccccacacctgcaccccgtccccaccccattccacaccctcgccctgtccccacacctgcacctgatccccacacctgcaccccgtccccaccccattccacaccctcgccctgtccccacacctgcacctgatccccacacctgcaccccgtccccaccccattccacaccctcgccctgtccccacacctgcacctgatccccacacctgcaccccgtccccaccccattccacaccctcgccctgtccccacacctgcacctgatccccacacctgcaccccgtccccaccccattccacaccctcgccctgtccccacacctgcacctgatccccacaccgcccatccggccggcagtgtctgtgggaggtggacagtgtctgtgggaggtagacagtgtctgtgggaggtggacagtgtctgtgggaggtaggcagtgtctgtgggaggtggacagtgtctgtgggaggtgggcagtgtctgtgggaggtgggcagtgtctgtgggaggtggacagtgtctgtgggaggtgggcagtgtctgtgggaggtggacagtgtctgtgggaggtgggcagtgtctgtgggaggtggacagtgtctgtgggaggtgggcagtgtctgtgggaggtggacagtgtctgtgggaggtgggcagtgtctgtgggaggtgggcagtgtctgtgggaggtggacagtgtctgtgggaggtgggcagtgtctgtgggaggtggacagtgtctgtgggaggtgggcagtgtctgtgggaggtgggcagtgtctgtgggaggtgggcagtgtctgtgggaggtggacagtgtctgtgggaggtgggcagtgtctgtgggaggtgggcagtgtctgtgggaggtggacagtgtctgtgggaggtgggcagtgtctgtgggaggtgggcagtgtctgtgggaggtgggcagtgtctgtgggaggtggacagtgtctgtgggaggtgggcagtgtctgtgggaggtgggcagtgtctgtgggaggtggacagtgtctgtgggaggtggacagtgtctgtgggaggtggacagtgtctgtgggaggtgggcagtgtctgtgggaggtggacagtgtctgtgggaggtgggcagtgtctgtgggaggtgggcagtgtctgtgggaggtggatagtgtctgtgggaggtgggcagtgtctgtgggaggtggacagtgtctgtgggaggtgggcagtgtctgtgggaggtgggcagtgtctgtgggaggtggacagtgtctgtgggaggtggacagtgtctgtgggaggtgggcagtgtctgtgggaggtgggcagtgtctgtgggaggtgggcagtgtctgtgggaggtgggcagtgtctgtgggaggtggacagtgtctgtgggaggtgggcagtgtctgtgggaggtgggcagtgtctgtgggaggtggacagccaaggccaggtcccctttgtggccactcctgaccccccagcccctcctgagcccaaggcgcaaggcaaacgcccaccgtcc

SEQ ID NO: 12369 - DNA, 1053 bp, Artificial sequence
  DNA replication origin
atcagctttttcaacagtgagaaatctgggcccattctcggcagtccactcagtctccataatgcagttgatctcctggcctcagttggacgccctcttcatgtgggcccggggttactgcccggccaccttcctactggggggggggagggagggagtgaggagggaagaggaggaaaggagggggaaggagggagaagagagggaaggagggagagggaggagggagaaggaaggaaggagggagggagggagggagggaagaggaagaaaggagggagggaggagggagaaggggggagaaggaaggaaagatggagggagggaggagggagaagggaggtagggaggagggagaagggaggtagggaggagggagaagggaggtagggaggagggagaagggagggagagagggagggagggagaaggaagggaagagggagggagggagggaggactcaccctgacatttgtaaaactcactcaatggcactttaaacaatggatggggacagggtgagggtggccaagagaagaatcaagaaatgagcgctcatggctggaccacactcatgagaggcatgcacagtggactcgctcatgagagccccacctggaagcaaaaggaggacaggcgagtccatggcgatgaaggcacagggtggaatactacgcagcactgaaaaggtgctcgccacagatccaggcaacagcacgggtgaatctcacaggcatccatgcagcaaaaggctccagatgccaaggagaacaagacgtgtgactccactaaggggcccgctcacgcctggtgatgaaatcagaagagccatcaccctgctgggggcacagaactggggagcaaagggggccttctagggggctggaatgttccgtttctccatctggggtttctccggtttctccctcagcgtgtttgagcctgcacactaatctcagtgagcccttgacatgtatggactttctgtatgtacctcctttaaaaaacaaaaacgtccagttggaaaccaagacctgccctcagtttcccca

SEQ ID NO: 12370 - DNA, 1352 bp, Artificial sequence
  DNA replication origin
ggctgaggtgcaatggcatgatctcggctcactgtaacctctgcctcccgggtcccagttcaatcaagtctcctgcctcagcctcccgagtagctgggatgccaggcatgcgccaccacgcccggctaatttttgtatttagtagagatagggtttcaccatgttggccaggctggccttgaactcctgacctcaggtgatctacctgctttggcctctgaaagtgctaggattacaggcgtgagccaacacgcctggcctggattaaagttttaaatgtaacattataatgatggaaacaagaccaggattctcccttcgtctctctgtggtgtcttttatacacttgagaccttgtttccgcatcttccctgatagccttccctgtcctcactggatgaaaacctctgtatgccggccctgcctgggggctgcccggggcccagcagggagagtggagggggcaggagatgtgggctggggccttctatgtgcagtgaaggtccaggcaccgtttagagctgggagtgaagaggggtgtgggtgcttctgtgaaggatctgggtccagatccagagccgggcgcagtggctcacgcctgtgatcccaggactttgggaggccgaggcgggcagatcagctgaggtcaggagttcgagaccagcctggacaacatggcaaaaccccatctgtactaaaaatacaaaaattagcctggtgtggtggctcacgcctgtaatcccagctacttgggaggttgaagcaggagaatctcttgagtccaggagatggaggttgcagtgagccgggatcgcaccactacactccagcctgggtgacagagtgaaactccatctcacagaataaaaaaagaaggacctgggccctctctggggaggctatggggccccagggcttgggaattctggaaagtccccagggctaatggcctcttggggagtcaccccaacatctgctttcaggggcctaggcgggatctggctgcagctggtgtcacccttggctggccagatgggcagggtctgcagaagtcccggggactggctgtggagctcagagccgttgctggtatctgtgggtggcctagaggccgtggggctgaggagcgggtgctgggttggctgcccttctgacctagtctctgcacctgaaggttgtggggacctttgtggggagagggcacctcttcaacctgaaccagcccgcagggcgggagtgagcggtgtaacggcactgagcctggagttccgcggggacccctgccgtctgtgaggcttggtgcagatcccgagtagccctgcgcccctcctgagcccctgccctgctcaggg

SEQ ID NO: 12371 - DNA, 999 bp, Artificial sequence
  DNA replication origin
gcccctccctcctccagacctcagattctctggttgtcaaatgagcacatccggcagtgcatgggcttctcacagacacacaggacggtggctggaatggtcctggggccgccagggctccctgcaggcagaagccacagggttcacttcagatgagctagaaagctggggaggggggtccagcgtctccacactccatcgctgctcctcagggggcccttcccactctaaggcatgaaacctggaaacagaccaaggctgggaaacacggaggggctcaggacatgggggcagagcctagggatggcctgctcggcctggggtcagggagggccaccagggccgggccttagacatggcaggtccaggggacaagcagggagaagggtgacccagggtgagggcgggggctccaaggctgggcccgcctcaccccggatcacccttctggggtggcctgaggttgcctgagctggggcccagggcgttccaggacggctaagaggcagggcaggcagggctgctctccggagcttctggcctggttcagtcctggctgcagctgtggggtccggggtggcctggtctgctctgctgtgtgtggactgtgcgggaaggtcccgctggggtctttggagccttgggaaagaagctgagggagaggctggcttgggggcaggaggcctggtgggctgggccattgtggttgagagccgggcactggggtgtctgggggagcaattttcctggcggcggcagctctgggaagccgaacccagaggggctgttagaccatcaagcacctcctccctgcacgggtggacaccagtttacacagtgccgggatgcccagatggaaatttatggtgtgcagggaagaacttctcacccaggttccagccagccgggtgagagaacaatatttcccatcgaggggacgtgcaaaagctcttaacaaatcgatgggctgcatttagtcaataaaccacagtgctttcc

SEQ ID NO: 12372 - DNA, 735 bp, Artificial sequence
  DNA replication origin
caacctctctggggtccccagcacagccgctccctgcttgcctgcacctccctccccagatccccgctgagcctggccctgcccctccagcgctgggcacctctcactcctttccagggacccccaggccatggcacagtgtcgcctggggacacacgtggtgcgtgtggcttttcagctgctcaacactcacttctgaggcccccgcggcgtggcacggcctgggcgttggatgcagcagtgaacgggacccacgcggggactcagggtatgacgggcagaggggtaggtggggtgggggcaggtgaggcgggggtgcccagcggtcagggaggggctctcgggaggtgacattcggccgagaccgagtgacggtgtggaacccgggcgcactgggaggcacgatccaggcggagggagcagccgtgccagggccctgaggtgggaggggccgggcggcctcaggctcagcgaggggctgaggggccaacgtggccggagtggagtgggcgaggggagggagcgctggccaggagagacaaccacgagccacacttggggctgttaattttctgggaaccacattcaaaaggtaaagaagaaacaggtgacattcatttttggccgggatacagcgtcttgctatggggcccaggctggtctccacctcctgggctcaagcgacctcccacctcagcctccaagtaggtggaacaataggaaatgaattttaat

SEQ ID NO: 12373 - DNA, 1441 bp, Artificial sequence
  DNA replication origin
ccgagaggcttcaggtggcctcagaggctacgtggtgtggtgaagggggcgctggcctaggcacctgggatgtgggccaggccagggagctgctttgcttggtaggtctcagtttccccatctggacggcagggtggcttcctgcctgtctgtggggtgctggggaggccctggcaaggcgcccagcgttgccagttgcaggaggatggctgcataacggcgaaccggggaggttgcctcctgcctgccacaaggcaccattgccgtgcgtgcaattaagcaccactgtttcatcagtcacaaaatccaaatggaaaaacagagacataaatacgcccgcccagggagctgccggaccgcatgtggggcccagaggaggcaagcatgggcgccgcgccatggagaggattgcacgtcccggggggcagcgcgggctgactcggggcagagggtgagcctggcctgcaggtcctgggcccggggggatgcagaaggggatgggtgagctctgaggaaccagccctggagggagaaaggctcggggtgggggtgggggggacactgtagggcggcccctcgggatctttgatttgttcagttacagactctcgcacgccccagaaagctcgggaaaaatccatggcctgaaaaaccaattcaagtttcacgacctgccagggtgccggccgagcctgcccgacagagggagcaggcagccctggaaatgggggtgcaggagcaggcagagaggcgggtcacatgccggcaccgtggggccaagctgctgcagaggggttcccggggacgtccggaagcgaaaccctgagaaaggaggctcacactgtgccccagattggcttcccgagcaacctcccttctccgggcctcagtttccccttctgcaacacagcgatcacccccgagcaactctggcttggtgtggtaggaactgggcaccaccagctgtgcacactgtgaagtagggggaggggggtctgcgggcgtcgcccgccgtaaccgtgacgacgacggctgtgaaaggcgccggctgttcctggaccggcgcagtgtgtttgcggctgttgtgtgacacccacaccccaccagacttgttttcaaacggcgttttgctagccaggccgaacgcggctgcgttcctgcgagcgtgccagcctctcccttctccctgccaacctcgggggtggcgctgtggcttccaaaatctcattaccgccaccatttcccgtcctccgccgctccctcctctcctgccctctctcccccactctctctcctttcggaggataaatttctgtagcagccaattacagccgtttgatgtgcgtaatgatggaaccgtggaaattggaactggcacctcggaggacagcggagggggaagaaacgcaacgtacatgaatcaagcgttttcttggagttt

SEQ ID NO: 12374 - DNA, 1585 bp, Artificial sequence
  DNA replication origin
gctagcgccacagcgggcactatgacaggggggacattggcatgagttgtgggagggcaggatctggggaggggcgacacacactggtggtgagttcagggcaactcccggggaagcgttcgcagaaactacagggtggttatttagttgagggccagcaaacaggtgtcacctctcttgcccttttcgcttgagaacagctttctggagcgctatgttaaggagtctgtggtcctgtctcaaaggcatccagtgattgattagtgatgtctgcagtcgacaagggcggtggctggggctgccatggtttcccagttggggctgaggtcaggctttgttgaagctgggctcactggctgtgcccaccccagccacacagacaggcctgtcccgacaccatggatgggcagggaggccatccttaccaaagcaagcaggggcctggggtggctggatttggggcacggatgcccaggtgggcttctccctgtaggctcggaatggggactgcagaggcagggacagcctgtctcatgagtccacccggggcaggcgtgagggacacagctgggctctggaggcctgggaggcctggggaggagtccttgagaaggaaccacgttgggggccaccacagggcagatgggtcccgggagggctggactggtggggaaaggtggccctggacaagtgagggggtgtctctcagcctcacgtgagcatccacggacacgtggggccccaacctgtctcctccactcctaggggcagctgcaggatccagggagggaggaggtgtctcaggggctcctggctttgtcctgggagtagggatggggctctgccaggatgtctcacgtcaggggctgctcggggcctgcgggacacctccttccttacttcccctggggttttacagaccaccgaagccctgcgggattttcacatccaggcagtgaatggagatgacacactttgcactgaacatgtactgtgtaagcctttcccggcgctgcgtggcttggaaggcactggggggcgggggtggaggctgggggtccctggactgagagcccctctcagccatgctgtgctgggcaacctgggactggccccttagcccctctgggtcttgattccttgtgaagagtttctgcccatcccttgagcctcagaacgtcctggggtgaagcacagcccctactcttgctgccctggtagaagacgaggcccagagaggggcagggcccgcccaaggctgcacagtgagtatgatctggaagcccccagggccggcaaaggggtgcagggtgctggggctgaggtagtccggggagctggccccgctgggatgtgctgggcctgagacagtcacagcttcccctgggctcctcttctctcatttctttcctcttcctgccccgcccctcagcagaatctctgcccccaacacctacagcccctgccctccttctgaggctgtggaaacggagtcacagggaggtggagtcaggcaggagatgtatccaggcttcctgactgcccgctccctcttcacgttgcttctcctgccatccggtgccca

SEQ ID NO: 12375 - DNA, 1606 bp, Artificial sequence
  DNA replication origin
ggtgatgccgtgggcccagggctggctgcgtctgccaggcatgccctgcattcaggcagaactcgagggaggactcatctccaaacagaagagcgggcagcaagtgccactcaggtgctgtgggtccttggtccctcccggccccgccggagcccctcccacctgcacagccaggtgccatgcaggcctggacagctccccactggggaaccccaacccggaccaggagatgggccccggcacccactgtccccttgtggcccctcctcctggtcacacccctgcccaggaggggagcctcacagtcattgacactatagtgagagtgagcacccttcccgtgcccctcccgaggacacccctcttggctctggctgtggaatgtggagctccctggaaacccaccggatgggaagggttggggacggggaggggctgcccagagccacatggtgactctgattagagttgagtctctgccttccagggctctggggagaaccggtgatatcagagttcttggtggggaaaatctgcccagggtagtagctccagagagcagagtcacagctgcatttcaggggtgggtgtgggtgcgtgggtgagtctatgggtgtgtgtgtgtgagtggatgtgggtgcatgggtgggtctgtggagggtgtgtgtgtgtgtgtgtgtgcttatgtgggtgcatgggtgggtctatggagggtatgtgtgtgtgggtgcgtgggtgggtctatggagggtatgtgtgtgtgggtgcgtgggtgggtctatggggcctgtgtgtgtgtgcctgtggtgtgggtgcatgggtgggtctatgggtgtgtgtgtgtgtgtgtgtgtgtgtgtggatgtgggtgcgtgggtgggtctgtggagggtgtgtgtgtgtgtgtgtgtggatgtgggtgtgtgggtgggtctatggagggtgtgtgtgggtgcgtgggtgggtctatgggtgtgtgtgtgtggtgtgggtgtgtgggtgggtctatggggcctgtgtgagtgtgtgtgtgtgtgtgtgtgtgtgtggtgtgggtgtgtgggtgggtctatggggcctgtgtgagtgtgtgtgtgtgtgtgtgtgtgtgtggtgtgggtgcaggggtgggtctatggagggggtgtgtgcgtgagtgcatgggtgggtctatgggtgtgtgtgtgtgtgtgtgtgtgtgtggatgtgggtgcgtgggtgggtctgtggagggtgtgtgtgggtgcatgggtgggtctatgggtgtgtgtgtgtgtgtgtgtgtggatgtgggtgtgtgggtgggtctgtggagggtgtgtgtgggtgcatgggtgggtctatgggtgtgtgtgtgtggtgtgggtgtgtgggtgggtctatggggcctgtgtgtgtgtgtgtgtgtgtgtgtgtgtgtgtggtgtgggtgcaggggtgggtctatggggcccgtgtgcatagggttgtgtaggaggtggggtatgtctgacacatagaccaggaacctgtgtttctttgtgtgtgtgtgtgaacgtgagtatacctgtgtccctcgggggtgccaggggttggggtgtcccgggcagctgaagactctgcatcc

SEQ ID NO: 12376 - DNA, 1196 bp, Artificial sequence
  DNA replication origin
acctgagtaaatgccctcctcccatatgtattcccttccttcatatataattcatagatctcttctcttgtttgcttgtttttctcccccactggtacatgagcttcatgaggtcagggggttttgcctgtttggttcattactgaacaatgaaccagcacgatgccctgcatttaaattgctcaatgaatgtgtggtgagtaaatagatggatgggtgggtggatggatggataaataggtgagtgggtggatggatgagtgagtggatggatgaatgtgtgggtgggtgggtgggtggatggataaataggtgagtgggtggatggatgagtgagtggatggatgaatgtgtgggtgggtgggtggatggatggataaataggtgagtgggtggatggatgagtgagtggatggatgaatgtgtgagtggatggatgaatgtgtgggtgggtgggtgggtggatggatggatggatggatggatggataaataggtgagtggatggatggatgagtgagtggatgaatggatgagtggatgggtgggtggatgggtggatgaatgggcgggcaggtggatgggtgagtggatggatgaatgtgtgtgtgggtgggtggatggatggatggatggatgaattgatggatgagcggatgggtgggtagatgggcagatgggtggatacagatggatgggtggctgggtggatggatggatgaatggatggatggatgagtggatgggtggatggatgggtggatacagatggacgggtggctggctggatggatgagactggatggatggatggatggatggatgaattgatggacgagcagatgggtgggtagatgggtagatacagatggatgggtggctgggtggatggatggatgaatggatggatgagtggatgggtgggtagatgggtggatacagacgggtggatggatgggtggatatagatggacgggtggctggatggatggatgagattgggtagatggatggatggtgggtggatggaatgaaattgaaacctgtacaaaaagactgaaaggtactgaggaagagaagaaaaatcaggagagggtggtatcccaggggctggggaaagagtgtctttaaagaaggaggcagagacaccaggcctgtcttcgtctgccttggctggtgcctgatgccttcaaagg

SEQ ID NO: 12377 - DNA, 1495 bp, Artificial sequence
  DNA replication origin
gaccggacctgggtgggggttcacctactccaggttcccattttgcagaagggaagatgaggcctggagatggatggtatcttaagcatgtttcttctcatctatctatatataaataatatgtaataaatatttatatattataaattataataaatatatatatattttttttttgagacaggatcttgctctgtcaccaggctagagtgtggtggcatgatcttggctcactgcaacctccgctttccgggttcaagtgattcccctgcctcagcctcccaagtatctgggactacaggcatgcgccaccacgcctggctaattttttgcattttagtagagacagggtttcatcgtgttggcctggagggtctgcatcttctgacctcgtgatccgccctcctcagcctcccaaagtgctgggattacaggcgtgagccaccacgcccggcctctcatctatattgatgatgtgttgacatcataggggccttgctggccagggagggactgcctctcctggagctagctgattgctgggggacagccaaggcccctgcgactttgcctctcgtgtgcaaatgcgccaaggcccaggctgcacccacctcctctttgggctgtcacgctcccgggtggatatttccctgccctaaatcacccaggccaggaaggtggtgacatgatgattatgatggaagtgacggtggctatggccgaccggaggccacccccgcagcccagcaccctccacagtgacccacacctccaaccccaggcctgcccgctgctcaccggccccgatccgcgtcttcccctcgcccctgcggcctcctgaccaagcctcttcccctcgcggcccttcatggcgcgccatgtgcccctcctcggggaactgtgagtgtaacctctcctttcagggtggttgtttccgtgtctgtcactctatcatccgagattcaaacaaacccaggtacaggttcccaggtggcaggggtggcccggggtacgtgtccatgcgagacagggctcagacacagatcagcttcctggcttcccacgggtggggctgaagtgggctaagcagaggcaggcagggacaagaggaggacacacgcgggcttctggggagagggcaggacccacgcaggcttctggggagagggcagggggctcaggtggagacacacgcatgcttcgtctgtactgggctctgaattctgtgcctctcctgcctgctggcgaccgggggccctgcctgactttgggcctggggcctgctgtgtgagccaaagagggagtgatgttctgagacctgggctttggatgctggaggccagcagggctggtgagggtggcagagccttggggccaagtcgggccttgggcgcccacctgcatgctccccttcttggttgagccatcgccctgcccaggacctgcttggcagcgcctgaaggtaacagagggctggcagtccaaatatggggca

SEQ ID NO: 12378 - DNA, 1125 bp, Artificial sequence
  DNA replication origin
catggccacagccagcctggtccacccgacattgaagcctccctgtcataattggcaattttgtcatatttattcacaacagatcgggctgtcaggagcttgtgggggctctccggaggcccgccgtgaaatcggtttgaaatggcgtgtcaggtttttctctccctgctgaagcgaccatctggctgatagactcggcgctgggatgatacgctgacccgcggaatcacggctaagccgctcccggggggccacatgccggctgggcagcccctcgtgccacacctgacctccctgtgggttctgggagccaggccacagggcaaggcctgggctgggcagggacaggggtgggcaccaggctgggagctccccgggtaccccactggccctctgtgctccactgggttggcaccttgccaccaccccgagcccacctggcagacagagtggggtgcagggtggggtgggacggctcctccccctgcagatccacagccgggcttgggcttccactgggagctggtgtgcacatgggtgtgtgtgatcctgagcacatgtttgcacacatgtgtggttgcacacaggccacacgacccagcgccccatgtgcaccaacagatgagggtaagagacattcgctgccataacaagcatccccaagtctcagtggctgcccagattcaagatggaatttcttgatcacatggcagttggggttgacccaagtggctttgctccatgcagtcattcaggcctccaggcgcattcctgtgagcagcctggacctgccagcctgtggtttgtgagtaccagtgtcactcaaatggggaggtggagcaggggaaagatggagaaggagttgcgtgcgggaaggtccgagccgactccagtgccttttgcttggttctacggatttcagcactgatgctgtggtcccacgtaggtgccaggaaggctgagaaatgtagtttcctgggagccctccccttctgtcatccaggctggagtgcagtggcacaatcgtagctcacagcagcctcgacctcctggtctcaagtgatcctcccgccgcagacccctcatgtaactgggactacaggcttgcaccactacacctggcta

SEQ ID NO: 12379 - DNA, 1856 bp, Artificial sequence
  DNA replication origin
ccaggcccagccgagaggccagcggagggcggccacgcagacaaaaagcctctgtttcagctcagctgcgcgaggccgatatttatggcgggctgggagtttaagaaaacaggggccttccgtccacgggcgagcgcggccggcaggggaagccggggcctaattaaatctgcacgggccggggccacagaggccgattgtgcggcccgaggatgttaatgtgcattttaaatatttattgtaactgaggtaggttatgaaaacagacatccttcctttcaacactctgtgcgtcagatttaggggcttgcctggctgctgagtgatttcacagcagtcggcgaggccgggaacccatccatcacgccccacgagaggccggcggaggggaaggattagcggctgatttatgggccggcagggcccgcgggcccgcgagtgggcagggcggccgcgcacctgtctggggcagtgggcgagacgggtgcccctggccagccccgggtgggaggcgcgtggaggggcccaggggtctccctgctgtctggcaggggcaggaacagcttcaactcagccaccttgccctctgcgatggctgcaggctccgggcacccctgcgcctctctgggcctcagtttccccatccagaacatgggagtagatgagccactaggcaagtttgccggaagcaaaataaggctttggcgtgttgcttgctgctggtaaacgctctcaggaaataaagccctgggatgctgcgtttgccaggttccgtggtgcaagcactccctcccagccgatgtccagctgccgaactggggtggccgagcacggagccgggcagagctgcggatagtcagctcccacggatgggtcccagctggcaggaggtggccccagcgcccctgcccacggccagcagccagcgtggggcctctccagccatagtctgacctcagcgaatgcttcccttccttctgcagcgagagtcctggggtctgggccgcatggtaggagggctgagggggacctgagtgggctgggctcccaggacccaggcgggctgccggcatcgggggtgagggagggcgggggacctgggggcaggagcaggggggagctggagggagggacacctggacaccaggctgccacgtccgggggccaaggagggtcctgccgccctccggggttcatgctccgtctgaggctcaggttgtggggtgtctgttgtcactggtggccacactaggcagtggctggcctgactgggggcagctggattctggggggactgggttgaggggccagcaaccaggcaggcagtgagcctggcagggagtagggagccccgtcgggcctcagcttgcaagcatctcttcaggagggctctccggggagaagggcctggctttctggccccgccgtcataattgctcagcagagtggcccttggggacgcttctgaggtctgcctcatccactcgaactcctgcgcactcagggcagggtcccctctcagggcctccccttgcacgccccccagagacggacagctcagcatcttccaggcagctccaggccaccctctatctcttgcccaagccctcagggctcccctcgggacacaagtggggcctcacccccacagggaagtgactgccgtcctgggcctacagcgatggtcccaaccctggccctgctctggggccgccccacctcccttcctcccgacacgcaatccactcctctgtttctcccgagcccctcaccacaggcctggtctcctgatctcccggtctgtcccccgcccccgtgggaggctcctgctgccctgggctcagtttgggtggggg

SEQ ID NO: 12380 - DNA, 1256 bp, Artificial sequence
  DNA replication origin
cggtagcgcgaagccgagtcgtcagggcccgtccagtgccctggggccaggtcctgggctaagcaccttcctgtgacccgctcagaggaacccctggcagtggggatggcgtcacccccatttgagagatgaggagactgaggctcagaggggggacgcggcttgcccgagtcacactgattgagaggggcagacctggattcgtctgcagcccaagctcttagagaccccggtgtggcctgccgggcagccagcttgtccacagcctcactcgtttgttccttccttccttccttcatttgttcatttaccaggagtttcttctctctccctcgctcccacctgtctttgttttttcaggcatctgactctgccgcccccgggaagcgcctccctggggccccaccccgctctctggctggtgcagaggctcctcctgaatggggtacccagccgagcacaggcctagaggcgggaaagcttctggggctacagggcacaggcaggggctgggaggggcagggggtggaggggacactggccttggttctggaggccccgaatgccaggacgaggctgcctgcctgtctctggtagggttaggagcaagaagcgggcagaatggagatgggaaggggctggggtggggccaggctggcatggaggatgccaggagttctccctggaggaggtggctgcagggagtcccgcttgccctgtcctctactgtctcggctccccaggaaggcgtctccgcagccccagcctcacagcctccaggaggtgcggaactggctgagcttttccaagctgtggacgggtcccccttgggccggcgaggaccccaggctgtaaacacacggctggaatcagcgctctgggcactgggctgaggctaaaggaagcgacccaggcctgccttctttggcctcatgtggtggggaaactgaggcccaggccagggctgcctaacacacaggtggccgagtgtgcagcccctggtacctgtgagtatggccctactaggaaatgaggtctctgcaaatgaccaggtgactgtggctatggggggttccgtctaaggtgacggctgtcctcaggagaggatgtggctatgggaggttccgtctaaggtgacggctgtcctcaggagaggatggggaagtcggactcggagacacagggaagaatgcttcgtaaagacaggcagagaccccggagcaccaggtctgcatggtgaggcccacccaggagtg

SEQ ID NO: 12381 - DNA, 1831 bp, Artificial sequence
  DNA replication origin
tagctgggactacaggcgcccgccaccgctcccggctaattttttgtatttttagtagagacggggtttcaccgtgctagccaggatggtctcgatctcctgacctcgtgatccacccgcctcggcctcccaaagtgctgggattacaggcgtgagccactgcgcccggccacaccttgccaatttttttaaagagtttttgtagagatgggggtcttactatgttgcccaggctggtcttgaacccttgggctcaagcaatcctcctgtctcaacttcccaaagtgctgggattacaggcgtgagcctctgtgcccagcttatatttacattttatgtataacagaataatatatgtagatatattacagacacatatataataaaatataatgatgtgtagaatatgcacaggtaatgatgtgtccacacgtactgaatgccggccccatgctaagggctagagcctacagtctgggtggaggctggctaggagtgtggggacagacatcgaataataataatacttcaatataatgcaggcctgcagcctgccctgtgctctgaagaagctcaggagcctcgagtggggctgtgaaaggaggatctggggaggtcagggagggcttccctgaggaggtgactggggagagtgggagtgaactaggggagcataggagggacggcagaggcagcagcaggctccagggccctgtggttggaaggaggggcagggcctggaggagggcgggctggggggcagtggggggccgctggggcatcatcaggggcagtggttggggtcgcgcctggaccccgagcactatacgtggccacagcacctcatgcgtccgagagtattctccaaagtcggccatggctgcatctccctcccacacacccgtctggaactggcctctgccatcgagagagagacctctgctttccctgcctggaagatgggcaggctcggtgcctcctttctaatggccagtgtgtgggggagggaaagctctgaggtgcccgagcggagtgggagaaggccctgccactcccatctgccctgggacccggcctctatgctgtgaggaggcccaggccacacagccctggacctcgtgacccgacgtggaagcgaagagcctttgcctggatccagcctccgccccaactcccagctgccgcagagacaagctggccctgccaagtccccggtttgtgagcaaaatcgatatctgaagccactgagacgtggagtgcttcaggggcagcacatctcaatgtcacattccgggccctccccagaggccccgtccaaagagcagggacctggagttgaagagttggagacccaccctgaccacactgccagcaagccgcgtctggacttgaacccaggaagcacccagccagccctcagggacagcagaggagcagggcggtgagaccccagcccaggggagcggagagcagcagccacgtacacacccccaggaagcgagggcccttaaatgccggccgtacccttggggcacctggatggggcggagggcagtgcatcgcgcatcgcagctggcctcacactgacctgcatggggggccctggtacccacgccctgggccacaccatggaccttgcagccccaagaaaggactctgaacactgcccctacctggtgacatctgggagagtcaggccggggggctaggcctggggtgcaaaggctttcctccctgggggccgcactcccccatcccctccctgggggccgcactctcccatcccctcagcctcctccatgtgctttgcaatccagaggccaaaaccctc

SEQ ID NO: 12382 - DNA, 2060 bp, Artificial sequence
  DNA replication origin
atgtatatgtgtatatgtatatgtgtatatgtatgtgcgtatatatgtatataagagagacttattgtagtcatcagctgctgtgatcgtggggctggcaggcaagtcccagatctgcacaaccaccctccaggaagggcagactggacgtgggtccaggagcagagctgctgtccacaggtggactctctccttcctctgggagctttggtgctgcccttactgcctgcagctgactagaccaggcccacccggctaaccagggtcatttcctggacctaaagtcgccggaccgtaggtgtccgccgtatctacagggcaccttgcacaatgccagggccagcgtttgctgcagtcagtttgttgccctgttcctcggatgctggcgttggatgccgcggtgaaccctcctgggggcactgtcctgacaggggagctgggcacctgccccccagagggctccctgaggaggctgggggcctgggaggctgggggtcggccaggtggtttcctctcagcaagtgggggaggtgaggtggtgcttgaccttggagggtctcggaggtcggaggtctgtctaagacgtccattctgcaggcatttatgatttgcttactgtttgtcaggctctgtttcttgcgggggcagtggaaggggtgtccgggggcctggagacgaatagggcaggagtgatgggggtctgaccttgtggccaggggaaatggtagaacaggtgaggtggggtccctggagtacaacacacagcgtcttcccctcaccttcctacaggctgggtggggctcacgaagtcctgccccccagggtggatcgggagagagagatgtggcttctgtgcctgagagctgcctgcgggcccagggacatccctgccctcctggcctctgccttcgtacatgtgaagggtgtatgcaggagagagacagagagtgagacgggatccaggttccccatcccaggcccctgccctgggggaggagcaacgtgtgtggtctctaggggatcgtgagcccctacgattgtttgcagatctgtgcacactgtaaatgtgcacgtgtgtgccatgtgtatatgagtgtgtgcatgcgtgtacacatccacacatgtgcagcgtggtggcccaggccttcgtgcaccagcaccctggtcctcttctgccagccccggaagcctgtgcggtcgcctctgactccttcgtgccttggcgctgtcacagacaacccagaggcgggacagagggcgttgagcccctccgtgggtggaatatcactgcagttaggagccatgtctcaaatcctccatgcgtgatggctcaggtgcgtcttccacgcagatcactctggcagggagcgcggatggagacccgaggctggggcctgctggctttgcccctctacgcgaacagaatggcctctgccctgcaggaatcttgagtccaggagaggagagtttccctggaggtggaggtcaggcccggcagtcagcaggccaagctccttcgggccagggcaagccggagggcttcccagagcgggcacagtggacagctgagcaggccagactctgacatgaggtctggacaggcccttccgcccttccggatgccagtccccctgcttgtctgaccactggcccgcctgcccacggggcggctgagatgctggcgtgtgcgtgcgcatgtgcacgtgtgtttgtgtgcgcgtggggctttctgacagccgataattcacaggcgcctccagagccggctcccgctcccacccgctcactcctgtttatgaagcgaagggtaagtgtttaattagtcgcctaattgcctgggtaattggagacgaactcagctctccaagtaatcagtcggaacagcctcgaaaatatctggcccaatattcattagtgtggcttgatcgttaaacagttaccgtgtttggttcatgacaaggcccagcaaacagctgcgcgcccaacagcccccgccagccctggcagacaaacagctccacgcagacggacggacagccggccagcaccggggcagagat

SEQ ID NO: 12383 - DNA, 1660 bp, Artificial sequence
  DNA replication origin
atgaggctcagcgagggtaagcggcctgcccaaagtcacacagcagggccgggtccaagcccaggctcctggttccaagtccaggtcttcctgtgcaatcgccgcgaagtcacgtgcctgctgttgcagggaaaggggccctcagcgcgtgaacctcaaaaagccgtgttctcggtgggagtcaggtgaacatggaacttggccaagggctggctccaagcagaaaaggagctctaatgagggggccgttcacagaggtgtgggcagggctgtagccggaggatcacttgggcaagcgtcctgggactagcagtgcaggccaccgatgccccaggccacagcagcaggaagggtgggcatagttgagggcgaggcaggaggggggctgcggggggagctgtggctctggaggaggaaggagccctcaccgcacggcagccctaggagagggagccagggaaacgcatgctttcccctctctctgtctcccagccccaagccagagaccagggagctaggggtgggggtggggggtgaagcctgctcccctcccaggcccagaacaggtgcagtgcagcctgggcgtggaggggcctctccagtccacaacaccaccccattcctggaccgctgcaccttcccggcttccctaggggccccacccatcctccttgtagagctcctttaaaaaatatcacacaaactgcacgattcccctccttcagtcccctcaaaggctccccctgatccttagaatgaagcccactgcttcagcgggtgagaccttgcatggctgcccccacccccgctcctcccagcccctcccctccccagcggtgcagcctcagggacttctgcacacgctgttccacccaccaatgcttttccctccctccccacccagccggctctgactcttccttcaggtcccggagcccctcctgcagaccctgtgggcccttcactgaacaccctcctccttcagaatgtcctggggacctggctgggggcagggccggatctggtttgttccctggcgtgcccagcctgccacagtgcctggctcttcttcttcgaggaagaactcgaagaatagctgtgagatgaagagtgagcgaatgagtgaacagatgcatgaacgtgttcagggcaccgggtggcttcttagccacagctgcagatgggtgtgggtttgcctgcggggctgtcttgctccacgggaggcccagggctccagctgccactgccctgccctggcagacacttcctccgctctttacagggaggtgggctctggggagaggaagcagatgggctagccccgactccagaagagaccctggggctgctgatgaagggcagagacctggctccatcccaggctgcactgcctctctgggcctcagtttccctatctgtaaagtgggcacatttctggccctcactttgcaggactacacagagcaaaagagccctgtggatgtgcacctgctttgtaacccatacagggaagtgcgtggggaggcgctgctgatggtcacagccctcttcggcaggggcagagccccgtccttccagccttgttcatccagctgccttgggtttctgcctctgctctgctcccagaatcccagccaccgggctccctgggggcaaagga

SEQ ID NO: 12384 - DNA, 904 bp, Artificial sequence
  DNA replication origin
agcattggtgggtggaacagcgtgtgcagaagtccctgaggctgcaccgctggggaggggaggggctgggaggagcgggggtgggggcagccatgcaaggtctcacccgctgaagcagtgggcttcattctaaggatcagggggagcctttgaggggactgaaggaggggaatcgtgcagtttgtgtgatattttttaaaggagctctacaaggaggatgggtggggcccctagggaagccgggaaggtgcagcggtccaggaatggggtggtgttgtggactggagaggcccctccacgcccaggctgcactgcacctgttctgggcctgggaggggagcaggcttcaccccccacccccacccctagctccctggtctctggcttggggctgggagacagagagaggggaaagcatgcgtttccctggctccctctcctagggctgccgtgcggtgagggctccttcctcctccagagccacagctccccccgcagcccccctcctgcctcgccctcaactatgcccacccttcctgctgctgtggcctggggcatcggtggcctgcactgctagtcccaggacgcttgcccaagtgatcctccggctacagccctgcccacacctctgtgaacggccccctcattagagctccttttctgcttggagccagcccttggccaagttccatgttcacctgactcccaccgagaacacggctttttgaggttcacgcgctgagggcccctttccctgcaacagcaggcacgtgacttcgcggcgattgcacaggaagacctggacttggaaccaggagcctgggcttggacccggccctgctgtgtgactttgggcaggccgcttaccctcgctgagcctcatctcctcagctattgaatgggt

SEQ ID NO: 12385 - DNA, 810 bp, Artificial sequence
  DNA replication origin
ggggccttccctgattgtaaccagacagatggggaggcagggccccgaccccatttcccctccggctccgtccaaacctgggtatgctacacatagccactgaaccccacctggcgtgtccacagctccagcctctgtccctcagctccatgaggcccggcctgcactgacgggcaggtggaagccactcctgggcccggcctgctggacacgagggaggcggctggggtgggagctgccctctgacctcccacagccacaggtcagcccagcgcgggccagggaaggtgtcctggaaacagaagacccagggcactgggaagggcatggaaaggtttctggggggatccaggcaggggcaagcagggagagggctcctggggggatccaggcgggggtgggcaggggtgtgaccccagcgctcacctcctgggtagggttgtgagggtgaggggctgtcggcggtgccaaggatctgggcaggccccactgaggcctgggcgggtgtggagggcagtggaggtggggggtggggccacaggctggaccctccacaggagaattaattaaacgcatctcactctggcaccaccaagccatttctgctgacctcaccaggctgattaatatttcattagcctttaggaggagggagagcacttattaacctgctacgtcaatctgtcagtgctggtcctggcgtccagtgtcccagggaaggacagaataaagatccggtgcacccagcctccagggcctcctggatggagtggtccccccatgctctgctcccccgagactgcccatgct

SEQ ID NO: 12386 - DNA, 668 bp, Artificial sequence
  DNA replication origin
gggcaggctgcgccgggctgatccgctgtgaacagcggttttggagatggtacgtcttgcagaggcatggcaggaaccagcgcctggaggtgcgaatggcccagtcggctcagggggacacagcctggcgggccagggccgggaaggcaggtgggctgctcctgatgccaggccggaagtccacctcagcgggggacggggaagccccttggagttcattcttagtgaggaggggttttccggttgccccacgggcctgtggtctgtctccgcctctcttcatgactggggcatcctggagcaggcagagggaagggcaggaaggctgggggcacgtggctggcatagctcgggtggtagtcgcaggagcccatgggcccccctgggtggaggagggagccctgcccttgtggcttcggccctggtgggacctggatgggagggttggtccagagcccaagaacacggccagggagtggggtggggtggtgctgtgtggcttttggtgttaaggaaggggaggaaaggttgggctggaccaagacagagatggaaacagagacagagacagagacagggagagacgcagagattcccccagggtgagagatcaaaggtgtcccacgcagagacccaaccaggatgcctccagctctgtgacccacacc

SEQ ID NO: 12387 - DNA, 1460 bp, Artificial sequence
  DNA replication origin
cggagccgcgcggtctccgaagatgagcttcctaccctggggcgatgcagccgcgcccatctccgatccggatggcgccactcaccgcggagtgacagctgcggcgcccctggggggctgcgggcctgcgccccgcggctgggggcacacgagaggccgcgcccggggccctcgctgtcctcccctctcctggagttccccggggaaggcctccccatctgccaccccgcccggatttctcaccttgctgggttcgatcccatctggcgcccgactcctctgcaggcgggtgtcggaaaataggcgggaatctgcactcgccaggcaggggcggggagagcgcagcccggggttcagctggttggctgagagcccggctgggtgtcctggggagagccttggtcctctcagcctcagtttcctcatctgtgaaacggctgctgggcgcccctgcctggggaaggacggggccggaggtggggccttggcaggtgctgccaccggaggccgctcaggaacgggggggctgctgtatggggttagatcctgttacaggatctcagacaccagagaacccgcagattagaggtgctttgccgcagaggtgctgtgtgtccttgggcaggtggcaccccctctctggcccccagaaaggagcaggttgggagagatgcaggctgggggccttgggccctgagatttctgctttcctgcctgggttctgcaaagctgcctttctcccttgggggcagggctgaggccctggggagggggaatgaaaacaaacacacttcaatccctgcagaggtgggaggcccctccccagcgctctctgaattcctccagagcaggcgcaggcagtgaggtggacagggcactgctagacgcgtcttccctctggggctggggacggcctccaccaaggcctggagagccatcttcccagggtcggccgcacactcaaacccgtggccacttgacagatggggaaactgaggctggaaaggcagaagaacgtgctcagtcacccccacgggcaaggtggtgttggtggccttggagactggctcctgtgtgctcccaccaccccctgcttgagtgacctctgcattagaacacacccccctctgcccaacaaccatgatttacgaggatttcaacagtgtttgtgtcttcttggaaagcaatttggggacgggtgctttgattgtggagtccagcgtctgggaacccctcctccgagaatgatccgaaaaccatacagcgcctcctgctcaaagatgttcagggcagtcagtgtttatagccgcgaaaaattgagcctaacagcagcgtccaaggaggtctctgggatggatatttctcgagctgggagcagcactggggaattgctgatgtggaactcaagagaagaaaaggtgcaaaatgaaatctgtatggtagagaacgcatgcacaaac

SEQ ID NO: 12388 - DNA, 1914 bp, Artificial sequence
  DNA replication origin
atgcctatggtccagcacacagtaggcactcaataaatgtttgtcaaataaatgtgtgcggtgtgtgtggttccaggggtcattggtggaaaccatggggaagggtttggacgtgggaggtggtggtgatagggagacagaatccgctaaaaatgagaatgtgcttgctaactcatagagatgcccagagacaacgtaggctgtctctggaggtagtgagctccccgtcagcagaagcattcaagcggaggtcaatgtcacttccaaaatcctttctacgattccttgcctctgcacttccacagctctgcaggctgcatgatcgaagctctggcccaggccaggtgtagctggctggcttggctgtgctggactcccaaggctgggctggagccttgagcctcccaagcgccccagccctgcatgagacagaactatcggtatccatgctcatatccacactggggctgacagggagggttgagcccagcgactctgcgtgggtcacatggtggtcactgctggctgaagtgggcagagccacaggcaggttccagcaaagattaaaaaccttctgtgcaaataccccaaggaaaaacttgaaaatcttcccctgaaacctcttcccgctgactctctccgtcccgtccctctgtctgcctctgtccagctgcatttccctttgggatctggcccccttgtctctcttggtttctctgcctctccatcttcctctctccctgggaggaggtgggccagggaaggggatgtggggcgctttgccaacctctcctctgtcgtctcacacctttgaagccccctctctgcagggaggggcttggctgtgggagcctcagggttttccgtctctactcccagaccacccccagggcctctctgcccacacagggagcagtttgcagacgaagcaggtgcaatggggaggggtccaggaaacctggcagtgtctgtgcctggcctgagtgtccccagggctcctggggtctccgtcccggcctccacctccccactgccctgtccaaaggaaggaagggcaaccctcaccacactgcaccatccacactgcccctccacatgagctggtccggtcctgctaatccagcctcaccagccacaccacagcacgtgcctgcaatcccttgcccgccttgcccgccatctcatatcccacacagcagggccccttttgggggagcaatcccattacaggctgcctggggtcgcagtggtctcagctagccccacctagtagggcacgtgatctaacgctccgggcctcagtttcctcgtttgtaaaatggaattaaatgcacacaaatgtttaggttaatgggcgccctggaggtggggggaccctcagcgaattagtgctggagtcgtcccagggccatcggctgagacagcctgggtggggtcggaggtgggcgatggatcagtgtgggggtgggggggccgatgttggggggtggtctgcggtgagcggggcctgcggtgggtggggtccgcggtggctggagaccatgaagtgggcggcaattgggatgggctggggtccgagataggcggagcttacagtgggctgggtccgggatgggcagggtccgtggtgggccaaggtcctaggtgggctgggtcgggcagaatctgcggtaggtggggttcaggatgggctggagtcgctgccggtcaggtcaagaatgggctaggtccgtggtgggcggggtgcaggatgggcggggtccgcggtgggcagggcctgggataggcgtggtctggaggggtggggtcggtggtgggcggggctagggacgggcggggtcagggatgggccggtgtctgggatgggcggggcctaggatgggtgaggtccgcggtgggcggggtccgggatgg

SEQ ID NO: 12389 - DNA, 1342 bp, Artificial sequence
  DNA replication origin
tgctgagttgggggttctgagaggctggcaggaggttctccccactgaggcctgaggcaggagggggccgggggcctgagtgggctcacagcgggcaggcggaatgggcacaggtgatacccggggctggggccccccttcactggcttccagcctcggagcttgctccccttctgtccgagaggaccccgtggcctcctccctgtcagagaagggtcgcccgagtgtgatttgtttctcacaggtggggtatgtgacaggcagtggccgggtctgagctggggcaggacccctctccctcctccctccttcagtgttgggctgtgacctcaccccacccaacctcccatctgcaagcaccctcccagggggtgttaacagccaggtgaccacatcctccggcctgccccgccccggcctgccctgccccggcctgccccacctgctgtagccacacctgtgtccaggagtgggctcacgggtcaggggatgggacccagggagctggtggccaagagatgggtctaggggagtcacccgccttccacccaccctgccggtgcaggatatcacatctccactacagcctccatttccctgtctgcagaagggatgtgatggctcccaggtggcagagctgctgtaagaaggggtgagatggcgcgtgaggcacccggggtcaggcgggggcagaaggtggtcagtgaggtcagcaggtcccgtccctgagctggggctcgcaggagtccagtcacaaacatcagagaggagatgaggagagagagacagggagagagacaaagacagagagagacagggagagagacaaagacagagacagacagggagagagacagagagagaggaagagacagagggagaggaagagacagagggagacatagagacagagacagggaaacagacacacacacagagggagagagagacagagacaaagagagaagacacagagagatgagagacagagagagacagggagagagacagagacagagagggagagacggagagagacacagagacagagatgagagacagagagggagagacggagagagacacagagacagagacagaaacacagagacaaagatgagagacagacagagagacagggagagacagagagagagaaacagagctacagagagagagagacagagacaaggagagagaggcagagacagagacaaggagagagaggagagactgagagggaaaggagagcacaaggctggagcaggcgccgcggcccatgtcccactgagcggtgctgctgtgtgggctcagccgtcctcagaatctgcacccctgcccc

SEQ ID NO: 12390 - DNA, 1396 bp, Artificial sequence
  DNA replication origin
gctctggggaccggctccccgggcacaggggaaggaagcagtgtcaggcgtgactgaaggctggagagcagcttctgtagagtcgtagagaccggggtggctgcaggacccccgaggtcccccgccccctgtctggagcccaaagtccccgtgtcagagccacacacgtcggccccggaggagaggctgccactctgtcccctgacccgtcggtgcccagggaggtggggtcagggcttcctgtggggagcagacagtcggggtgcaggcctggagcaggaccctgggggtggggccacaatgttggagttttcgggcccagagtgagtcaagggagaaacagtgggtcccacttcctcggccgcaggcacagagcaggtgttccatgcacacgtgtgggcggtgtgtccacctgccggccgctgcacctgctctcgggagccttcgaggggatctgtgcgtggctcaggagcgacgcgtgacttccccgagccggggccgtcagacgggcactgatgagggaggcggttcttatcctttctctgccaagggcagctgtaagcttccttttccatcacacctgaggggtggaggaggcggggcctctgcagccacttggccttctggtgtctaggggggtcccctctgtccccccagctccctctcctggctccctgcggcataggaggctctgagggtgacccgctcaatcccagaggctgcagggcagggtgggaaggtctgtagcaggggtcccttcctggcttcacactcccaggcgtgcgaggtctacgcggggccctgtgtgtagacccctccagcgtcaggcagggaagagtcacccaccccggccacataaaccgacaaccagccacacagttgaacgtcaacaaaacgttgaggtctgcaaggtgaggaccctcagggcccaatcacgcagcgggacacagtggcccagccatgctgctgagttgggggttctgagaggctggcaggaggttctccccactgaggcctgaggcaggagggggccgggggcctgagtgggctcacagcgggcaggcggaatgggcacaggtgatacccggggctggggccccccttcactggcttccagcctcggagcttgctccccttctgtccgagaggaccccgtggcctcctccctgtcagagaagggtcgcccgagtgtgatttgtttctcacaggtggggtatgtgacaggcagtggccgggtctgagctggggcaggacccctctccctcctccctccttcagtgttgggctgtgacctcaccccacccaacctcccatctgcaagcaccctcccagggggtgttaacagccaggtgaccacatcctccggcctgccccgccccggcctgccctgccccgg

SEQ ID NO: 12391 - DNA, 940 bp, Artificial sequence
  DNA replication origin
ccctccatggcccctctgtgtcccttcccagccagcctcacacggcagcccgcggaccccagggtatatcctgcatcccttgcctaataccccagaagaaacccacaccccttcttggttgactctctcccgccccctctcctctgtctctacccggatccaccctcttgcgtgccctgaggccccagtgcctctgctcaggggcttggcacagactgttcccctgccaggagcgctctccctccaggtgcccatcccgtcatggaaccgtacaccgtgacagcagctgcccttccctaagtcagcctcacagggtctccagctggactctgccctggccagcagcaggacttcctctggtatggagtgcctcacgctgcacttactgagtacctactgcacactggggcaggtgagaggaaccacctcctagacgggtgtcaacatggtgagcagccagcgggacagggggtggagtggggaagacatccaggaaacctgcgctgagctggggagggtatgctaggtagggggacagcagtggcaaaggcctggtctgtggggagcagaggtaaaagtagtcctctgacctgacctcctcctccgagaagccttccttgactgacagacagcagctgctgggtgctaggaaaggggtcaaacacagagatgggatggggacacagtgaggggtgctgtggtgcatggtgggatgctggcatgtgggcccagatgtctgaggtcaagcccagctcccctcactggaccccgcatccttggctgtgaagtggggagcccctgtgtgaagggtgaagggtggtgtgcatacagcaggtgctcagtaaaggcctcacctaccccgtgagaatcaaaggagaaacagtgggccccacttcctcagccacgcacacagagcaggtgttccgtgcgcacatgtgga

SEQ ID NO: 12392 - DNA, 1258 bp, Artificial sequence
  DNA replication origin
gcaggatggagctggaccgagtcaggcagaaatgagggaccctggggtcccccagccccctgggtgtggtgaggagggggagtggaagaggagtgggaggaaaaaggaaaaaggaaggaaggaagggaggaagggagaaggaagactgggaggagtgggaggaggggagggaggagggggaaggaggagtgggaggaggggagggaggagggggaaggaggagtgggaggaggggagggaggagggggaaggaggagtgggaggaggggagggaggagggggaaggaggagtgggaggaggagagggaggagagggaagagggagggggaggagggagggagcagtgcgagttgtttattacttgcatcagaatctgagttgcaactaaaaagctaattgtccagcccgctgatttcccaccgggcagggagagctgctaatagcttcgcaagcggctcaggtatctgattagctgtaattgcagctacagacagaagaagggtgaggacagaagggggacttagaggggaggagggggccgagggagactgggaacagaggcctgggtgccaagtcaaagggaggccaggtgggtggcgggccgggggcagggactagagaagatgagggtcaaagccgaggtggccaggccggccgaggatccacagccgctctgaggaccacccacccagggccccgggtgaccgccaccgccaccatctaggcctcgctgtctctgggagtcatcccgtctctgcacatctgtggaatgggggcgtagtctacctcgctgggccggccctcaaaggccaggagccagggtgtgaagagctggaccagtgcaatacacagtcagtgccaaagtacaggggctcaagcacctgccccccgtggcccagggtgacccctggacgggacacccacccagacccctgggatgagctgagtctcataagcggaggacactttttgtgaatttcagatcggggttattgattccagagaaaaggaagccgctgatcgactttgctatcgagggcaccccagccccagtggagaactcgtgtccccagagcggggcaggggatgcaggcccgccctccctctgccacaagcccaccctctcacctgcctttctcatttctctgcagctttcttccctcaccgacacatttattcttccattggtttgttttctaatttgcggttcatttaaaatagatctgttccggccgggtgcagtggctcatgcctgta

SEQ ID NO: 12393 - DNA, 1167 bp, Artificial sequence
  DNA replication origin
atgtcacccataggcagtggcccaaagaggggacaagaggctttgaaatcagaccaccaagagctccaacgccggctgcaccacgagctcgctgtgtgatcttggacaagttgcctaacctctctgagcctgtttcctcattagtaacagcctctgcctaaagaggatgatgtcctgagactatgcctggggatccctcagagtggcacccatgtggagtgtccacttggcacacagtgttgacacccaggccatgggtgttttaagggtacctgggacttgttttagtctgatgtggtgagacatgcagatgtggaaatgctgtcacgaggaggaagttatgatgctcacggtcccctggaaacaggagacagagttctcggggccacccgggaagcactaggctgcgtcagaaggcagcctctgtagatggggcgagggggaagagcatttcctggggtttcctcggaaaaaaagaggccaggctggggaagcaggcttaaggctggggggctgggataatgttggcaggttttgcctgtagaggccgcctctagctgcctgatgcctggccgtgagtgattggggcagctgggtggtggcccgagggtgagagcccaccgaggaggtggcagaggtgggctgtggaccgggttcttgcacatatcaaaggtaagctttcggggagctgtttgctgtctctaggaacaggaggcccctgagtccccaatgccccaggtgtcagagcatcagaaacatggaaaatggccaggcacagtgactcgcacctgtcatcccagcactttgggagggggaaggattgcttgagcccagtagtttgagaccagcctgggcaacgtagcaaggcacccaatacaaaattagccaggcgtgctgacatgcacctgtggtcccagccactcgggaggccgaggtgggaggattgctttagacccataagctgaggctgcagtgagccatgattgtgccaccgcacaccaacccgggcgacagagcaagaccctgtctcaacaaacaaacaaaaacacgaacagaaatttatagttccacagtctggaggccagaagtccaaaatcaaggtgttggcagggccccgtccctccaagccctctaggggagcaactgtcccaggcccctcccagcttt

SEQ ID NO: 12394 - DNA, 1362 bp, Artificial sequence
  DNA replication origin
tggggggacctgcaactcccgcccgggagtccctcagacttggagtgctctgaagaaagcaagccagcggccaagtgggctatgggccaggtgcgggaaggctccagacccggggctgcagggttggagaagggcgcagcaaaggcctggagacagcctgaaccagggattcaggatggaatgggtctgggtcagggagccagggtgaccgtgggccgcacaggcctgcgcgcgcgggtgcacgtgcgtaatggatgcacacgcatgcagctggtgtgcgtgcagtcgggcgcacctgtaaccggtgcgcaccccgcgtctggcgtgcaagtgggagcacctggcccagcgcccagcggggcctcgcccgccgctttcttaggaaacgccgcagcgccacctgccggctacgcggtctcagctggacgcgggcggggagggcgccgggccacgaggccccgcccacagccggaggccccgcccctaaagactatcttggtgccccgcctcttcagactccgcccgattccaggccacgccccttgtaggcgtgaccgaggacgctggtacccggacctggacttcgcagggtcttggaggggcgggcagtgggggatctccgctttgggtctcctggctgcaaagcgaggacaactatgagccttaaacgcacaccaggagtgtaataagagcatctgctgcgtcactaactcttcccatttaccgatgaggaaaccaagacagagaagtcaagtcacctgcccagagtcacgcaggagaaagtcgtaggccggctttgagcccagcatcctagttgctgagtctctgcaatcaacgactgcccccaactcctagtaaattcatctttatttgttaattaatagttatttacgagaataaacccatccaacctcccaccccttgcaataggtatctgggaagtgatggagacaggcattctgagctgtcaccagtatcttacatggccagaaaggtggagttcagggagaggattctcaggatttgggggcaaaatgagttaggagaccggactggagtgggcagccacctccagggcaggctgggaggccggggccctgggctgcagtgaaaactcactgagcagccttcagcaggtgcttgactccccgtgggcctcagtttccccatctgtacaatgggttggggcggggtgggagataaaacatcacttttctcagttcttccccaaaccccagacagtgcaggattccaggaatccctgaaggtctgagccagtgcagggactgggggctcagggtggtccagccccgcgtggggtccttcctggtgcctgtggctgtctttggtgggaatccagtg

SEQ ID NO: 12395 - DNA, 1821 bp, Artificial sequence
  DNA replication origin
agaagcagagttagaaacttctgttctccatccttgggtgtgggtgctgggggtgtcagacccttaccacagctcaatcctcaactctccccagggtgagaaggcctgagaccacaaggctcagcactgaccatgatgtccctttgggctatcaccatatgcctgaccccgcccctcacacacacaccaaacacacacaggggtatccaggctgacatctgtccacccacttggtcttggtcaggtgtgctgctaggctgagctaagtcaggtacctgcttgtgtgtgttcaaatgctgggcagccaggataaccctgtgaacatccactgcaattgctggatggggatggatggatgaatggatggatgagtgggtgggtgaatggagggagggagggagggagtgagggagggagggatggatggatggatggatggatggttaggaggataggtggatggatgagtgggtgggtgaatggagggagggagggatggatggagggatggatggatggatggatggttaggtggataggtggatggatgaatggatggagatggatggatgagtggatggatgaatggatggatggatgggtgggtgggtaggtgggtgggtggataggtgggcgggtggatggatggatgagtgggtggatgggtgggtggatggatagatggatggatgagtgggtggatgggtgggtggacagatggatggatggatgagtgggtggatgggtgggtgaatagatggatggatggatggatggatgactgggtggatggatggatggatgggtggatggatggatgggtggatggatggatgtatggatgtatggatggggatggatgagtgggtggatgagtggatggatgaatggatgcatggataaatgggtgggttgatgggtgggtggataggtgggtgggtggatgaatggatggatggatagatggatggggatggatggatgggtgggtggatgagtggatgagtggatggttggatggatggatagggaggaatagatgggtgagtgggtgggtggatgggtggatggacgagtgggtggatggatggatgagtggatgaatggggatagatgggtgggtggaggggtggatgagtgggtggatggatggatgggtggggtagatgggtaggtgggtgggtggctggatgaatagatgggaatggatggatgggtggatgggtgggtggatggatgaatagatgggaatggatggatgggtggatggatgggtaggtgggtgggtggctggatgaatagatgggaatggatggatgggtggatggataggtggatgggtgggtggatggatgggtgggtggatggatgggtgggtgagtggatggatgggtgggtggatgggtgaatgggtgggtgggtggatggatggatggatggatgggtggatgggtaggtgagcgagtggctggatgaatagatagggataggtggatggatggatagatggttacatggatggatgggtgggtggataaatgtgcgggagaaggcatggatggatggatggaggatggatggatgggtgagtaatggattgatggatgagtagaaaacagaaaccaagagaggctgagggcactatgagtaaccccccattgtttagtagtggagaggggttgcttgccggctgcaatgagccccattcatcgatgaggaaactgtgcaggaggcaggaggtaactggtgcagggccacacagtgagctctcggtggagcccaggaccctgtcctcatggaggtccctgcctgaccctaggt

SEQ ID NO: 12396 - DNA, 973 bp, Artificial sequence
  DNA replication origin
tcaaccaattctcctgcctcagcctcccaagtagctggcactacaggtgcccaccaccacggctggctaatttttgtatttttagtagagacgaggtttcgccgcgttgaccaggctggtctcgaactcctgacctcagatgatctgtctcggcctcccaaagtgctgggattacaggcgtgagccaccgtgcctggtccaaactccctttttaaaagaacctttttattttaaaatatttagatgtacagaaaagttgcaaagacagcgcagagaattcctgtacaccagtacggtctcccctaatgctaacatcttacattactttggtgcgtttgtcacagctaagaaacccacatcagcacatgactcatcgtgaaaccccacactctcccccgatttcctgtgcctcctattacccgttttctgctccagctccacctccaggagcccacgcgacacagcatgctcaaatctcctggggctcctctgttctgtgactttgacagttttgaggagtgttgctcaggtattttgcagaatgtccctggacttggatttgttgaggcttttctcgtggtctgattgaggttctgggcttggggagggagaccacagaagtgacgtgcccttcctagtgcatcatcggatctgggttctggggaggcgggagaaggggcaacaggaaggggcagaaaggggatgggagagtgggcgccttagggtggtggggtggacaagacttgggtgtgggagaggcttgagggaggagttggggtggtggccaggtgggtgctggtcaaggacgtcgggtctggaacttacggctttgagactggagcggttggggaggatgtcttgtttctggtctaggtacttgggtgggggtgggctgctggcagagccaggggccaggagaagggcctgtggtggaagctggctctgctcccctgacatcctgccccccactcgt

SEQ ID NO: 12397 - DNA, 1045 bp, Artificial sequence
  DNA replication origin
cgctagcacttcaatggactgggcagatgcgtttgccctctgcctcagtttccccatctgtgaaatgggagaacgaagctcacctcacaggcagccctgagccctgacctgggtgggtggggcgggctttgtgaaccactaggctcacgttcagtgaggcacacagtggtgacccctctgggggtgctggctgcgacccacagggctcccagcactagactcacagaagctgcaaaaggggaaggccccgggctctggatgacatcagaggcaggtggaacgcagggtgccagaacttaggaattggccaggctgtgtgtgacgtcagtagggtggagcacagagtgctggggcttaggcattggcaggtttttgtgtgacatcagatgggggtggagcagagtgcaggggccctaggaattagccaggttttgtgtgccgtcactggggggtggggggggggggtggagcacagggtgccagtccttagggattggccagatttttgtgtgacgtcagatcggggtggagcacagggtgccaggccctagggattggccaggtttttgtgtgacgtcagttgtgggtggagcgtagaatgcggggccctaggggtcgatcaggttttatagtgaagtcagatgagggtggagcgcagtgtgggggccctagggattggccaggtttttgtgtgacgtcagatggtggtggagggcagactgtgggagccctagggataggccaggctctgtgtgacatcagagcgggaatggagggccaggtggttcttgttctgtctgcagggtgagaatattggacgtgattctaaagactaagcctttggagagtatcaggcaggggtgacgttccatctgggtttgttctttcttacatgtttaattaggtagcatttcaaatgcagaaaagcacaggaaacagttattctgttgggtaaacagccatttacccatcaccaggactaagcagatgcgaacactgtgccctgtttggaccagatctcttacccgagctcccttttttcttt

SEQ ID NO: 12398 - DNA, 685 bp, Artificial sequence
  DNA replication origin
caaggcagggcacaccccgtagggtacgaacctgcaggtgcaaaggcccgggcaggtggaagtggtgcagagacagcgaggaggaggagggcgaggaggaggaggagacggggttatgggagctggaggggtaacagggcccggaacactgagtgccttgagactgtgtttcagccaggctgggcgtacaggcaggattcttggtccgagacagtttacaggcgagaagccagggctgggagcagtgtggaagaacgctagcacttcaatggactgggcagatgcgtttgccctctgcctcagtttccccatctgtgaaatgggagaacgaagctcacctcacaggcagccctgagccctgacctgggtgggtggggcgggctttgtgaaccactaggctcacgttcagtgaggcacacagtggtgacccctctgggggtgctggctgcgacccacagggctcccagcactagactcacagaagctgcaaaaggggaaggccccgggctctggatgacatcagaggcaggtggaacgcagggtgccagaacttaggaattggccaggctgtgtgtgacgtcagtagggtggagcacagagtgctggggcttaggcattggcaggtttttgtgtgacatcagatgggggtggagcagagtgcaggggccctaggaattagccaggt

SEQ ID NO: 12399 - DNA, 928 bp, Artificial sequence
  DNA replication origin
cttccaggggagggaggagcgcagctggctacctggctgctgcctggagcctcgccaagcgctgctggctgctctggtctggcctcacccgctccaagcaacgacagcttcccacggtccctggggccttctgagcccggctgagagctctggccggaggcacacccaggtcagcctaagccaaggagaagggggcacccccagcccctgcatccaaccctaagacacgaagtggcacctggcggcatctcagccttctgcagtggtcagataagaagcagaactttctgagcctgctggaagcagaatggatgagcccacattgcagagaatgacagggaaactgtgggagtaacagagagggagagaaaagggggagtggggagaggaagagagaggggggagagagagaaacagactgagagagagggagagagagacagagagggagagagggagagggagagagagacagagagagggggagagggagagacagacagggagagacagagacagagagatggagggagagacagggagggagcgacagagggacggagagatggagggagagagagacagagagggagagacagagacagagacacagagggagagacagagagagggacggagagacagagacagagtcagagacagaaggggagggagagacagagacagagagggagggagagacagagacagaggcagagacagaaagggagggaaagacagagagggagggagagagggagacagagagagggagggagagagggagacagatggagggagagacagagagggagggagagagggagacagacagagggagggagagacagagacagagagggagggagagacagactgagctgggagtgagggggaagaggcggcaggagcagcacgtggagaagct

SEQ ID NO: 12400 - DNA, 1936 bp, Artificial sequence
  DNA replication origin
ggatgtttctggcagggggacttgtgtgggccacggctgtgcggctgcggcgttgagcacggcctcactgtccacctgtcccctaggcctccagaggaagaagtccaagttccgcttgtccaagatctggtcaccaaaaagcaaaagcagcccctcccagtagtagccagtagggccgtgggctcggcccggacctggcatccggacttggactcggggccatgggcttggcccggacccggaacccggacttgtactcggggccgtgggctcggcccggacccggcattcggacttggactcgggaagggcctcctgtccctacaaggggcatgtggacagcagggacctgcgctaccgtctgtggtctcaataaagaaaccgaccacatggccccggactcctacgtgcctccgtgtttgcctcggtgcccctgggcggccccgcacctgcctggggtctcgcctgcctcccagctcttgcctgcaggacggacgtgctctgtggcctcgggcaggagccgaccctctcagggcctggccctcgaaggtgggccctttcatagcttcctggcacagatgggctggtgggagcctcagaggagacgtcggtacaggctggagactttgggtgctgggtcgccatgtatccgtggcctgagagctgtgacctcgttctcccaggactggggctgggatgggggattgtaagcagtggcccctggtcagggagacttcctggtggccagggcgggatgtggggtgccccatcctttctgacccccactgagagtggatgtcgtgggaggagcgctgagtcaggagtgcagcgtccctgtaagcctcagtttgcccatctgtgcggggaggggcgggcctcagctgcttgttgctgcgctgtttcagctgctgtaggagcctctgcggcggtcctggggaaccctcagccatggcaaagcaccagtgttctccacctgctggctgggggggtcgggaccccacgggtcccagcagggccagagcaggttcagagcctggagcccctgccgtgtgcgcgtgggccctggggagcttgtgctgggcaggcctgtggcattccatggccttcactgtgcctttgagggtctcaagactcctggaacgtgagctgggtgtggggcatggaagagagggtgggctggggtgcacggatggagcacagcctctgcagtcacagctctgctcctggcagctctttggcctcgggctagggcactgccctttctgagcctttggtgacataggctgcctgggggccgtgtgaggatgagaggggcccaccggtgtgcctcgggcagtgatgagggtggaggagcacggaggtgctctcttgccctctgctgacagcgagacccccgctgcctccctctgtaccccctgcttctgccagccactcggggcccccgtggagggaaaggggctcccccagatgaggccatgggtcacctgcacacagcaatgagtggggaacggggtcgtgctttgcctggccctgaggcctctcttggagtcaggccactgggaccgagtgtgttggtggaaactccctgtgccctccgaggactgggaggcagtggctggcagcagtgggaccctggagcccccaggagacttctgcaggggggggtctcacctgggtgtcgaggagtaggggtctctcggtggatgggcagggtgtgccctattgcaggaacagcataggcagtgatcttgggagcttgaagatgtgtggtggggcaggttggggcggggccggggtcagggtcaggtgaggcggagcgggtgatggagagagaggggctctgtcaggacctgggccggcagggaccttccaggtgcagcgaggtggcctcgttcctcaggcactgggtgcctggggtggttctgagcagaagccc

SEQ ID NO: 12401 - DNA, 1100 bp, Artificial sequence
  DNA replication origin
tgtgtgtccacgtgtgcacccgtgttcgtgtgtgatgcgtgtgtgtgcacacacatctctgtgtgtattcctagcactcatagctgccctggatccatatccagctctcgtgccacttcctgtgtgaccttgagcagccagcagccccgtgggttagccccctggggagacatggccaggttgggcaggacgtgggtgtagggcttgtgatgccaaccctgtgccagtcgggaggcccagggcatggggatggccgggctacccagcgagctgttggctgtgctgggacagaccccaggctcccagtggccctgctctgaagcgtggctctgtctccccacctgggggcagccaggtccccctccccaccccgccgcaggagactggccgtccctgccagcctcgacgtttgtgacaactggcttcggccggagccccctggccaggaagcccgagtgcagagctggaaggaggaggagaagaaacctcaccttcagggcaaaccaggtcagccccagagacaccgctgctgtttggggtgtacgtgaagggagccttcctctgaggaggcaatgcctgctggggctttggaggatgcattcacaggacctagaatggagggaaagcctggaggaaggacccagccccgtgccccaggcccgccctcatgaatagagaccctagctgtttcagagtaccttgttacagactcatggtgatgatggaatgtctgcttctggcagcttgagggactggggtggctggggtgttgctgacctggaggagggcagggtgcagggtggggctgggcctggaggccactcaggtgtctgtggggctgggtcagggcagtccagtgggcgtgtggggcattagggaggcagggctggggccagctgtgctgtgctgaggtcaggctccttccaagctgtgtcctggtcacgttgggcctggtggcccaggtcccagaggctcaccctgctccttctccagggagacccttgtccccggccaatgtccctgctctgcctggcgagacggtgacctccccagtcagggtgagtagtggtggggagccgggcaggggcccagccctccgg

SEQ ID NO: 12402 - DNA, 1846 bp, Artificial sequence
  DNA replication origin
ggacatgacttttaggggtcaccattcgaccaagtacagtcacttagcgagtaagaatgcttgtcgcagcctggctgacaacgccgtttcctgccccgtatcgtggggtgcaggcgtcccctgctcagaactgcctcctgcccccgcagtggtcagcagggggtgctcagagcctccggggtggtcacagacaggagaagagcgagttcgctctgctcctcctggcactggggggtgtccagggcatcctagggactgaggatgagtggcgggggtgctccagggagtgcttcctaggtggtggggcggggggcatgtgtggctggggaggaccccagctcctctggggaagctggcctggcacacctgagcccagtgtaaagggaaaggggggagggaaactggttgtcgaggggggtggggacatggaggcactggctcgggggtggggaggcacctggtgcccccacctcaggctctggcagcctcactcctggtgtgtgcctgagggaaggcaggaaggcacggaggccttgtgtctggccctgtgtctgtgtgtctggcggggccagagagactgtgtcacatgggactgaacctggcagcccaggccggcccagcctctgacaaagccccaggtgcctccagcctgggtgggtggtgtgtttagggggtggatattttaatctcagccaacactggatttcacaggggaggagaatcaaccacagcatatgctcatgccagaaacaggtgtctgtggcctgtgccttgccagggtggtcattgggagcgagctgcagggaggcagaggggcagcctggtgcaatggtgggggaggcggaggggtggcctggcgcaatggtgggggaggtggagggtggcctggggtgatggtgggagtccgtccggaggctgggcattgggagtgagctgcagggaggcagaggggcggcctcgggtgatggtgggagggcgcctggatccagctgtgcctgatgcctgcgcttttacttataggccctccccagccactgccgctgttcccagttctcagcccaaaactgaagcaccacaagcaagtcccttagccaagccgttacagtcctcgtctccccgggtgcttggcctcccttcgaggatggaaccgccagccccgctgagcacgagcagtacctctcaggcatccgcgttgcccccggcaggcaggaggaacttggcggaatcctcaggggtcggcagggtgggtgctggctccaggccgaagccagaggccccgatggcaaagggtaaaagcaccaccttaacgcagggtgagtaaggggctgggaggcaggaggccccgggggcccgcagctctgggactctcccctggccgcactctgcagtgtgtgcggtttcatcatcagccccgcccgccttcctctccgtctcatctctgtcctccgtgacacctgctcgcagcctcctggggtcctggtgcgctctctgtgtggtggctgcaaatgtcctcagggctatgctgtttgccggcacccagcccaccccatccgcacgtcctgcaggtgcctgcagcccagccctgcagcgtcccgctcagctcggtctggcagttacatcctgtggctagcagtggcctggcttggccgtggtctgtggggcctcctgttctcccgtggtgttttgcgcttcctgcctgtcgctttgacaacgtcgcgctgttgctgtggcaccctgtgtcaccacataccggagatggtgccctatgccccgtcccccctgtggtgtcccggtgacggtgccctatgccccgtcccctccgctggtgtcccagtatgccctgtcc

SEQ ID NO: 12403 - DNA, 1071 bp, Artificial sequence
  DNA replication origin
ggaggagccagggtggcagtgcctgtggtcagggtggtggaagccgggtccttatggaaaagctgctgtccgcatgtgctcggggcgtcatgggtgcggtggcgctgccgctccggggccccctgtgctgcactcccttggaacccaagggtcctacgcccatttcatggacgcggggacaggtcgcgagcgggacccacgctggcgggtctgagtggacgcggggacaggccgcgagcgggacccacgctggcgggtctgagtggacgcggggacaggtcgcgagcgggacccacgctggcgggtctgagtggacgcggggacaggtcgcgagcgggacccacgctggcgggtctgagtggacgcggggacaggtcgcgagcgggacccacgctggcgggtctgagtggacgcggggacaggtcgcgagcgggacccacgctggcgggtctgagtggacgcggggacaggtcgcgagcgggacccacgctggctgggctgagcatcaccttgtctgactgagtccagccaggccctgaccttccatgcctgggcccggcgcctgcctgtgcctggaccctgagcagatgacgtggacgggtagaggggggcgctgcatcagtttccaaagaccccctcactgggcggcttacacagtagaaatccaccccctcacagctctgcaggccagaagtctgaccttgaggcgggggaagggccgcgtccccttgcagggcactaggggtggacctgtccttgtctcttccagctcccagcggctctgagcgttcttggcttgtggtcgcctccctccagtctctgcctccgtttccatgtggccttctctctgtctgtcttctcctcttctgtctcttctaaggacatggttgttggactagggtccaccctaacccagcgtgagtgcatcttaacatgatcataactgccaagatggtttacagataaggtcacactctgagcttcccagtggacatgacttttaggggtcaccattcgaccaagtacagtcacttagcgagtaagaatgcttgtcgcagcctggctgacaac

SEQ ID NO: 12404 - DNA, 1167 bp, Artificial sequence
  DNA replication origin
agaaggaaacaggctgggggaagtgcagtccccaaggccacacagccagggaggtgcagcgcccccaacccctctggcctccggggccccgctggctggtgcaaagaggccatacccggggtccctcggtccccacgcgctcacctgccaggcgccggagcgccagcctcttccagcgctgagagggcctgcttgaggaagttccgcgcctgctccttgctgctgtccttggatagaacaagtgacggggtgggacctctgccagaaaggctggtgccggggggcactgctgatgtttggaaaaacttattccgggcctgctgggtcctggaggcggacggggtccaggctggggggtccaccgtggctgcagatgtggagcttgaactgagtgtggtttgaggagctgccactcggggggctcccccaccctggggtgtggccgggcgagggtctggggcactcgggggcacggcgggatgggaggcagccgctgctgtgcacggggcagctgacgaccagcccatcggggagctattggtcacacgagggcggactttcccctccgtgggagtgggggccaggcggctctcagagggcctggctgggctcctcacgtggacggacgtggcgctggtggctgcagggttgggtgcagctggaacggaagccctggcaggcgagttgcccgcagcaggctcccaggccgacggtctggccttgtttgcctcctgggccttctgtggggaacaggaggtcctggaatccacacccatggcccctggctgtcgggggaccagacccgtcaacttggggcttgcagaggcggctgcggggaggtggctggtgcagacgaaggtgcccggctctcctgtggccttgtaggcccccgagtgcagcgtgcaggagcactgcttacacctgggggaggaaaggcacaggagccccagctcggcaccgcccaccccgccacgcattcaccacgtgctcctgatagcaggcattgcggactcctgtgtccacttgcgaggttgctgaacgcccgccccgccacgcattcaccacgtgctcctgagagcaggcattgcggactcctgtgttccactcacgaggtcgctgattcattcaacaaacgcctcttctcagggtccttaaccacttacatca

SEQ ID NO: 12405 - DNA, 831 bp, Artificial sequence
  DNA replication origin
cccggctctcctgtggccttgtaggcccccgagtgcagcgtgcaggagcactgcttacacctgggggaggaaaggcacaggagccccagctcggcaccgcccaccccgccacgcattcaccacgtgctcctgatagcaggcattgcggactcctgtgtccacttgcgaggttgctgaacgcccgccccgccacgcattcaccacgtgctcctgagagcaggcattgcggactcctgtgttccactcacgaggtcgctgattcattcaacaaacgcctcttctcagggtccttaaccacttacatcacaaaccccaccaaaaacctcgtttggggtgcaaaccccagagggtgcttgtgcaggtcagcagacacacacccacaggccaccccaggccccacctcggggctgacccaccctggcctcacagcgtgggggatggaactgggaggaccggcccaccccagccttgcagagctggggacagaagtagggggaacagcgcttgtttcctaggagcccccacccggggtgcagggtggcagcaaggggctggggatggccactgagtacaacaccagtgggaagggctgaggcacagaagggagactgaggcagtgtgtgtggaaggacagtcgggagggcatcttgacgggggcactggaggaggcatctggacgggggcactgggggacactggggcttagtgaggggcatcaggtcctgggtgtctgggaacagtagaacatcttgggctatcagcaacagagcggggggtggggaagagggtgaggaggcggagcagtagggagagaagagtgaagagggagag

SEQ ID NO: 12406 - DNA, 751 bp, Artificial sequence
  DNA replication origin
cctccgagacatggcatcctccagggtttaatcttctcttatttgaagcctcagaattaaaatcaggtataccatggcccggctccaagacacacaccgtgggccaggcacacagtcggtgccctataaatgcgtgtgatgcatttgttctgtgcttggtgagatttctgtggcagtaacttattctttcaacactggctgaaggaatgaatttgccgtctgtgtgtcggtcacaagatttgccctggccaactctccaccgtgcgtgcccctgcccggccacacctgcccccaccacccctctaactgacccacgaccatcaacttcagcccatggagtccagccggcctctgccccggcgcctctgggggctcttgggaatgtatacccccctccaaattcctgggtggccgacatcacactgtttacttcctggaacaagattccgccatggagtggggagggcgggggggtgcaggacttggaagggaaggagccccagccgaggcacatccagcacatcaggagagaatcccacggagaagggagcagagggagtggggagaggcaggtggacggacagagagagctggagagagagaggaagaccccagcggagatggtggagggaggcccaagagagacagggaccagatggcacagtcgggatggcagagaggggactcggggaaggagcaaacctcagagacagcgaggacatggccaggcagagctcaggagaggaggggg

SEQ ID NO: 12407 - DNA, 1211 bp, Artificial sequence
  DNA replication origin
ggcagagctgctccagccccgacaggctgactggctgagggaggtgaggcgggaggtggggctgtttgttctgggtggtttctgagctcacctggctgcccagctgccctgtgacaccagtatggaaacagcgcccgggggcaggcgccctgaggcctggctgcagagaacccacagccgcaggtgagacagggcaggcgggcacaggcaggctgaccaggcaggggacccgcccaccctgccacctcctggtgggcgtggctgggcgatcctgtttcctggccgtaaagcggagattcacggacacctctctgtacctgtggggctccccagtgtggtcacacgtggctcaaggagccggaacatggtacacaggaatgtccggatccccgccccctccacccggggtcggtggggcagaggcagaaccaggagcccgggtgccccacctggctggcctggcgcccgagctggttccttcacagctgctctccctgagggccaagcggaagtgctctctgcgtgcagcaggaaggactaaggccagacaaagggaaggacttcctggtggcagagctacagacagggagacaggacgtccacccttctgctgtcaaggggtcttcactggaaggagaggggaatgaggtggcaagggcggggcctcacacagagtctgacctcagagctgccctgagaggacaaccggtctgtgcctgtccctcacacgcgtttcctcccttcctgaagactactggggacaggagggacagccaagggctgcatgaggagacctccaccccagccaccacctcatccagaggtacggcagggagcagaggctgagggcacgggatgggggtgatgaaggcacagaggcaggcacgtccaaagagccaggggccaggcgcggcggctcacatctgtaatcccagcgcttcgggaggctgaggcaggaggattacttgaggccaggagttcaagaccagcctgggcaatatagccagaacccatctcaatttaaaaaagaaacaatatgctgagtgaaagtagccagacacaggccagacgcagtggctcgcgcccataaccccagaactttgggaggctgaagagggcagatggatcacttgaggtcaggagttacacaccagcctggccaacatggcaaaaccccgtctctagaaaaaatatgaaaatcggctgggtgt

SEQ ID NO: 12408 - DNA, 1132 bp, Artificial sequence
  DNA replication origin
gcaggaagctggggtcttgagcaacagcctcggcccctgctctgaggttgtgacatgcattcgtggagccaccaggggcttccatttggcgtttgggcagcagccgctctccctcgccaggaacgtgcctctgttgcccttgcaggcagaagatgctgggcacaaggtgcgtgcttccacatggaaagcctgacgctgagctttgaaggagagggccagggacctggagactgggagaaggacccggaatggggaggaaggcaggcgagaccccacccccggggctgcagggtcctggatgaggctggctggtggctgagcccaggcatccaagctggggccagcccgaaaagcctctggggtggggagaggcgttgccaccggctgctggccaccagcttcatggatcactggtgtcgccggagatttggggccctctggtcctggggagcttctctgtactccctgccggctcagacgtgcctgtgggcagtgcccagggtgagcacaggtgcatgtgcatgcactggcacggtggtcgctgtgtatctcctcagtgcactgacagttattgagtacctgctgtgtacccagcactgagtcctgtgccagttcccctcagcctccagatgcagggagcaatgttccggtcacagagacagacagggaacaggtaaatgaataaaagcccagggtggctccagagagtgcagaggccagaacaggaaggaggcgggagagagaggaggccctctgcccccagctccggtgggtgtggagttacccaagctgtggctgacttggttctgtccccactggactgtcagctccagagggtgggggctctgttttgttcactgctgcacccctggtgcctggaactgggctcggtagataccagcacatggttggagttctgcagataagggcctttcagttggggttcagtagatatggtaggagcttagtaggtgcccacgtgcagaaggacagaggagaaggccatgtgcccttggaggcagagatcagagaggtgcagccacaagccaagggtgtcctgggctggaagaggcaggaaggaccctccccgagaacctccttaggcagcaaggcccagcccacaccttgatgt

SEQ ID NO: 12409 - DNA, 1435 bp, Artificial sequence
  DNA replication origin
gacctcatgtaagtcctgcctggcgccctttgattcttctgctgttcggctgcgcgctgacacgggcggggaaactgaggcccgggcggctgggggatggggagccgaggcgtgggactgggcaggcacagcccaccgtgcagccccccgaggctgtcctcagtggcctcagtgtgcccggacaccgaatgcagctgggccagagccatggcatcccccgcccgccggctgagtcagacgtgactcagggcggctcctgggccctggcttcagtccagtccccctctgtgtccctgggaaaggccagcagagctgcctctttgggccctccgaggctctcactgcccaggggcctggccaccagatggggtccctggatagccctcgtatgggcactgaccctcccccagcctgttcaggcccctggggggatgtggccagggccactgtgggggagcggccagtgcagggcaggaagcccccagaccccaggtgctgctgccagccgggcctctgaggccccgggtgatagggcccgagatggagaacagcccccatctctgggagcagcaggaggtggcaggggttgaggactaggctgtctctccccaggagggtcttggcgtgtgtagctgggcagctggccctgcccgttgctgaatcttggcccgagcctggacctgctccattgtttattcactcagcaaacgctctttggctaaatgactgggaccaggcttgctgggacagagatctgtgtgtcggggctgggggccagacgctcaggaaggggggccctcaacggccacctgcagcccaggcaccttctgggcaaagcgttctcctgagtgtgtttttggtgggaaggtctcggggttgggaggagccacaggcagcacctggggcctctgtcaggccgcagctgtgcagaccagagaaccgaggctaagaggaggggtccttgctcaggtcacacagccccagcccgttgcgcagatccggggctcctcccctgtgcccctggacactgtcctgccagtcccactctctgcaggaagctggggtcttgagcaacagcctcggcccctgctctgaggttgtgacatgcattcgtggagccaccaggggcttccatttggcgtttgggcagcagccgctctccctcgccaggaacgtgcctctgttgcccttgcaggcagaagatgctgggcacaaggtgcgtgcttccacatggaaagcctgacgctgagctttgaaggagagggccagggacctggagactgggagaaggacccggaatggggaggaaggcaggcgagaccccacccccggggctgcagggtcctggatgaggctggctggtggctgagcccaggcatccaagctggggccagcccgaaaagcctctggggtggggagaggcgttgccaccggc

SEQ ID NO: 12410 - DNA, 1443 bp, Artificial sequence
  DNA replication origin
gggtccctaagagaagccgagcccggccccgcccccgccggccccgcctccttgtaggccccgcccccagccgccaagtcctgcctccggataggccccgtcctcacacctcccagccccggcataggctcccgcccaggcaggccccacctcccgacaggccccgcccccagccgccgggtcctgcctcctgataggccccgttcccacgcctcctggccccggcacaggctcccgctccaggcaggccccgactccggacaggccccgcccccagcctccaggttttgcctcccgagaggccccgccccacgccgcccggccccagtacgggctcgcgccctaggcacgtcccgcctcctggtaagtcccgcccccacgctgtcaggtcccgcccgacaggccccgccccacgccgcctggcccctccccaggccccgccccgccgctgagggccgagacccccaaccggtgaaggggcgcggtctgcttgggggtcctgccattctggacccctgcggagacctggaattttctttttcgccgccccacctcccaccaccatctcaccccaccgccatggagaagaggcaggaaaggccgttgacaaacggggacactgaggctcgaacaccctgccctgtctagggcctcagccctcggcagcccggcctcccggggagcaggaggcgccttgtgtttcagggtttcaaaggacgtccgcatctggtttctctttccaggccgctacatgccagcgggggttccaggcaaggcagaggtgaggcctgggcattgccagaggagaaactgaggccaggaagggggccgtggagccggagttgcacagctggcctgtgcttttcttctgggggcctgtgggcaggatctgttcctggggcaggagattcctcaggctgacttgcagggtagttccaattttccactttgagctgtgacagaagaaataaggaaagtccctctgctggggccctaaattatcccagactggcccctggccccgttatccttggggaaccttgtctgtggccacgggggctggacgagggcggaatcactgacaccagccatgtgaggggggcctaccctcctggctgtggggccagggcttgtctgggcagggcctgcaggaaggaaggtgttttcccgcagtagcccctggcagggagtcagggcagcttctctgtgccccttgggaggaggagaaactgaggtcttccaaccccagccaatggtgctgttccagatcttttctgaggctggtccctggtgagacaccgtagtgttcatggccagctgcctaagtgtcagtgaggcctgtgtgtaggtggtgagctccccgtcaccaggggcatgcaagcagctgctaggcagggagcccttgtggcctgggaatgtggctggccctaaccgctgctccgc

SEQ ID NO: 12411 - DNA, 1347 bp, Artificial sequence
  DNA replication origin
cctagccgggccctgctgcctgcaccccttcctcccgcagcccctgcacctcctcccagtcccctgcaccagcgacaccagcctatcttcgagtcttccttcctgccgcagggcctttacaactcctgttccctttgccctttccccttcctctccaacaaagtgattcctacttagcttagcctccaggtctcagttctcgtggtccttcctagggaggttcttgctctatcttctgtctccctctcttctcctctttctttctcccctctctttctctctctgtctctttctcccctttttctctctctctgttagtcccaggctgaggtcatcatcatttctaaagggcctgaagtctgggcccccatctgagtccccatcctggggcctgttgagctcacaccgctcttacctgttccccacccctgggtacatcatgctgcatttattgcgtgcctgggtgggtacatcatgctgcatttactgcgtgcctggccgtggggtagcccttggtggaaggggaccatgatgtcactttgcagatgaggaaactgagcccgagagaaggcagtttcccagtgaggccagaaggcagcgggttccccgggtggaggctctgtgttggacgggggaggcgtgtgcagagtccacatggcagccctggggagcacagatggggaccctgggagccttcggtggctccaaggggcttcagggtgggggtcttggaggatgaggaggaggggcgggtgctgggggccggtgcgggcgcaaagctctggggtcagcgtggcagggtgcggccggggagatgcagcgtgataagcctgcggaaagtctgataagcaacctggactttattcgaaggacagcctgggaggctcccggcaggggaagggcttggtcaggccttctagaaagatccctcgggctgctggggagggtggactgtggtggctggaggggcaggaggcagccctgtgggcagaggcggggggacaggtcgtctggatgggagggtggcagccgtgggcagtggggagaaaggaccatttgtttgggggtgtcctggctcctggcttcggggaccctggagggacatggtgtgtgaggtgctggtgggcaaacgtcacaaatgctgcctcccagctcactggtgccagaggggggccgcgcaggatgggccacggggtgaccagtgagatggctttttaagtgtgcagtggtaaaagttcacgataaaagtgaaacccaggccacctcccacaccactccttttaagggagctgggccctaacgcctgtccacccctgtgtcccccatcccccactaattccccccgcc

SEQ ID NO: 12412 - DNA, 1836 bp, Artificial sequence
  DNA replication origin
cagcacacagatgggacccgtgctctcccggttccccatgagtgctcccaggtcagccaggccccggctgccctccaccccagccgctgtggctaagaagctgacccaggccctcctgcaagcccaggtggcgcgaggcctcaaggttctagtgatgctgtggccttgggggatgccccgcaacagcacccagcaagggggcagctgggctccaggcccacagcctcccagcccagcccctggcctgcacacctgcaccacctgcccgggcccctgggcactcctgcacccgcctgcccaccctcggattcttccaggctgcacagggccggggaccaggtcccgggtggggtgagccagtgccgggtctgtcaccaggcgtgcctgtccacagctggctcctgtggctccgggggactgggaggctgctctgggagtgacttggaggcccatgggccgctgagccgcctccatcccagctgtgcgcggccgccctcccccacccttgcccttagtgcgttgccttcaggcccttggtgcgggcacctctgccctgggtctgaatgtgtgttagggttagggacagggacagcagtgaggaggcctaacaggccggggtgtggggtgaggcccttcctgctctgtggttggctctcctacctctgcgcggataaggggcagggccgagatttgagccctggggccctggagccatgggctgccccagggtggggctgggctgagtggaagcagggcccaaggtttgtgcagtgggaaagggccctggaggctcagcagatgcagggcagggatgtggatgcctccccagcccccaggggtggggcgtggatgcagggaggcatcctcatacggggtgggtgtgtgcaggctgtgccggctcagggatcaacgtcagggcccgtgtccatccgagtcttagaggacagaagcgtgctagggcttggcggggacatgacccgatctcatctgagaccgagtgagcacgggcccaccaagccctccggccccagtgcctgctgtatgccccacacccaaaccccagcctcctgagggccaggctgcctctcccgggcctggatgtggggcctttgccagtccacaccttcgggatcccgacccttctccccaggtgcaacaccccagctgtgtcgccgcgtcccctccagccaggagccacccttacccgatgttacaccctctgtgggctcctggggaacctcctccaggttggctttccacaccccacagtccggagcctgctgcagcctcgccagcctctggtcctctgctctcctgacatcactccagccaggctgcggggtgggggtccttccagccgaggcctgcccgcctcagggtctgatcagggagggagggaggtccgagctctgtgggcccagaatccagtgcctgggttgaggacagggaaagggaaggacactgctgccaggcccggaggccagtccgtgtgtcccagctgggtgcaagcctgggcccttcatgggggtgcgtgtatctggctcagagcagcctgtgacaggtagagccccaggacgttggctggggtcgtggaccaggcatggggaaggaggatggggagggtgctgagggcagggccctgatcctggggcctgggaccctctgggcctcttgctgcctgggcctgtgttcactcccgcccaggaggcagcagaggttaagctaagcagaggcatccgggggaagtagctggcctggcgggtggcaagggctcaggtgaggggtatcggctctggtgtgtgtgccaattggggccaggatgtgccaggcgtgcct

SEQ ID NO: 12413 - DNA, 743 bp, Artificial sequence
  DNA replication origin
tcaacccctctccttggaggccactagtaggggcagggccgggtatttgtggagcttgggggcaggtgactgcctggggcgtcactgggctcatgctttccagtgctttctgtcctgtggtgctcggggccttgccccctctgggtggctggggtggggtgggcagaggtctgcctgggcccttcagttctggtctggccctctctctgtgtcagatctgctggaggttctgagtgacatagacgagatgtcccggcggagacccgagatcctgagcttcttctcggtgagctggatggggctgagggagagctgggaggagccactcccttggggaaccccagcagggccaccaccccaacatggcgtgcccgcgctgagccccagggagtcctctgaggctgggcttcgggtgggggccccagcccaggtgttcacagtcaagccgccgccagagcaggcctgccttcagccccgggctgggaccggccagtggcacgtgcgtcctgccttctggataggggcctagggtccctgccgttgccgccaaccatcacgagaccaagaggtgaaggggccttgatgggggctggaccccttggtcacacacctcccacctttcccccggtcagaccaacctgcagcggctgatgagctcggccgaggagtgttgccgcaacctcgccttcagcctggccctgcgctccatgcagaacagccccaggtgaggccaccgccggcct

SEQ ID NO: 12414 - DNA, 1160 bp, Artificial sequence
  DNA replication origin
acattgcgagaaacccagcagggagagactcgcagaggtgcatgcgccggatccaaaggcagctcccggctcctggctccaccccatttgtggagcgctgctgtgtgcaggcaccttgggagcctgggcagtggccgccgtgctctcgggagggcaggtcctggtgcctcagtgtggcacgtcctgccgctcccgccctcctgcagcactgccactgtcttccagaggagagctcagccggctccttgcccctggtcagcgtctccctgttcacccctctgaccgcggccgagatggccccctacatgaaacggctttcccggggccaaacggtggagggtgagtcaggccctgcttcacccacgccaggtcagcgccctgggtcccatggggctgcgggcagcagccagtagccatttgggcactgactttggcgtgagcctggcccacgctgggctgtgggtgggtgggctgttcctcacagtggggagcacccccagagagggccttagaaactcaggggcccaggggagctggaggtggctgctctgcttcaggcacagcaaaaagcaggggagccccctaaggtggtgggggtacagcaggaagaggtcaggcgggtgggcaagaccagcgggtgggcagtaccggtggccgctgtcagaggacagccaaggctgagcggcccggatggagtcgggccgtggggacacttggtgctaagagcaccctggatatggggctgccgtgaggggtcaacccctctccttggaggccactagtaggggcagggccgggtatttgtggagcttgggggcaggtgactgcctggggcgtcactgggctcatgctttccagtgctttctgtcctgtggtgctcggggccttgccccctctgggtggctggggtggggtgggcagaggtctgcctgggcccttcagttctggtctggccctctctctgtgtcagatctgctggaggttctgagtgacatagacgagatgtcccggcggagacccgagatcctgagcttcttctcggtgagctggatggggctgagggagagctgggaggagccactcccttggggaaccccagcagggccaccaccccaacatggcgtgcccgcgctgagccccagggagtcctctgaggctgg

SEQ ID NO: 12415 - DNA, 1467 bp, Artificial sequence
  DNA replication origin
gaacagggagacgctgaccaggggcaaggagccggctgagctctcctctggaagacagtggcagtgctgcaggagggcgggagcggcaggacgtgccacactgaggcaccaggacctgccctcccgagagcacggcggccactgcccaggctcccaaggtgcctgcacacagcagcgctccacaaatggggtggagccaggagccgggagctgcctttggatccggcgcatgcacctctgcgagtctctccctgctgggtttctcgcaatgtgggccaggacccactgggcacaagacgggatggccccttgggacccgggcctggcgctcttccggcggcacaggagagacgtgctgcggtgccgtgtcacctcaggcagggaaaaaccaaggacaagccttgcccagtaggaccaggggaggcttcctggggagggacacctcggacaagcactggtggatggtggatgtgccagggacgggggggtggggagggccatttgccggggcggggcgatgtgccggggggcaggtgtgctgatgctctgtcaggcaccagtcagtgcttcgtccccttgaggtgggtcaggggccagccagcaaggtcccaggctcacacagcccccatcgggacgcctcggacggcccagggctggctgtgcgctgggaaaaccaggccctgtaggactgttccgcagctgcttccagcagcccctggcagccccactcaccctcgccctcttcgtccaggcctcggtcggtcctgtcgtccctgctgggcaggctgagccctgcaaggagggatttcagcatcaccaggtcactgttgtcgaaggacaggtcgctggggagagaagatgctttcacctgggaggaagacgctggcaggaggaaggctgggtcaggggtcaaactagggtggcatgggagcgtgtggacacaggcatgcaggagaggccaggacgctcagagggagggccgggcggggaagccacatgtgcgtggaacgggacagagagccagagagctgcaggggtgggttcagacggcttcggcacagggtggggcggcctctgcgccctgggatgagcaccacgctcagcagccctccccggcctcaggagcagcatatctgacacgacacggccttcccaggaacaccctccagaccccgctggaccctcgccggaggcccgaggcttccctgcagcccgtgggcactcactggagcgggtcggcgtgcttctgcaggaaggagatggctgctggggcattgtaggtaatgtacttatggatgaactgcacaaacttgttgatgaaggcagccagatggcgggaggacttcctgtaattctgcaaagcaaaagcggcaccctcgagctgctctgccccgcagggccaaaacagagcctgtgctcccatctgctcccagagcctcagggcatggaccccacagccaacgagcc

SEQ ID NO: 12416 - DNA, 1198 bp, Artificial sequence
  DNA replication origin
cggacggggccccagtgacaggggtgggtggacgggaccaggcgtgatgggaacccacccagggctgggcctcgaccccctccatggctcactcccaggcagcatctggggccggggggcctgagcacctgtctccccactgctggatgcagcctgacaggtgctccgtcaccttcctgacactctcatcgtccccacagcagcagctgagcagcaggggcagccgggcctggatgaggctgcaggcggctgtgtccccgtcctggctccgcgtctccgcctcggccaggatcagctccaccaggctgatgagctccgggccctggacccgcagcaccagctcctcccgccgcttctgtaacgggtgcctgcatcagccccggagcaccaccgcctctcccggatgggccaccccctctcccggatgggccaccccctctcccggatgggccaccctcccaagacctgcctgcggggtgcgctggtcccgcccctgccagatgcgaggaacatggatgcaggcccagaggaagtccagagaggcagaggggtcgaacctgtggggaggcaaaggttccagagcacgaggtgtctcgtctcagcatgggagataccagtcagagccggcgctgggagatttctggtgaaggccagtatgcgcgcagcccaggttggggacagggaggcgcccacctctgttcccggctcttgcccagcaggactcggatgcactggtgcagtgtgggccagctggactgatgcgtgaagagggtcaggaggtagggacggaacgagggcacctgggcctgacctttgccctggggagggaggaagaagcccggatggcctcacctgggccaatggcaggctctgctgaagtcagctgacagcttccccaatgagccactcagagagccgaggcttggggtgctgccggtaacaccggccccgtcatggtgctggagggccgctcctggtggctgcgctgcatctccccgccccttcccacgggagccatgccacacagcggaggtgcccggggctccatgcagcctctctggtgaggccgtccctccctggaggatgtggggagcccagcacctgccctcccttctcctggccacagccccattccctttgggaagatggaggcccctacatgatctacagggtttggcagggccgaccccaccccatc

SEQ ID NO: 12417 - DNA, 1369 bp, Artificial sequence
  DNA replication origin
gatggaggcccctacatgatctacagggtttggcagggccgaccccaccccatccacccaccccatccccacatctggctggtcacagtgctggtccacaggtgactgtgaccctggcctgggttctgctagggccattgggggacctacccttcctctgggttgctacagggacacatggcctgagagcagggggggtgctggggcccctgcaaggctcgcccaggccaaggctgctgcacttcaggtcaggaagagcctttaccctggggtgggtccccgtgctgaagctgggtgccacccaccttcctccgggagaagagcagcctgagctgcaggtcggggcagctgctgaccacctcggggtccagcatttccagccagtccactaggaggcctgacgagggccccagccgcacggcctccaggctgcagggagaaggtggctcagggaagggctggtgccacccgcctgcccaccctggccgtgtgcagcaccccagctcacctgccaccgtccgcacccggcttccccccagccaggggctcctcctcctgcagcagcagggagctcaccaccacaacgggcttacaggctggaaacggggaggcagcatccgcagtggcagagaagaatgcagtcagcagctcctccaggtggggggacctcacctcgatcagcccctggaggactgcgcaagggacaaagagacatgtgggtcactcccaggtcgggtgggggccgctgagtgggtgtgggctagccagggtggggtgtggggtgagcatgtgtgggacacaagagcagagtccagccggagccagagaggagagtgcagccggggccggagaggagagtgcggccggggctggagagtgcggccggggccggggctcactttgctgggtgcagcagtgatcaggggccccccaaggaggaagctccaactcattctcaagaggccccgccctgagccatctgggaggggacctctgtgggcactttccggggacagtgctgagcagacactgtccgtcccccactgggcagctagaaggagcctcaggtttgggtcttcccagggccgccgtggcccaagaggatggtgccaggaaggtacctttgctgatcaggtccggctccacgctgcactgctccccagacctcagggtggcgatgacggcacggacggtggagctgaccacctccaggtcctgacggaaggccagggcctcggccaggcgcaggagcccccctcgcactgtgggaggtctgtgtgagtgccctgtggctccagccctcaccccatcggtgtatcccatccagggaggccccacggtagaagggctcccctgggcccacgcgggt

SEQ ID NO: 12418 - DNA, 979 bp, Artificial sequence
  DNA replication origin
tcacatcacaggtctcaagggccctgggcccctcaggccacaaggtgggggctacgaatgaacagggacacgatgggacgcggttctggcacggagctgcaccgggcgcttagcctctccgctgcgctcctcctccttctcctccgcttcctcctgacactggccttccccgttccagattttcccgctcagcccggaccctcggtggcagagctccagtccccgccccgtggccctcgccctgcagcaggccctgggccaggagctggcccgcgtcgtccagggcagccccgaggtgccgggcatcacggtgcgtgtcctgcaggccctcgccaccctgctcagctccccacacggcggtgccctggtgatgtccatgcaccgtagccacttcctggcctgcccgctgctgcgccagctctgccagtaccaggtacttgggcgtgggcctcttgcgggggaggagggcagtgagggctctgcctcccgcaggacggcccgggtgtcctgtgactgctcctctgtgggtcttgggtctcagtttccaagtgagaaaggacagtgccccagggagtggcggcaggtcccctttttccagtgaacattcccccgggacgggaggtgggggcagtgcggcgtccgcctgtttgcaccacccaggctcggcgctcctgccttgctttccccatctgctggtacctaggactgtgttttacttggtgtctgtgtttactttttcctttgaaccgcgtgggagccctcaccagctggggggttttgaaagggtctctgtgaggtcgtctgggcccgtgcaggggaggcaccgtttcagacaggaggcgggatgaggttggcccaggctccaagtgccggtcgcggcaggtctcagcagcctcacgggccctgctctgggcctcgggtgccgggtccccgtgtgtcctctgccagggtagccacgtgccactttgtccccgcagcg

SEQ ID NO: 12419 - DNA, 1019 bp, Artificial sequence
  DNA replication origin
gacaccaagtaaaacacagtcctaggtaccagcagatggggaaagcaaggcaggagcgccgagcctgggtggtgcaaacaggcggacgccgcactgcccccacctcccgtcccgggggaatgttcactggaaaaaggggacctgccgccactccctggggcactgtcctttctcacttggaaactgagacccaagacccacagaggagcagtcacaggacacccgggccgtcctgcgggaggcagagccctcactgccctcctcccccgcaagaggcccacgcccaagtacctggtactggcagagctggcgcagcagcgggcaggccaggaagtggctacggtgcatggacatcaccagggcaccgccgtgtggggagctgagcagggtggcgagggcctgcaggacacgcaccgtgatgcccggcacctcggggctgccctggacgacgcgggccagctcctggcccagggcctgctgcagggcgagggccacggggcggggactggagctctgccaccgagggtccgggctgagcgggaaaatctggaacggggaaggccagtgtcaggaggaagcggaggagaaggaggaggagcgcagcggagaggctaagcgcccggtgcagctccgtgccagaaccgcgtcccatcgtgtccctgttcattcgtagcccccaccttgtggcctgaggggcccagggcccttgagacctgtgatgtgaagcagtgagggaccccaacacccaggagctgccccagagaacaaaggtgtccagagcctgcccagggaccaccaggctctccatcaggaggtggtgaggcctgcaggatccccggctccaacagccagacctcaggcgagacctgcaacctcagcttctgtacacatcaaaccgggtgccccgcgcagaggggtgtgcaaggatggcagggaggatgcagggcgacccccttccccaatgttggcctagcctccatctgagagcatgggggtgttacgtgaaagcagcgtgccag

SEQ ID NO: 12420 - DNA, 1053 bp, Artificial sequence
  DNA replication origin
cccttggccacgacaaaatggcagtgatgctgcttgccttcctgcagcatctgtgaggatcaaatgcgtgcacctacgcaaagcatccgcacatagcaagtgctcacctagcacaggagccccgtgctcctcccaagtctcagtttccttctcgggagaggaggtgcctctagccttggcaccagcggtgcttggggctgggccccggtgggtctgaaggctgctcacccgttgtccttcctgaagccgacgacagcgagttccaggcgctgctggacatctggtttccggaggagaagccactgcccaccgccttcctggtggacacatcggaggaggcgctgctgcttcctgactggctgaagctgcgcatgatccgttctgaggtgctccgcctggtggacgccggtacggtccaggctgggcttgggcaggggctgctgactcaggggtcccgggccccttgcctgctccttgtgggcctgggcagcctccggctgtggcagaggagaagactggccgggtagcctcaggggatcctgcagaccatatgtcctggccacagcaggctgtgctggaccctgggaggagacctagggcagcctgtgctggccccgtccgagagggtcttactgtcaggctcaggggtctagagtgagaaacaggtcctcgatggaaaaaagagaaagtggtctggggttggagaggaggaggagaagtggtggggcctctgggtgggtccctgaaggatttgggggttggagctgcagccggggaccccagcaaggactgagcaaggggcctgggcccacgtaggtcagtagggctggtgcctgctcacagtgaggagacactgggggcagcttggtgagtgagtggggctggctctggaaacccatgactgccaaggggtctaggctgttgtgtgcccccggaagccaccgatggcttcggggcaagagcgccctgagcactgagagaagatagtcacagcagcctgcgtgcagcttcggaagtgtactgcgccgtgccaccataggccctctggagcgc

SEQ ID NO: 12421 - DNA, 1070 bp, Artificial sequence
  DNA replication origin
cccccatggaggaggatgtgggggacacagatgtgctgcagggctatcagtggctgctgcgggacctgcctcgcctgcctctgttcgacagcgtcaggagcaccacagccctggccctgcagcaggtgagggcgctgaccggggccgcggcagggaaagatgagagggccgcagccctgccctgttgccgctcagaccaccctcccctccaggcaatccacatggagactgatccccagaccatcagcgcctacctgatctacttgtcccagcacacgcctgtggaggagcaggcccagcacagcgacctggccctggtgaggcagcagggtcagccagcagtgtggccctggggaggggacggggccagccggcagtgtggccctggggaggggacggggccagccggcagtgtggccctggggaggggacggggccagccggcagtgtggccctggggaggggacggggtcagcacagagaccctgccctggggagggtaaggggccagtggtgcagtgccctgggctggcggcttcttgggccacagggaggcattgagggtgggagggccgtcacggctgctgtgctggggcttctatgaccccgtggccacctgtgtcccttccttagtcaccactcactccctggagcctttctccccagaccctgaggatgcgaagccacgggggtgagggtgccttgttcacagcagggtggaatctgagccatcagccttctccccgacgccaggagggtttgggctgtgggcccaggtcgctgggcacctgcccgctgtcctcagcatctctagctcacatgtgtggcgctgactcccatcttctctcctgggtgctgtccttctctgctgggctgcttctcactttgcatcacggttctcttgtccacaacctgcgctgtgacctagtgaaagttggtggcccgagtcctcagggaatgagcgataggtgaacagatggtggctgccgggcagagggcagcagcgtccgctttcagggcctggtcattgtccctggctgtgagagtcgtgtcctccctcccccctggag

SEQ ID NO: 12422 - DNA, 1098 bp, Artificial sequence
  DNA replication origin
gaagccccagcacagcagccgtgacggccctcccaccctcaatgcctccctgtggcccaagaagccgccagcccagggcactgcaccactggccccttaccctccccagggcagggtctctgtgctgaccccgtcccctccccagggccacactgccggctggccccgtcccctccccagggccacactgccggctggccccgtcccctccccagggccacactgccggctggccccgtcccctccccagggccacactgctggctgaccctgctgcctcaccagggccaggtcgctgtgctgggcctgctcctccacaggcgtgtgctgggacaagtagatcaggtaggcgctgatggtctggggatcagtctccatgtggattgcctggaggggagggtggtctgagcggcaacagggcagggctgcggccctctcatctttccctgccgcggccccggtcagcgccctcacctgctgcagggccagggctgtggtgctcctgacgctgtcgaacagaggcaggcgaggcaggtcccgcagcagccactgatagccctgcagcacatctgtgtcccccacatcctcctccatggggggctccttctcctccccgtcccgcaggctgccctccgaaagcaccagcgacaaaccctgtggcagacactcatgagctgggccggctttcggcagtgcaggcagggtctcaccctggccccgggagcacacgcatggtgccctcagagccccgaggagaatgtggcgcttgcttcccacgggagaggccgcaggtaaaagggaaaaacgagactgagctctttctgttaaatgcttctgttcaagttcctgaagccactctggaccctcccgtcaccagcaagaaaggaacaccaggcaggcggcagggtccaccttcacgtttcactagcgcatccttcctacgcagggaaggaacttaaaatacagtcagagtgcactgaacactcatttgatttttacttttcctttttaagacagggtctcattctgttgcctaggctggagtgcagtggtgtgatcacagctcactacagcctcaagtgattctcccatctcagc

SEQ ID NO: 12423 - DNA, 1621 bp, Artificial sequence
  DNA replication origin
cccgcgtccctggcttactgctgtggggccaggccttggggacatcccaggtcaggatgggttgcccgtctcgggctgtcggctgcccctcgaagcagggatgggaggaggaggggttctgggggtgatccgctcagggcgtgctgacgcaccgtgtcccctgtggccctcagggggcccccccggaggcctccccctcacatcctggatcaagtgaaaagcctcaaccagtccctccgcctcgggcacctcttgtgccgcagccgaaaccctgactttctcctccacatcatccagcggcaggtgagtgccgaggctccaggaggtagagatggtggtcttgggaggcccggaaccttccggaggccttggtggccagaagagggcaggacacacctggatgcggggcccatgagctggctgctgcgtgtcgccctttccggctccgcggtcacccggggggctggcggcaggtgttgggcctggaaggtgctgagcgggcgccactgtcgcctgcccaggcctcctcgcagtccatgccctggctggcggacctggtacagtccagcgagggctccctggacgtgctgcccgtgcagtgtctgtgcgagttcctgctgcacgatgctgtggacgatgctgcttccggggaggaggacgacgagggcgagagcaaggagcagaaggccaagaagcggcaggtcagggccgcccacccctcagcccccccgcctctcaccccgcacccctgtcagggcaacccatgcctgagcccaccagccgcgcaccccacgtcctacccgcctggcctgtcacctgcacccctgagagccccttcctccctgcagaggcaacagaagcagcggcagctgctgggccgcctgcaggacctgctactgggcccgaaggctgatgagcagaccacgtgtgaggtgctggactacttcttgcggcgcctcggctcctcccaggtggcctcccgcgtgctggccatgaaggtgaggtggtgggcgggtctttctgcgcacgctcttcatgtttaaaatgagtaggctggggaccgggcacggtggctcacgcctgtcatcccagcactttgggaggccaaggcaggcagattacctgaggtcaggagttggagaccagcctggccaacatggtgaaatcccgtctctattaaaaatagaaaaaattagctgggcgtggtggagggggcctgtaatcccaggtactctggaggctgaggcaggagactcgcttgtacctaggaggcggaggttgaggtgagccaagattgtgccactgtactccagcctgggcaacaagtgaaactccatctcaaaaaaaaaaaaataaataaatgaaaaataaagaagtaaaatgagtaggcctggggcagtggcttgctcttgtcatcccagcactttgggaggccgaggtgggagcatcacttgagtccaggagtttgagaccagcctgggcaacacaggaagatcctctctctacaaaaactgaaaaaattagccaggtgtggtagtgtgtgcctgtgttcccagctacttgggaagctgaggcaggaggatcacttgagcccaggagtttgagaccagcctgggcaaca

SEQ ID NO: 12424 - DNA, 1388 bp, Artificial sequence
  DNA replication origin
agtagtccagcacctcacacgtggtctgctcatcagccttcgggcccagtagcaggtcctgcaggcggcccagcagctgccgctgcttctgttgcctctgcagggaggaaggggctctcaggggtgcaggtgacaggccaggcgggtaggacgtggggtgcgcggctggtgggctcaggcatgggttgccctgacaggggtgcggggtgagaggcgggggggctgaggggtgggcggccctgacctgccgcttcttggccttctgctccttgctctcgccctcgtcgtcctcctccccggaagcagcatcgtccacagcatcgtgcagcaggaactcgcacagacactgcacgggcagcacgtccagggagccctcgctggactgtaccaggtccgccagccagggcatggactgcgaggaggcctgggcaggcgacagtggcgcccgctcagcaccttccaggcccaacacctgccgccagccccccgggtgaccgcggagccggaaagggcgacacgcagcagccagctcatgggccccgcatccaggtgtgtcctgccctcttctggccaccaaggcctccggaaggttccgggcctcccaagaccaccatctctacctcctggagcctcggcactcacctgccgctggatgatgtggaggagaaagtcagggtttcggctgcggcacaagaggtgcccgaggcggagggactggttgaggcttttcacttgatccaggatgtgagggggaggcctccgggggggccccctgagggccacaggggacacggtgcgtcagcacgccctgagcggatcacccccagaacccctcctcctcccatccctgcttcgaggggcagccgacagcccgagacgggcaacccatcctgacctgggatgtccccaaggcctggccccacagcagtaagccagggacgcggggacggggctccacaggcctttcaggttctgccgcagtgcggtcggctccgcctgctccttcagcctctgtcccacccacaccaaccacccacaggtcccgacggcaggcgcagggcggggctgtgtgggctgcgtactgggggtccaggctggtgagctgcgacaggaggaggctgctgctctcagtgatggtctgcttggtggacgcggccgccaggtgcccctcgaaggccaggatctcctgcttctcccgctgggcggtctgcagctcacggttcagcatctccgtccgggtctcctcatccgtcagggtgcacggtgggtaggagtagttgctagggccagacgggggagcgtgtcaccctgccccccatgaagggctcactcccagtgggccacgctcagggtcaaggagggtaaaacccctacggctgctgctgcct

SEQ ID NO: 12425 - DNA, 889 bp, Artificial sequence
  DNA replication origin
ggatctaagcctgctgcactttgttctcttctctttcccttgccgggagagggggtgtggattgaggcggcatcacggaggccagcagggaggtccgcaggcacccccagctcttctgggcagcgcttatgctgccgacaggagtggggactgggcaggctgggggtggtgcgatgctggaggacgtggcaagagaatccggccagagatgggttagacaggatggagccaggcccagtgggccaggtgggctttaacactggccagtgggccaggtgtgaccctgcgtgggatcagcagtgggtgagcctcaaggacagttcagtgcaggtgggacgagagtcggcacagcctgcctaggagacgcccagggctcaccaccagctgtgcctggcagcattggtgcccacacagtgtgggcgagggccgatgagctctggggccagcatcctatctcaccagtgagggcaccacaccaagggcagtggccaaggtgaaggggcgcccgaggctgtggcatcatagggacggggagtgtgtgtggccctggtattgtggggaccaggtgtgtgtgtgtggcgttgggatcgggtacgtttggggccgttgcactgtgaggactgggcatgtgtctgcccatggttttgtggggactgggtgtgtgtctgcctgtgtgttgtggggagtgggtgcgtgtgtgtcctgaggtgggaggcacagctgcttccccccacctctgaaggagcagactgactttggggccttggggacagagctcagattagagcggccatggggagctgggttttggaacacgccgaagccacgtgtgcctctgtaggcaagagagtccctgccctgcaggtctgtccctggatggggcgggcag

SEQ ID NO: 12426 - DNA, 1641 bp, Artificial sequence
  DNA replication origin
cgaagatgatcgggcctccccaaaggcgagctctgtgctgcccacgtgggtccacaggacggaagtgaggtccaggaacaacccacatgggtgcgacttccgacacgaagccaagagaacctcatcagggaaagacaggctttcaacagcggtgccgggacagctggatggccacacacacaggaatgaagccggacccctgcctcacaccataaaaactatgtcacagtggctcaaacacctgaaagtaagagctgggactataaaacccttgacagaaaacacagaattaaatctccacaaccctggactaggcgatagtttcttagacatgacacaaaagcacagaaaccaaacaaaaatagataaaagtggatttgctcaaaattgaaaactcctggccaggcgcggtgtggctcatcacacctgtaaccccaacactttaggaggtcaaagcaggaggactgcttgagcccagaggtttgaaaacagcctgggcaataaagtgaggccccatctctgcaaacactaaaattagctgggcatggtggcacgtgcctatagtcccagctacacaggaggccaaggcgggaggaccgcttgagccagggaggttgaggctgcagtgaaccgttgattgtgccaccgcactccagcctaggtgacagacagagcaagactccgttccccacaaaaaacggaaaatgcaaaccgaaacaaacgtgagataccgtctcaccccagcaggatgtctctgctgagaaacacgggccatgagtgcgggtgaggatggagactaggaaccgtcactcagcgctggcggggacgcaagcgggaactcaaggtggggcagccgctggggagggtctgacagagcctcagttaaacacgtggcccagcaaccccactcctagccacctgctcaagagaaccgaagacacggccacacagatttgtccacacacgctcacagcagcaccgtccgtcagcaggggagcggaagcagcagacatgatctctgtccacacagtggggtgccctcagccacgaggaggactttgatactgcctcatgctacagcacaggtgaccccggaaagagcatgcccggggaaggaggctggtcacaagatcatgcactgtaggatgccatttacagaaaacacccaaaagggccgctctacagaggtgacggcaggtgagcagctgcgtgggctgcgctgggaggaatgaggagtgacagctggtgggaatggggttctcttgggggaaccaaagaaggttctacaattaaattataatgaaagttgtacaacctgtgaacattctgaaaacatggaattgcacactttagataacacgtacatgaattctctctcgataaagccgtgaatatatagagcataaactcgttgtgtaaaaaataacgcacacacgttaaacacaggagaaaaaggtatgactgagctggagacaccggggaagacaacggggaaacagcccactcaaacccaggtaacggttggactcgggccgagccagtcaaggcccgtagtggcctcactggtctctgggaacaggccatgagcaggcccatggggagtggggcgcgggcttacccgggcgggagtggggagtgggg

SEQ ID NO: 12427 - DNA, 3757 bp, Artificial sequence
  DNA replication origin
tgcgtgggctgcgctgggaggaatgaggagtgacagctggtgggaatggggttctcttgggggaaccaaagaaggttctacaattaaattataatgaaagttgtacaacctgtgaacattctgaaaacatggaattgcacactttagataacacgtacatgaattctctctcgataaagccgtgaatatatagagcataaactcgttgtgtaaaaaataacgcacacacgttaaacacaggagaaaaaggtatgactgagctggagacaccggggaagacaacggggaaacagcccactcaaacccaggtaacggttggactcgggccgagccagtcaaggcccgtagtggcctcactggtctctgggaacaggccatgagcaggcccatggggagtggggcgcgggcttacccgggcgggagtggggagtggggagcggggcgcgggcttacccgggcgggagtggggagcggggcgcaggcttacccgggcgggagtggggagcggggcgcgggcttacccgggtgggagtggggagcggggcgcgggcttacccgggcgggagtggggagcggggcgtgggcttaccccggtgggagctggatgttttcagggtgatggtaggtgcacagattcagaacggcgtcgatcagctgggtcctccccaccttcagcacctccacatctaagaccaagagccacacatgggttctggggctgctcacagaccatcaggcacaggcagcgagggaaccggccctgctcgggccgcgtcggggtggggtgggggatgccgcagggtggggcgcaggcctgagcaggagagctgggggaagcttggcttctcactgggaaacagggcactttgctctcggggacacctgggctgggtctagagagcaggcagggctgccaagagagggtagggaggtgaggacgggggtgtggccggcagggtggggacccgcaagccctcggggcagagccacggacgaggcgcgagctggatttacaatcattctacctgtcgcctaaaggaggtgacagacaggaaatctggccgtggccaaatcacaccgagaatgccaattccaaaaaatgtgcaaattccaaagaacggggcagtgactgcaccattgccaaatacacgcacgcttctgaattcccaacggcagatgtggagaaggcaggtccccgagcctcccggggacccaggacccagctgaagcgcagctttgtggagcgccccagaggtgcgtgccagagccggggtttctgcagggacgaggggagcagacccagcacaggcgccatcccctgcagaagccataccatccgcctgcacggcagccgcccgcttcaccaggtggtcagcaagctccatggcgtccgcaggcccgagcgggagctcccgggacagcccgatgaccaggatgcgcatcagcgtgtcctccaaaatgggcacctcggagcacagacgcaggaagaagctgcggggtgggggaggcatgactcggtgtgggctgcccacacctgccagacctgaggggccgaggacaggccagcttctccctcagagcccacgggctggtggcagagggctgctgctgcctcccacgagcctatcccctccaacctgagcctccctttgcaggacaggagccctggctctaagtctcgcctggacaaggggagaaggggaggctacccccaccccaaggcctttggggatacacacacagtcactggttcctacaaccaccacacggagactctgccaccccacagaggcctctagatggttcttgccctcaaggagctgggggccaggagacagagataacccctacacctccaaagcctgaccggaaggccgcagtgaaggtgaacagagcgcccagggcacgaggtgggggcagggtgaactggcaggagccccaggcggggctggaggggagtgtagaccaagaacccacggggtcacccatggggcttgaagggggacagagctgtgaggccagccggctggggaaggacagtgtgcggctgtctggacagaagcaggggcagacggtgcatctgagactgcgtgaagggtggcgtgcccgtggacgccctggaagcaactggaaggcgggggtccgggggaggctgcggctggggcttggagtcacgtggacgcagacggcagctgaatccctacagtggcgctgggacgccagcatgggagtgggagaagggtggcacccaggattgtggaggaggagcaggatggtgctgtgaccatgggaacagccgcccaactcccactggcccttcctgccgcagccggcccggcaccccgcagccccgcccagcccggcacacaggagccccaggcggcagcgcactcacttgcggtcactctcgggtggccagttgtcccacttgtagtaggtctccggctgctctgtgaacagcaccttgtgcaggctgggcaggcagagaagagccctcagtcatgatgtgggtgctcagggaccagccccgttagttccagggaagggaccccgctcccacgggccccagcgctcagaggccgggctgcctggtgcccaagctcagcacctcctcacagcaccaccaaagaacccagggaccactcacggggctgccaggctgcacagcggccgaacggggctgccgggctggacagccctttacaaaatcgctgcagagaaatgcagccccagcctggcagccccaccccaaccaaggcagaggctccacgggaggctccaatgcacagggtgacctgcctggagcctaacggctgctgctgtccgcagagaggggacagactcccgtgtgggggcctggcttgtcccggcttagtggggtgtggggcaggggctgtgcggggcctggcttgtcctggctcagtggggtttggggcaggggttgtgcggggccccggcttgtcccggctcagtggggtgtgggacaggggctgtacagggccccagccgcaccagtgcacgtagtccttaggggcgagcttgctgatggaggggaccacagtgtggagccaccagacggcatcccgctggatggcggcaatctggttctggaatgagcggagcacttccaggtctgaaacagacacgcagcttagtggcccatccgagccatgggccatgaggggctaaggcacccctgggggtccaactcaatgctggcacttgggagggggtaactcagggcacccccagcttctggacgattcccagctggaataacaccctgggaggcatggagtgaccctgacgcgtgcgtgggtgactggaatcctcctgttccgagtgactcgctccggtcaatggcttagagggcttctgcggcccagccttcctgtgaacccataatcaaacacccggactgccccaaacaccacctcccctccccactcccgcccgtggctggggccaccacgcctgcaatgcccccatgctgggccagaactggagcacacaaaggacgctcatgggaacagggtctgagcctgcagctggggtgaggcccggatggacaggaacggggacggcagcttccaggctccgtgtccccgagtagccgtgctgcgggaccgctcctgccgggcgctcaggggacagtgcagcctcggagagccgccagccaccagcctggacccgagacccccaccaagcagggccaggccacccccacatccttactcctcttttctcctttgtccca

SEQ ID NO: 12428 - DNA, 1025 bp, Artificial sequence
  DNA replication origin
gggaatcagatgtgatccctgctcgccaagggctggcagccagtagagcaaggagcccgccaccccgcaccccacactgtctgagacccactgcagcgccctcgggcgccatacctgttggtgctgcgggaaggggcctgtgacagggacagcactgtcgggcagcctcccacgcggcctctctctgccccagttcctggccatggtgttccaggacctgctgaccaacaaggacgactacctgcgggcctcgcgggccctgctgcgggagatcatcaagcagaccaagcacgagatcaacttccaggccttctgcctggggctcatgcaggagcgcaaggagccgcagtacctggagatggagttcaaggtgccagccctcgccgctggggcgcctttccctcactgcgggttccacgcgccgccatccccctcgtcctgggtcccatgcacactccaccccttcggatgctctggctgagcgtgggtacggggatgagtgaggctgtttgcggtgacgcgtcccagagggtagcataggctctgtcctgtgtgaggacctatgaggggctgaccaagcacaggggaactggcaacccctaggctggatgggatgaattgctgccggcagcaaggggagcacgggagcagggaggcagggtggggctgcgggctgcctggctgggttggagacttttcgagggctgtggagggagctggcgctggaaggcacagtgagggtggatcacagagatgccaggtccctgcagccaactcgcagccagcctgccggggtggcctgttttgcggacggggctttgtggatctctgttgactgaacctccctcctgtggccagactaggaccttgtgggccaccggccctggtgcccctcctgtcaggcccctctcccaactggtcctgggctctctctctggatccctgcttgtgtgtgtgtatgtgtgcgcatgtgcaagtgtgtgcgtgctgcacccacgtgtttgtggagtggggctcccgggtgt

SEQ ID NO: 12429 - DNA, 1914 bp, Artificial sequence
  DNA replication origin
ttggtttgcagggagcagcccacacccctccctcacggaggaggaggacagccagacggagttgctgatcgcggaggagaagctgagccccgagcaggagggccagctcatgcccaggtagctgcgtgcctgcccggtcccagttgggggcggcgggggcgggcgcctcggggccaccttcctccctcctcgctccctcctctggcctaggtacgaagagctcgcggagagcgtggaggagtatgtcctggacatgctgcgggaccagctgaaccggcgccagcccatcgacaacgtctccaggaacctcctgcggctcctcacctccacctgcggctataaggaggtgcggctgctggcggtgcagaagctggagatgtggctgcagaaccccaaggtgcgggggcgccccgggggggtgggcggggcagggggtgggggcaggctctgtgtggccccacagcgtggtcttcctgccggggtggccgtgagcccactgctccctcctcggccccgcagctgacccggccggcccaggacctgctgatgtccgtctgcatgaactgcaacacgcacggttccgaagacatggacgtcatctcacacctgatcaagatccgcctcaagcccaaggtcctcctcaaccacttcatgctgtgcatcaggtgcgtggcgagccggggcagagcgggggtgcgggtggagtgggggtgtgggtgggggtgtgggcggagcgggggtgcgggcggagtgggggcacaggcggagtgggggcacaggcgtagcggggacagggtctgtaccctcacctcacccagggagctgctgagcgcgcacaaggacaacctgggcaccaccatcaagttggtgatcttcaatgagctctccagcgcccggaacccgaacaacatgcaggtcctctataccgcactgcagcacagctcagagctggcgcccaaggtaggcccagggtccctggccttgccctccacgccggaatatggggctctgggctggaggggcacgtggcgtctggggaggccggtggattggcagtgcttcgtgggagaatgctcctcggtctcgggaaggagcttttgaaactcacgtgggcatgaggttgagccgtttctagagtgggtgcagccacagcgcccagcgtctttctcagaaactgacactctgtccatttaggagggagccacattgagtcttaaaagccacccaggtttctgagctaagacccagacctgttgccttctgtttttatttttcaagctcattcctgcctttggatagtaaggtagtttttaaaaattttgtggagaccgggtcttattatgtggcccaggctggtctcaaactcctgggctcaagcgatcctcctgcctcaacctcccaaagtgctgggatgacaggcatgagcccctgtgcctggcccagacccgcctcctgtgcattgggtccctcggttaagcaggggtccctgtagccctggctgtaggacccttggatttccgtgtctcctttgaagcgggctcgggagatgctcccatcgccaccagcgcattaggcctcccggtgggctctatggagtgtgaaacacgagggaggcacagccgctctcagctccgcgttcagtcttcgcggcctggcattttgagacaggagtgcgtcctttcagatcctttcagatcttgggtggtggcctttggtttccgttcagcccgtggcgcacgggtgggctgagatggcacacgcgcttctatggctttgccgcctggtgtcccgcacccccagcttccgttaattaatcctcctcatttcacgaggaccgactccccacctgccggttctcagagaggggaatcagatgtgatccctgctcgccaagggctggcagccagtagagca

SEQ ID NO: 12430 - DNA, 1257 bp, Artificial sequence
  DNA replication origin
agtctctgtcccgggcgcagttaaggtagatcacaatgcctctgtccacatgtgtgtggatatgtatttacttattatttattatttatttatttatttatttttttttgagacagagtctcgctgtgttccccaggctggaatgcagtggcacgatctcggctcacttcagcctccgcctcccgggttcacatgattctcctgccttagcctcccaagcagctgggattacaggcatgcaccaccacgcctggctaatttgtgtatttctagtagagacagggtttcactgtattggccaggctggtctcgatttcctgacctcaggtgatccacctgcctcagcctcccaaagtggtgggattacaggtgctagccactgcacctggccgtttgtggatatttaaaaacacagtcctaaaaaactgttgggacagagaagaatcagaatgaaaatgagaaaacctccgatccaacagtggcaaacacgacgataggaaaggtgtgtgctggccctggtgctcctcagaggatgtgggagggtcaggcactcgtctggaggaaggttgtgagccgagcacccatggaaagagggaggaaaagtgggaagaagggcatgctggagactggagctggggtgggtgcggagagagggccactgtgctgcggtccacagtgagaaagaagccgccagacggagccacgattcagtggaaagtaaagctgcaggtggcctggcttgctgggaaatgtctgtagcctttggggtagtcgtgtgggacacagcggagccaggactggagtggctggtgggctagtgctgaggcctgtggggcagcctgttgtattaaggggaccatctggtggggtgcttgtccgctgtgggaactttgctgagggtggatcgctggtccctggcagggccgaccctgagagctctgggttcctcgtggtcttcccggtgtcccgaggctttggggtgaccctgccctggccccgttctgaccgtaccgcctgccccggccagtgctgcccacggtgctgctggatgagatcgaggcggccgagctggagggcaacgatgacaggatcgagggcgtgctgtgcggggccgtgaagcagctgaaggtcacccgcgccaagcctgacagcaccctctacctgagcctcatgtacctggccaagatcaagcccaacatcttcgccactgagggcgtcattgaggtttgagccgggcccctggcaggaggcgagcag

SEQ ID NO: 12431 - DNA, 1741 bp, Artificial sequence
  DNA replication origin
aacagacacctcactaccaaagtcatcaggacacttgttctttttgactcctacaaagaaattacccaaaagagatgctcccacagaaacaaaacactgcagaccatgaggcttgctggggctggtgcgatagctgccagagcgactcccagggagtcacggagccttgagaaatggtcgttgggaaaatggcgcagaggggcaggggcgattctaggcacacagttaaaggcatttctgcgagaacgggacagtggtgaagcttacattcccccgttgatgtccttactgttctgctgcttttcaactgaaaacagggaggggatcaactcttctctgttggtaaccaggagggaaggaggaaccaagtacacatcgcctccgctcaggttgagagaggaacgcaccaggatgggcaaccttgagaacagacacctggggtgtcgtcacgcccggtttacccccagggctcagacagtgcccgtcacaaagggggcgtccaacagacacatgagacaaacaactcaataagggagtgacccggttctcaaagggcagccactggcagtgcaggacgcagatgcacacacgggataagggcatctacgtgagaagcacttccaagaacaagccacaaacatccgctctcccaaaggacctcggccatacgggcagcactaggcctggagggggccttccctgaacacctgatggacggcatgagctgaggggtgttctcgggggatgtccacagactcattaccttcaattggcaccacagatggctctttaatcgacggagaaatggctcgtttttctgccactgcagcctcagccaggcgccccagggcactcagagggggtgtggaggagagtttggggcgtttggtgagaccggtgagggccgaggcactggacaacgcggccgccgcatcccgcttgcgctcagaaggcaggccggaaggggctggcttcagcagggtggacgccgttttcgattcattggcctgaccctttgagcccagagcaatgaagtctcctgggggagggtgccctgcagagaaaggagagagaaaaccgggcacatttgcaacacccaagatggaaaaagactgactctaacctcctgttatgtcagaggggattaaacaagggtcagaggaggcaaggaagaagccagagctcactcagcagcctacagcagagctgggaccagcaggatacgcacaggtgatggtggacagtcacgtagcgctaaccacaaaccaggccatctctggtctatccaaattagtgtgcttagtaacccccgccccgagtttccgcaataggtgctattactctaactttacaagagagaaagggacacagagaggttaagcgacgtgcccagcgtcacacagcaggcgagtggcaaagtccggaggatctgagccgacagttcagccgcagaccccgtgctacgctacactgtgctgcctcccgcctcctggctggggagaccttccgctactgtcggccgccttgcagctcagcctgaaacgagatcaccggggtcccgaaggaagtcgccactgtcccaagcctcccagggactctcagagccgctgaggaccgagagcagtgtttccagaccgaattcctggaaacagccgcggctgcggaacaaccaagcccaacgcaggatccgcggcagctgagatccccaaagacccccaaagacccccaaagacccccgggc

SEQ ID NO: 12432 - DNA, 1367 bp, Artificial sequence
  DNA replication origin
agggggagaagaaggaaggggaggagggggaggaggagggggagggggagggggagggggaggaggaggtagttgttctcaaggtcgaccctgaggttctggcctgggcccgggtgagggcatttgccgaaggcacaggccccgcatgcaggggcggtgatgctggtcagaggatgaggagaggcaggtggcggggcagaggaagctctgtgcagggtgctcccattcaggtgacaggaggaggaagcattaccccatcggatctcccctccccttagagagttaccctgagggacagattgagaaactgtagagggatgaagccgcacagcccccgcctggcgtccggcagggatccgcgcctgaccggcctctcctcccatgggcaccacggacgtctccttccggactcgctgcccacacagcgcagggtgcagggccctggagcccttggggtcctgcggggacccagctggtgcccacaggagtggaaagagaccgtggcgggtcacacagcagttctcaggctgcagcctggggccatgagcctcactgaggccacagtcaaatggccacacccaacttcaggggcacagggagaccagctctgccttgcggtccctggatgaggagatgggacacaccgggcaggcggtgctcaggactccctcggtggcggggcagcgttcgagtcagtgccctgctgggaacagatctccaagatgtggttaagtggcaaaagccaggtgcagaaaagaggagccgtgcgctacctgcagggtgacaaggcagagggaggcacacgggtggctgcctgaacgcacacggaaaagccgggaacacaggcacaaatcagaacacaggctgactccaggggaggggaccagctgctcaggggtcaggggagaccttcgaccctttgactggatgattcccccaccttttatttttatttttttttagacagggtctcgctctgtcggccggctgcagcgtagtggcaccatcatagcttactgcagccttgacctcccaagctgaagagatcctcctacctcagcctcctcagtagctgggaccgtaggcatgcaccaccatgcctggctaatttattcttgatttttgtttgtagagatagggtctcactatgttgcccaggctggtctcagactcccactttggcctcccaaagggctgggattagaggttcatgccaccatgcccagctaatttttatttttttgtagagatgggggtcttgctatgttgctcaggctggtctcgaactcaaccgatcctcctgccttggtctcccaaagtgctgagattacaggcatgagcatcacacctggcaactgtatgatctt

SEQ ID NO: 12433 - DNA, 720 bp, Artificial sequence
  DNA replication origin
gacgtcaatcataactcaaaaaagctgttttcaaaaagaggcggggagagggaggaggaaggcaaagaggtagaggagggggaggaagaggaagaggggaaggagacggaggagaaagagaagagggaggaggaggtggtcaaggttgactcctgagtttttagagaacgaggaagacgaggagcaggaggagagagaagggggaagaggtggtcaaggttgacaggaggaggaggaggaggaggaggaggagggggaggaggggaggagggggaggaggagaagaaggggaacgaaggggaggggggagggggaggagggggaggggaaggaggggagggggagggggaggaggagaggaggggggagggggaggagggggagaagaaggaaggggaggagggggaggaggagggggagggggagggggagggggaggaggaggtagttgttctcaaggtcgaccctgaggttctggcctgggcccgggtgagggcatttgccgaaggcacaggccccgcatgcaggggcggtgatgctggtcagaggatgaggagaggcaggtggcggggcagaggaagctctgtgcagggtgctcccattcaggtgacaggaggaggaagcattaccccatcggatctcccctccccttagagagttaccctgagggacagattgagaaactgtagagggatgaagccgcacagcccccgcctggcg

SEQ ID NO: 12434 - DNA, 829 bp, Artificial sequence
  DNA replication origin
ggagttcaagaccagcctgggcaacatagtgagacgttgactctaccaaaaaatacaaagattagccaggcatggtggtacacgcctgtagttctagtggctcaggaggtgggggtgggaggatcacgtgagcccaggaggtcaaggctgcagtgagctgtgatcatcccactgcactccagcctgggcaacagagtcagagcctgtctctaaatttaaaaaaagagaatcaggaccgccatgtcacggagaccaaaggcacaaagcactggtgctctgtgtggccacaggaccgggcactccggggggagccactgaggtcctcagagcggcgcctgtttcagggaagcgcctggcgctggagcgagtggagaggcgtgtggacggcggggaagtggagttgtggagacaaagcttggggctctgggactcaaagtggggaggccgggggcttggacccgggaaggaaactgaggcagagaggggcatgtttgtgttataggagaccctggagctggcctgaggggccctgggagggagcccacaaagaaggggccgtgagtgcacaatctggggaaggggcaatggaagccggaggtttgaggggtgggcccagaggacaggcgggcagacccagcaggggtggttttcactgcgggaggagagaagtggggagggcctgagatccgaagcaggtcacaggagacatgttgggggtatgggcctcccagagtccttccccttcctcacggctcccgattctctttgttggttcacctctctcctgtgcagcctgggggtggaaccgggactggcccccgctctttga

SEQ ID NO: 12435 - DNA, 1228 bp, Artificial sequence
  DNA replication origin
caggagttcaagaccatcctgggcaacatagcgagaccctgtctctatgaaaaaaatataaaaattagctggatgtggtggcacacaccagtggccccagctactcaggaggctgaggctagaggatcacttcagcctggaagttcaagactgcagtgagctaggattgcactactgtactccagcctgagcagaagagactttgtctcaaaagaaaaaagaagaaggaggaggagaaggagagggaggaggagtgagaggagaaggagaagaggggaggggaggaggagaagaagaagaagaaggggggggaaaggaggagaaaggagagggaggaggagtgagaggagaaggagaagaggggaggggaggaggagaagaagaagaagaaggggggggaaaggaggagaaggagagggaggaggagtgagaggagaaggagaagaggggaggggaggggaggaggaggagaagaagaagaagggggaggagaaaggagaagaagggggaggagaaaggaggagaaggagagggaggaggagtgaaaggagaaggagaagaggggaggggaggaggagaagaagaaggaggaggagaaagaagaaaaagaggaggaagaggaaaaaggaggaagaggaagaaggagggggaggaggaaaagaaagaaaaaggaggaagagggggaagaagaggaagagggaggaggaggaggaggagaaggaggaggaggagaaggacaaagaagtagtgggattgctgggttctagcacaaatcggggccatggtctcatggacagtgtggccagactccttccctggggctccgctgcctggcccctccaccagcaatgcgtccaagggctcgctccctgagccgtgcctttggggcacgagatctgatttggggattcgcctggacaagaagcagaacggcaatgtctttctctgatgtgcatttctctgattacagacaccttttcacatgtttgtcctgtggatttctttttccgtggatgatctattcacctcctttgccttcttttattggttgtgttctttcatacacgtttaggagccctttgcctggtagatctgagttgcaagtatttttcctagtgtgtgctttgtgttgtgactttacttccgaggatttttgccttgaatctgttttgtggtatttagatttttaatcatgattagagtaacctttttccactctgaagttata

SEQ ID NO: 12436 - DNA, 1886 bp, Artificial sequence
  DNA replication origin
gcgggccgcatgagggtctcgggccccgcgcacccaaccccgccaccctcggcccgcgcccccaggcggccgtgactcagcggccaggtagccccggccccgcgccccggtccccgtccccgccgcggcccgggccccgctgccccaccgcccctcacctggcgtcgcgcggagggcgcgggcgcgcggcggctcctcgcgggcacgcgctgtcctcgcgccggcgctcactgtcgcgctcccctcggccgccgccgccgcctggcgctcgggctccgacttcgcgaagaacaacaagtgcccccgcgccgcccgccgccaccgcacccgcccgcccggctccccagcatctgacaccgcttccgggatccgcggcgcgcgcgtcacaccgccctgccccccgggccacgccccctccccgccccgcggccacgccccccggccacgccctcctctcccgcccggggggccgctggccccgcgcgcacctgcaatccccgcgctttgggaggccctgcgggaagatctctggaggccgggagttcaagaccagcctgggcaacatagcgaaacctcccttcccccattctctgtctctataaacataaaaaacattaaggccagctgggaacggtggctcatgcctgtaatcccagcactttgggaggccaaagcaggaggatcgcttgagcccaggagttccagaccagcctggacaacacagtgagacccccatctctacaaaaaaattacaaaaattagtcgggcgtggtggtatgtgcctgcggccccagatattcaggaggctgaggcaggaggatggcttgaacctggaaggtggaggctgccatgatttcatcactgcactctagcctgggtgacaaggtgagaccctgtctcaaaaaaacaaaacaagcaaaccagcaatgtaaaaatggggataagcggctagtgatcacagcctctgtgggtggggccagcccccttctaaagccccagctggtggttgccaggggacacagcaggcccaggatggggttagggcaccactggcccaaggagtcctgtgagggatcctcaggtgggggcgggcccctgagggagctgcctctgcttcctgtcacaggtggaggacaggctggagaggggatccgtctggagccccttgccacgcttctgggtccccaagtcccgcccccctctgagcgctgcaggaagaggagtttcaggcctgggcaaccgagggccccccaggacacccatggcatctgcccggggttctgggaagcctgttttctcagctcaggtgggacccgggagcctgttttctcggctcaggtgggactcaggagccagtgcagggaggtctgtgcatcttctgggtgtcgtccttaccaccatgtggctggggatttaggcagcagcccagtggcctcttgctgtggagcgcgggggcagcctcccgggccatctctcccccccacttgcgggttctgcactggccacctgggaggcccctccttgctaaggcccacacggccgtctggggcagctagccacagtgatgcctgcaacctggccgcagaaacaggtgccaagaaataactcaacagcagcagtagcgacaatgtcccacgtccccaggatgtttgcagaaagacatcccccggggatgggaaaggtgcttcccttgtcctggcccacactctgcactcggggtcctgggatgcgctgggagcctccagagaagctgtggccatctccgcgggactctttacgttactcatggtgtcgctcctctaacccaaatgcattctttccatagcaggcttttgttactaatcacacacttttattatctctttaattttttaatttgtatttat

SEQ ID NO: 12437 - DNA, 1353 bp, Artificial sequence
  DNA replication origin
ggccgcggcggggacggggaccggggcgcggggccggggctacctggccgctgagtcacggccgcctgggggcgcgggccgagggtggcggggttgggtgcgcggggcccgagaccctcatgcggcccgcggcgcggcccgggcacctgcccaggtgggccccgccccgcaggcccgggggcttccccgggacgcgaggctctctcccctgcacgtgccgcccgggccatgcttgccgcgccgggggccccagggcgcggaccccagacctgggaggacgaggatccacgcgggtcggcggcgcgcatcgggcccgcgccttcacacctgcggggggcggggcggggcgggcgccacgtgcgggcggtgcggggagggcgcgggcgcgtggattctccgcggcttccgccccagcgtggcttccgcgtgcggccccggactgccccccgcgcttcctcccggtgacgggcggcgctctggcccagtggctggggtcacgcgtgcccgggaacggggtgggggtaaccgggtctccccacaggcgggatcctgggactggtgtcgctctcagccgcccacctgccagggttgctggaaggaaggccgtggggaggcgggaggggggcaggtgacagtggccccaaggctcgtccctttgctcacgtgtggggcaggggctccggcctcttcccgctcccactgcgtgagttcttctgtgcctctgtcaagttcaggaaactgtgtatgtgcccgtgactgtgtgtgtctgcgtctgcacagcctctagatcctggggggtgggaccaggcgccaccgagaaacccagaaagccaggaccccgcctggccttggcccttgacctgggtccgcctgggacacagcagtggccctgcactgcattctcgcgctcacaccgtgtgtgtccgtgttcgcggggcctcccgtgtccctctcctggtgtcctgcgtccctgagcatgctgttttcttgcttcttaagtagctcttgtagctgaggcagaaattagatccactcaccattcattcaccaggtgacccacaggcagccagccaatctctggccaggtgcctggccttgggaagatcctgagactcaaaacgccccccaccgccccccatcgtggtctaggggatatctgtgtggttcggctctggcagcgcccttcccacccctctgattctccagggtgggctgccaggtctctttactggcactgaggtttcaccgtcacggtgtgttgttgtaaggggttctccaacacagagtggggtgccctatgcagcttctccaaacccaatgtcttcagggacatggagcattaaaagagccgtg

SEQ ID NO: 12438 - DNA, 1065 bp, Artificial sequence
  DNA replication origin
tttataagtcacagactcgtcatgtttccgctttcctacagtttcaggaaactgggagtgtcgtcttaaaatcatagagttttagagcaggtacaagcgaacttgagtggccacatgccccaccccccgaccagctgctgtagatgaggaagcccaggccatgaggtctgctggcctgtcccacaggccggtggggtctggtgtagagccttcctgcttctccgcactgtgcgtcgggtgtcctggggaaggtattggggtggagactgccctctccctgccctcccatgcggggccggctcatctcgtacagcgggggctagtgtggggtgtagggaagaccttctccctgcttgcaaggagctcaccatgccttggggaggccccctgtccccagaaggatctagaaccaggccttggtagagggtgcttgcctacgcgaggaggagagcagtggggagtgtttctggaagaagcagggcagggaaccacgtgctctctgcagatggtgatcagaaacctgaaacggcattggggtgggggagtcggggtttgggaggaacccccaagacttttgactgcctgtggggctgtgtggggggcaccaggatcagggtgagggcatcccatttggcaaagctgtggtccagacaggagacgctggaggccggagcctgggcaggtgctgtgggttcaggcgggtgatgcttgagggctgggatcaagcctggttggcgcgtggatgaggaaaagagagaggggcaggggcaactccggtgaatgatgcggttgggggctggggggcatctgggccccccggaatgcccctgactggacttagaggctgggagcggattgaagccccagggcggccgggggagaacaggatgctgatggggagctggaggccgaggacaggaggatggtgtggtgggagccagggcggggactggagggggtgtggtgtgttctgcagtctgctctctgctgctgcagctgcctgagtcacctctggatgtagcggaatgacacagcttcctcagactgcaaatgcaaggtgaccag

SEQ ID NO: 12439 - DNA, 1431 bp, Artificial sequence
  DNA replication origin
ccaggctgccgagtccgctgcccctgccaaggccagctgatctcagggcgctgacgtagatggcacaggatggcaccagccggtcccggggacggccaggtgggctccaggctccttcgcaccacgtcctggggtgagggtgacagtggagaggctggggcccagctgcctccgccaccgtggggacctgcaaatgccggcggctgggagcaccatgagaaacttttccatgtcagagggaggggccgcgggcaccgcttccagctccactgcgagcacgtcagtgcacaggccggccacgacatagctatgcggtgagtcaccagatgtttacagagccgcgcgcattcccacacacccgggcctcccacccagcaaggacccgctcctgggcccccgggcccactgcccgccgtggcagcacagccgggcggaaaaggaaggtccgggggacaggaccgtctggccagacccacggtgacgtgtggggctcggccagatgccaggggcagagttcagcgtggggatctttccactaaaaagatgcctccgcgatgccctgtgacactgcggaggcacacggtagccgggggcgccccaggaggggtggctgactacttccaggaggtcaaggttgccagggctactgaagcacgcctgtgccccgctccaaccccagtacttcgaggcacacctgcactggggccctctgaagaatgaggacctggcggacgcagggctcccaggcggcccccacgctgtgctcgcaagcctgccccccacctccttgggcaggtcacgactctgctctgccgaggaagcctggaccagccacgcgcctggagagacgacgcagcgggacggcccagccaagcagcaaagcttctctcaggaacccagcacgggatgggatggtgctggcgcctccctctccccaccatgcacagaataaatccaagtagccttaacctaatgtcgctttaaacatcagaggcaagaaagatgacagcttgcttttggaaggacattcagagaagagttttgtatgcacaaaaaaagtttgtaaagcaactgatctaaaaatgacgactgccctaaatggggttttgtgaactgtccgacctcacatggcctccagggccgccagagcacatgtagaaagcgctcccaccccagggccagagacgcagccttagggtgtcatccagggggaaagcgtgcctggggtcgcagagacgcccgtgcactaccccgggcccaaggcaggggctactgcattagcacctggtcagcactgcagccaagctcccctccagcagcccccgaggaacgacgtcctcgcattgtgtcttacgcccagcagctaacaaaacaccagcatcgccacgcacaagcacccgacaccccgagctcctctgagtttcggtggtc

SEQ ID NO: 12440 - DNA, 1199 bp, Artificial sequence
  DNA replication origin
tggaaagatccccacgctgaactctgcccctggcatctggccgagccccacacgtcaccgtgggtctggccagacggtcctgtcccccggaccttccttttccgcccggctgtgctgccacggcgggcagtgggcccgggggcccaggagcgggtccttgctgggtgggaggcccgggtgtgtgggaatgcgcgcggctctgtaaacatctggtgactcaccgcatagctatgtcgtggccggcctgtgcactgacgtgctcgcagtggagctggaagcggtgcccgcggcccctccctctgacatggaaaagtttctcatggtgctcccagccgccggcatttgcaggtccccacggtggcggaggcagctgggccccagcctctccactgtcaccctcaccccaggacgtggtgcgaaggagcctggagcccacctggccgtccccgggaccggctggtgccatcctgtgccatctacgtcagcgccctgagatcagctggccttggcaggggcagcggactcggcagcctggcgcaggaccctgtctcacctgtgcggccctcttgttgtgggggtttgtgggttgcgggggtggggcccccatcggaggcagggctggagggtggagggatttgggcccgagggctccctggcccagggtgtggggagggtcctgggctggcagggaggacgggatgcggtcacccgcccccatgatgcccatgtccagtggaggtgctgaccaaggacaccccccaccgccgtgtgctgctctgatgttcctgtgggaacctgtgtctggtatttggggtatgggagtgggtgctgtgaacccctgtcccgcgagctgcccggcgccttctgcccgcccgtcccggccgccgggtgcaaatgggtttgttgactgcctgccggcctcgtgatgtctgtgcaacctgacctgaagtcaggatcgcgtttgggcttctcggtttccatgacaaccgtgggggctggctcggtcccaaggtcgccatggcaactatcggagggctcatgccggggatgctttggctgggtttttcatgaatgattagaatgtgtgacacaatgcagacgtgaggacggcgggggcggcggcggggacgactcccgccagacggtcaaatgctcggcagggcggcggctcccccacctccctggtctctggctgcggc

SEQ ID NO: 12441 - DNA, 1181 bp, Artificial sequence
  DNA replication origin
ttaggtggaggtggtgatgtcacagccgcagcggccagggccgtggtaggtgtcccgtggcctgtggggagggcggggcgggagggcggctgggcctccacccaggcccaccgtgggggatggcgatgtcaggggctccccagaggccccctctcggggatccaggctgggtccggagcaccggagcctttgccagtgtagggtcgctgtccagcggggccccacactcctcggggccggcacagctgtcttgagggagggaggttttgccaccagtcactttggtcctcggtacggggcaccttgtgctgtgcaggtgcagacgtcttctctgacctcagggagagtcagaacaggaagcagccactgccggcgcctgctggtcaccccacagtgccggcggctgcagcccaggtctgcagggcagcagggggccgcacctggctgccaggccctggggtggggtcccagccgctctgtggagtgtgctagagtgtgaggtgcagccagacctttccctgaaccctcaggcagggacagaggccgggccaggatgcctcaccccctgggaagcccctcaggacgggctgggcccggatggtgccccgtcttgttttcatggtgctgtgactgtccaccccgggctgagaagcatccctgcatgggaggtgggcaccctgtccggcgctgccggccctgacctgtgctggcttctctgcttgtccatgttttccagctacgagttccagggagctctgtcctggtgaccgtgcccgggttatgacgactaatcccaaaccgaataaggcattaaaggtaaggctggttccaagcaggccccgtctcaagcacaggcgtgggaaaggcccccggcccgacagcccctgctatcccagggccgtcctgagcctgtgatggaggcctccctgttgccaggaggaggggggctgctgtggccgagggatgttcacaggagaggtggagtcaggatcggggactgtggttccaggcgatgactcccaggctgagggcgtggcagggtctgctgccttcccgcctgggctgtgtgtccgccgggcgctactgcatgagctcatcccctggctccaggcgtgggcagcgtggccagcgtggcctctggtgaacgcgatgctccagctcccaaggcccgagcccacctg

SEQ ID NO: 12442 - DNA, 2602 bp, Artificial sequence
  DNA replication origin
tgtcctggtgaccgtgcccgggttatgacgactaatcccaaaccgaataaggcattaaaggtaaggctggttccaagcaggccccgtctcaagcacaggcgtgggaaaggcccccggcccgacagcccctgctatcccagggccgtcctgagcctgtgatggaggcctccctgttgccaggaggaggggggctgctgtggccgagggatgttcacaggagaggtggagtcaggatcggggactgtggttccaggcgatgactcccaggctgagggcgtggcagggtctgctgccttcccgcctgggctgtgtgtccgccgggcgctactgcatgagctcatcccctggctccaggcgtgggcagcgtggccagcgtggcctctggtgaacgcgatgctccagctcccaaggcccgagcccacctgtgcctggcgcttgccgcctccacaatggcgtgtgcctgtgggccggctcagtcccagcagcaggacccatgcactctgggtcctcatgggctctgaggctgtcggtaaccaggagtgaccgatgtcaccactggcttttcccgttcagaaagggtcctgtggggccacagctgtcacatgggctgcctgcgtgcacagtgtcctgtggtccctggtgcggatggcgaaggccagccctgagagcgcaggcgtgcaggggcaccgctgggttcctggccaccccagtgtcggtcccaggcagacaccccacgttctcccgccgctgaccccgcactgtggccccccaggtcaagaaggaggcgggcgagaacgccccggtgctcagcgatgatgagctggtgtccatgtcggtgcgggagctgaaccagcacctgcggggtctcaccaaggaggaggtgacccgcctgaagcagcgtcggcgcacactcaagaaccgcggctacgcggccagctgccgcatcaagcgggtgacgcagaaggaggagctggagcggcagcgcgtggagctgcagcaggaggtggagaagctggcgcgtgagaacagcagcatgcggctggagctggacgccctgcgctccaagtacgaggcgctgcagaccttcgcgcgcaccgtggcccggggacctgtggcgccctccaaggtggccaccaccagcgtcatcaccatcgtcaagtccaccgagctctcctccacctccgtgcccttctcggctgcatcctagtgccggccgggggcggggggtggcgggcggcgggcggcgggcaggcgggtgggggcacacccctcgtacctgtcactgggatgcagactctcgacatccgagtccaagcgcaggcccctcgggcgcaggcagctcacaccaggaagagactgtattgcagggtgaagagtgggctcccgtgggcccagagctgcacgccggtccacagacacactcacgcccgccacctgctccccgcaggatgtgtctgtgtgtgggaattggtatcttgcacccgtgggagtcgggacatataatggaaaggccctcgggaagttccgcgtcctctgtgggggctgccggaagacacggccccaggagtcaggcccctgtggtcaggtctagcatggggcttgttttccactcctgctgtaagcagccttcgacacctgtcctgccacggcctcccagccggtgcgggagcccctcactgccctgaccgactccgcagtccccggggaggagcatggatggtgtgtcggcagctccgtccttccagctgtcccgttgcagtgcccgtgatccgcgtctgccttagcaggggcctgcgtgagtgggcacggtgtgggaggtcgcctgcgtggggtggtgtctgtgtgtgtgcacgcacgcctgccatcaaagcagcagggctgagggggtgcagcttgctggtgttcactgggggagggcctgtgggcacacatggcagagagagtggctcacacgtcgtgaggtctcccctgtgctctggtgacccgaggaggtcgtgcagcacagcgcagaagcccctgcccacgggatccggccccccagacaccgaccccacaggccgtcccggatctcagcggacacaggcaggagcgccccatcatttgacggtgagcaggactcaggctgtgtgtcctggagctacttctcaccaactgtggtcagtgcagggggaacgaggaggtcttttgggggcctggcgaggggaagggctgctgcagtctagggagagggggtgcagcctgggggatgttggtggacatggatgtggaggtggaaggaggaggacgttgcgtggagtggtgggaggaggcgggagccgtgtgcgagagcaggtggaaagccttgaggggcaggaccaggatgcagctggcttgtagaagagctcaggagtgagcctggcactccagagggcgcggcgggtggggaggcagcaggcaccagtccaggagagcttcgtggacgtggctcctgcgcgcacacccccaggagcacagccacgggctgcaggtgtggctggcctcagcactcagtcctcacccggagcctttgcctgctcctccttccaagagcactgaggcaccagtgggcttggcactccacctt

SEQ ID NO: 12443 - DNA, 1123 bp, Artificial sequence
  DNA replication origin
cccacgggtgaggctgcttctgcttctttccaacacgactcgaaggaaagccctgagggccgagcccgctctgcgtggacggaaggcagcgtggggcggtccaggccggggctcaacctgcctcgagggggagcgtgggcgcatgtgagcgggagggacggagactagcgtggttccagtgtcgtcatcgctgctaaaaaaggggtttcccggtgacaggccccgacagaggagcaggccatgaggcaggcaggagccgcgtatctgggcccagcgcacccgccaagctctctagcctctcctggcctcagtatccttctctgggagatggtccagctgaaaatccccagcatccacaagaaacggtggaagccctgggggccctggcctggcccgggtgcaggctgcatggccgggcggggcggtgtctcctttcacagcttccccgtctgtccgcagcctccaggagccccacacagggctggggctctgtgcccccaactcacacccgtcggctcccccaggaggagcaggctgggcccagagccgcagggtgggctgcagggaggtctgacttagctggggaaagtgccatccctgccattgctagtgacaagctcgggctgctgtggccccagcacagattcaacactcactgcgctatgtgccagctgttgcacactcacctccacacccaactcacaggaagcaaggctgggaaggagggaactggccccaggccacacagatgctgcgagttgggattatgatcgggtgcagtggctcacacctgtaattccagcacttggggaggccaaggcgagtggattgcttgagcccaggagtctgagaccagcctgggcaacatggtgaaaccccatctctacaaaaaaaaaatacaaaaattagctgggcgtggtggtgcgtgccggcggtcccagctactcaggaggctgagatgggaggattgcttgagcctgggaggtcgaggctgcagtgaactgtgatcacgcccctgcactccagcttgggtgacaaagcaagatactgtctcaaaaaactcgagttgggatttcaccctgcgtggtccagcactgaacagcgttcacacctcggtcagctc

SEQ ID NO: 12444 - DNA, 1813 bp, Artificial sequence
  DNA replication origin
cgcccagctaatttttgtattttttttttgtagagatggggtttcaccatgttgcccaggctggtctcagactcctgggctcaagcaatccactcgccttggcctccccaagtgctggaattacaggtgtgagccactgcacccgatcataatcccaactcgcagcatctgtgtggcctggggccagttccctccttcccagccttgcttcctgtgagttgggtgtggaggtgagtgtgcaacagctggcacatagcgcagtgagtgttgaatctgtgctggggccacagcagcccgagcttgtcactagcaatggcagggatggcactttccccagctaagtcagacctccctgcagcccaccctgcggctctgggcccagcctgctcctcctgggggagccgacgggtgtgagttgggggcacagagccccagccctgtgtggggctcctggaggctgcggacagacggggaagctgtgaaaggagacaccgccccgcccggccatgcagcctgcacccgggccaggccagggcccccagggcttccaccgtttcttgtggatgctggggattttcagctggaccatctcccagagaaggatactgaggccaggagaggctagagagcttggcgggtgcgctgggcccagatacgcggctcctgcctgcctcatggcctgctcctctgtcggggcctgtcaccgggaaaccccttttttagcagcgatgacgacactggaaccacgctagtctccgtccctcccgctcacatgcgcccacgctccccctcgaggcaggttgagccccggcctggaccgccccacgctgccttccgtccacgcagagcgggctcggccctcagggctttccttcgagtcgtgttggaaagaagcagaagcagcctcacccgtggggcggaggcgtctgagggtcaggaggcagggaggagagagggcctctgtggagccggctgcctggtgtccaagtccctgctctgtgacctcaggcaacttgctccgtctctctgggctcggtcgctgtcccagctggcttgagcgttgagcatgtcagtttcctggcacagtcctcggctggtctgagggggcatttggcggaaactgacttctcccctgtcctaaagtgcaggcctgaggtgttgctgacataggggctcagcccctgacacctcagcctctgccgcccggagcccaggcggtgtctgggtctccagaaagggagccctcggccacacaccctccaaacgcagatttgagcaacttgacccctatcggggtggccttccccacggcaagggcagagcaggcctagagcccagccagtgcccccagcctccagaaactgcccctcggcagcaggtccctggggacctgctgacagagtgagacacgggggccgcctggtgggtctattcctgtggggatccaataagacaggtgggcgtctttgcagccgtgcagggaggagctcagcctatcttatcaggcagccgggctgggccctgcagacccactggccttggatccccatgtcctcagcccaggaagcaagaggctgggagctggccctctctagcccggactccactggtctgtgcccgccctgctgagtccctcggagaccccaggtcccgctgttcctggtgaccgtggccatgggtggggggcagcacgggtgggagccgcggtcccggggtggtgcccactggagcttcctgtctgctctccacgcccagtgcctgagccccccaggccttgcccacttctgctgcccctgccccagcccccacccaa

SEQ ID NO: 12445 - DNA, 985 bp, Artificial sequence
  DNA replication origin
tgtgaggccctcggagcccacttcccatcctccctccagccagggggtcagggcacctgatggccctggcaggcacccaggtgggcccgccaccgcaggagagggcacctgagccaatcggaagagcctggggaccccctgggatcacccagccatcagccccaggagccactgtggggcggagagtgagtgtggctgcggggccttggctgcacggaccccatgggagctgtgagtgggtcagactccctggttcaggagacagacagcggacggatcccaggctgggcagctggagggaggggcgccggggcgctgggcagccgggctctgacacagtcagcagctccgggcgccgcaggccggcggggtccacacaggctggccggggctgggcctccttggagcctgctacggccctcgtgggcacgtggagaagggcccacgtgtctccacacgccagccacaggggagccctggccaggcgcccagccaggggagcgtgtgcctgggatgggtcacagaaccagcgggcacctgtgaggctggccagcaccgtggggctgtgggaatcgctcttatttatatttaaacaccttggattttctaccgggtcttggcttctgttcccgcagggcatgagcctgaggagcaggacgcggtgggggtcacaggaggctgctgctcagagtctgcatgcgggaaaggggtcccacctgtctggggtgggcagcctcgtggtccagggcagtgcagggcagagcctgggctgtgcgatcacagccactgcctttctcctgggagcctccacttcctccaaaacgggccttgtgccagccccacccgcggcgagcggacaaggccacgaaggcagggccctgagtacctgggcgggggggacactcccagggggcacagagggggctcccacctgggcacctgcctcctgcccttctcttcttcctccacgtgccaggtggggccc

SEQ ID NO: 12446 - DNA, 1321 bp, Artificial sequence
  DNA replication origin
gagacccccgactttggaggcgccctgcccccctgaacctcagtctcctggggtgggacgagactacacggacggggtcacagcacccgtcagaggagccgctgcggggtctggggcctcttcctcccctgcagaccccgtctggggctggggctgagcggccgtggcgtccgcagggctgctgctggccatcctggagcggtgcggggtcatcccggaggtggagaccagcggcgggaacaagctgggggctggcacgctggccgccggctaccagaacttcatcatctgcgtggagatgctgttcgcctccgtggccctgcgttatgccttcccctgccaggtgtacgcagagaagaaggagaattcaccaggtacaccctgccttccagctggggcacccggagcgcacagccctgccccgggcaccgtgtctgtgtccgtgccattctcgaggcccaggaatgccagctcgctgggcagggagacgggcaaagggcatccggctccggacaggcacctgggctgtgtggggtccaggcggtcccggaccccaatggtgatgggggatgggtgtcccctgccaggcacaccccctattagggcggagacagcctgtggcctgccggcttctcatcagtcactgtggagagaccagggtgcccacccgaggccagccaaaggcgtactccgctgcttggagcccctcggaagctctaggggacgtggtccttgtcaggggtctggccagggacgggcccggtgctgggtggagcaagctgggctggggtccaggggtctggggccaccctctgctggccgaggccagacctggacatgcaggagctacagccctgggcatcctgggaggggacttgtccggggagctggagtgcaggggggatggtggggctcatacactgccctcccccagcccccccggcacccatgcagagcatctccagcggcatcagggagacagtgagcccccaggacatcgtgcaggacgccatccacaacttctcccccgcctaccagcactacacgcagcaggccacgcacgaggcgcccaggcccggcacccaccccagcggcggctccggcgggagcaggaagagccggagcctggagaagcggatgctgatcccctcggaggacctgtaggggggcctgggctgccagtgctgtagggacccaggctgcccaggcctctggggaagaacagggtccccccacccaccaactcctgccaaaggtggggcctctcctgagagcccacctgtgaggccctcggagcccacttcccatcctccctccagcc

SEQ ID NO: 12447 - DNA, 1963 bp, Artificial sequence
  DNA replication origin
ccccaggcccaccgggtgccgtcgcccccaggccactctgcagttctgcctggtgaagcccgtcatggccgtcaccaccatcatcctccaggcatttggcaaataccacgacggggacttcaagtaaggcgggagctgcggggacacctggcatgaggtgggcactgggtcccccggggcccgggagtggggcccaacgaggcggacttggcgtccagctgggctcaagtaaggtgggagctgcgggggcacctggcatgaggtgggcactgggtcccctggggcccagcggtggggcccaacaaggcaggcctggcgtccggctgggctaggggccccgcccaagacaggtacccacttcttctccacaaggacctcggtgcctgccaaggccgggggcctggacctcccctcacaggacacggctggggtgagtctagcgtctgtgccagcatctgcgccgaggaccccagggcttctggccaggcagtgatggccccagcccccgcccagccttgagcactcttggcattaagggcacctgggccaaggggaccaaggtccaccccgacctgttggctgaacagacaggcagccacccagcacaaggaggacccctgcgaaggtccacacagctcaccccttggacccctgcgaaggtccaaggtgctcaccaacaccacacagatgctcacacacggggacacatgtgctgtcacctgtgcgcacacatcacacacgtgcatcacatgttcacacatgcacacagcacatgcgcaaaccgtgcacacaccaccacacatgtatgtacactcacatgcacgcaatatgtgcacacacacagcgcaccccacctgtgtgcacacgacatacatgcacacacacctatgtgcacacactcacacgggaacgacacctgtgtgtccaccacacagaggatcttcaggcagtggccaggtggacggggttgggaggtggcgttccgacagaggcagcctggatgctgcctgagcagtggacaggatcctgggacgaggaggagcagggccggtagggagaacggccacgtccctgccctacccctgcataggccccccagccacccccagctccccacgctctcctgcaggccctggagtgaggatcagatcggggcaggatccctgcagggcccatgctcccaagctcagggtggggaccaggctgagggtgcagcggcggtggctctagggtggggacagtggcggggtcatgggaccgccctgaccacagcccccgtctgtcctagtgtccgcagcggctacctctatgtgaccctcatctacaacgcctccgtcagcctcgccctctacgccctgttcctcttctacttcaccaccagggagctcctgcggcccttccagcccgtcctcaagttcctcaccatcaaagccgtcatcttcctgtcgttctggcaaggtgtgtggggcaggtggggcaggggtgctaccgaggtgggggctgcagtccagtgagcctggggtcacctcacacccctttccccagcccccacgtgcttcagtttctccagctgcagcacaggtcagctggaagccagggtagaacctgcgggcatgagggagtggagaggtcccgccagcacgggggagtggggaggtcccgccagcaggtggagagaggtcgcacagaggccacaccaggtgtttcctgaatcctggcccccactgggccctgggccaggccagggcactgacagcccactttggcagaggaggatggccaccagacagggcacgggcccaggatctggggctggagtggcagggcgggcccgggagagctcctgagcacctgctgtgccgagacccccgactttggaggcgccctgcccccctgaacctcagtctcctggggtgggacgagactacacggacggggtcacagcacccgtcagaggagccgc

SEQ ID NO: 12448 - DNA, 1402 bp, Artificial sequence
  DNA replication origin
ccaccttacttgagcccagctggacgccaagtccgcctcgttgggccccactcccgggccccgggggacccagtgcccacctcatgccaggtgtccccgcagctcccgccttacttgaagtccccgtcgtggtatttgccaaatgcctggaggatgatggtggtgacggccatgacgggcttcaccaggcagaactgcagagtggcctgggggcgacggcacccggtgggcctggggccaggtcccccaggggcccaggaatggggattggggcagccagcaatgagcagccccctgacactgggtggggtggcgctgggccggctagggcccctgacgggcttgggtgggaggagggcgggcagggctgggtggcccctcacctgcttacagaagcgcaggaacccgatggagtaggtcatgccccggaggcagcaggtgccgtacaagcagctggacctgcgggggacgtccctgagccggtgcgggagaatgcagccccggcgccgccgggctccctgtcccaggtgtgtggggtgtgggggctctggggtgacgggcttacttgatgggctttccacgaatctcagccatgatggcgccctcgcctcccaggtactggaaacacaggctcaggaagctgtaaatgacaaaggctgcagggagcacagagggggaccggctgtgagccctgagctgcaccgggaccccatggcgcccatctcaccagggcaggaggaggctcgggaggggctgagcccagcaggccacacagcaagaggctcctgatggaccccatccccagcggggcagcctgagagggtcagggtgctccatcagggccctgctttcaccccaggccagggcaggtccaccgagcccctctcacggaggctgtggggtcagtcgtgtgttccaggcctgccagcgccgctaaccctgactatcctggcagcccctctgacgggccgggagagtggggtgccctggggactggccatggaagagtgtgcgtgcacgcaggccccggggagtctctccctccgctcccccgacctgacgcagcctggcgcccaccttcgtagcagtcccgcacagagtcgaagtagacgtagtactggtggtctccgaggaggaggaggctgagccaggagtcgaaggcgtagatgggcacgatgaggagcaggcggatgatgtaacgttgctcctgtggcacggtgtaggagcgcaggtgcagatagatctgggcgcaggaggggtcgcatgagagccgggcccgcctggtacccctggaccagcccaggtgagccgggaaggaggtgggggtgggtgcaggagggtttgggtgagagccaggtccacccggtacccctgcacaagcccaggtgagccgggaaggagg

SEQ ID NO: 12449 - DNA, 1423 bp, Artificial sequence
  DNA replication origin
ggggggtgcggcctggtgggtggctcagcctcagctcccgtctcactgtctcctccctcccccgctgcttcctgctgccgggagccagtacctttgccctcactcctcccggtgtgtgtcctccctccctctgcagatgagtaatgtctcagggatcctggagacagccggcgtccccctggtgtcagcgaactggccgcagcccagccccccaccggctgtgccagctgggccgcagatggaccacatggggaacagctcccagggggccccctggctcttcctcacctccgcactggcccgaggcgtctcggggatcttcgtgtggactgccctggtgctcacctgccaccaggtaagcccttccgcccccgagcctccttcaggaccttggtctccacaggacgtggccgtggctcagcccggtccccctgggtgccgctgctatagacgctgtcagaagtgggatcggccagggcacgggggaggggatgagcttccccaggatgtggcatgtgggagctgggcctgaaaatggggagatctctgccaggctgagggcagagcgcccaccgggcacccctggctatttcacaggctcgtcactcggctcactgaggtctgcagtgtggtcccatttcacagacaagaagactgagtctcagagagaccagaggtctttcccaggctcacatagctggaaaggggaaggggccttctccttccagaggcgtgacaccctggagaaggctggtgggaggttggcagggggttggactttgctctgtagggagctggggagcaaaggtcacagcttgttagagggaccgggactcctgtgcaggagatgggcgagaagcaacttccccaagcccgaagccacacacagcccccgacccggagcagtccccaggtgggaacagaacagcccccaggtagagaagcggccaggcgctgtggcaaggaagggccaggcaggggcaaggaggaagtggtgcccgagggcaggggctgggcagagagggcagggagtcagggacaggaccctcctgagagactcagatacacagagaggccagggcggtgtgcgcaggggtggggtgggagtgcgtgtgtaggcccgcgagggccacacggctgcagggatttgtccagagcccttgaccccagtgcggtgaggtggctttcagggggtgctgggagcccaggaaggctgtggagggctgggctgagggcagagctgcttcccgggtgcacggggcactggtgtagggaatggatctgtaggtgagctggggcagggggccatcaggagactggcaggcagggacaccggtggccacaagtctccgagggagcatctcagtgacagtttattaactgcttattagccgggcatgggggcctgcactgttagtcccag

SEQ ID NO: 12450 - DNA, 1179 bp, Artificial sequence
  DNA replication origin
ggtagcaggcgtgcgtgggcaggggcagagcttggtggcgatccgtgtcccgacaccctcaggctcccgaatgggacttttcaggggtgagggggccaaagaaggggaggcaggggctgcgtcactcgtgaaggggcatcgggaccccagcccacttgtggtcccacgtctgaaatccaccggacagggagattggtccaggctcacacccgctgggatggcaggaggcaggggtggcacgtggacagatgtgggtcccaaaatccgggcaggggggaaggtggagggtgtggtccgtgccagctgtacccaggcaggtagggctggctgggtggggagggggtggggctgggaggagttcctgggtctggggagaggccactgctcaggagcaatcatctctcagggacccaggctgcccgccgctgtgaggaggcggcagcagaggccaggaggccgggggccgagcttcaggcccaccccgccttggcccccccctcaggcccagagacctgcagccaacctgcctgacaggctgagcgccaccagggaggtgagctgcgtgggtgtgggagtgcgagagtgtgtgtgtgggggaagggggtgcataccagaggggtatggtgtccaggctgagcccctgcacttcaatggggtggggggctcctcgaaaaaaaaaacataccttgaaattcggagaatcacagtccgccaacccctaagcctcaccgccacctcagaggctgggccccaggacggcacctggacaccaaacagggtctccagccagcctggcaagtccaggccagacgagcaccccccatcctggctccagatgaaagggtgcccccgacccgtacacgcccagggctggcagctccctcaggtgaaggcaagtataggcaggccctgggtgactttctggggatgggggcaacagagggaccagggacaggagcagggaggtgggggcttggccccggaggacaggacgggagacctatgggaggaagagagcagatccttgggacggccccaccctgggatctggggctgatgggctcaggcagaacagaattgctcgagagtcagaagctgaggcaagcgcccccctatgacctgccaggtcgccaggtcagctgagacagtggagctgagtcccagggcctggccaggctg

SEQ ID NO: 12451 - DNA, 998 bp, Artificial sequence
  DNA replication origin
ttccaggtttttgctctgtgggtgtttaggaagtcgtgcctggtggcacccacagtggtcctgagagggcactgcctgtgtcctcgtgttggggttcaccattaggtggtgtcggtaggagccacctgagaatagggtggggacgggagagagtcccttaaagcaccagcggatgatggctgcatttgacaagagagagcggagactccattagccattaactccccagggagctcatccacgtggcgggggcgtgcagggcgggatgacgggtgcaggaggcgcgatggccatcagctgatacagcgaggccagcagcaggagagcagcaggagaacagcccagcccggatcatccaagctttgccgggggcctggcgggcacagacccagcctgggtactgtgggggtgcatggatgctccttgccttgtccctgaacacaagaggccaccgtccggctgggaccaaaagccagagaacagtaaacccaaaacacggcagttcagaatgggagacgtcccaggccccaggtgagaaacaccgagctggctacagatgcccaggactgggaaggcttcctggaggaggaggcttgaatggggcctagaaccagccacgggacacctcagaggtccttccaggggttggacagaatccgaggcagaagagaaaagcaaatccgatcaaatcactgggcttcctccctcagggctgtgtgctggggttaccccaacactgaatctctgcatttactgagtgagtgtctcttccaggaaggggtgggcacggccctcttgcccactggtgggtcccagcatccagcagctggggatgctccgtaaatatctgtggaccgaatgaatttggacaatgagtggaccagtgccaatgaggtgggggctctgtagttgaagagtgtggccctgccaggcgtggtgactcacgcctgtaatcccagcactttgggaggccgaggctggcagatcacttgaggtca

SEQ ID NO: 12452 - DNA, 2121 bp, Artificial sequence
  DNA replication origin
actggaggtgcttgtgaaacagctccagaatgaacgttcaggtccctatctcaccctcgcccctgccccaccctctccagacttgacatgggcaggactggcctcttctccatcccatggccagcttggcccctgctgcagccccagcccaaacatctcttcatcagaaaccacccaggcccccggattccaattcatcccagctggtctctccagattctcagcattcatgtacacagaaatacaggcatgttcgtttcttgttttctttctcttctactaaacagggagctccgtggaggcagtggcctttctagtcctgttcactgccgtatctccagagctgacagagctcctacagtcctagacaagcaaggactgcttggatgagtgggagggtggatggctgggaggatggatggagggaggatggatgtgagggtgaatggatgggaggatggatagacggatggatgggagggtggatgggtgggagaagggatgggtggatggatggatggataggaggatggatggatagaagggagggtggatagacgggaggataaatggatggatggatggatggatgcatggatgcatggatggatgaatgcatgagtggatgggagggatggatgggaggatgaatagatagatggatgggagggtggatggatgggaggatggatagatggatggacgggaaggtggatggataggaggatggatagatggatggatgggaaagtggatggataggaggatggatggagggatggacaggaggatggatggaaggatggatgggaggatggatagatggatgaacgggagggtggatggatgggaggatggatggatggatggatggatggatggatggacggacgggaggatggatagatggatggacgggagggtggatggatggcaagatggatagatggatcgatgggaggatggatgggtgggagggtggatggatgggagaatggatggatggatgggaggatggatgggtgggagggtggatggatgggagaatggatggatggatgggaggatggatggatagaagggagggtggatagataggaggatggatggatggatggatggatggatgcatggatggatgggagggtggatgtagggaggatggatggatggatggatggaagagtggatggatgggagaatggatggatgaatgggagggcgaatggatggcagggtggaaggatggaaggatggatggatggatggatggatggatggatgcatggatggatgcatggatggatgggagggtggatggatgggagggtggatggatgggagggtggatggataaatggatggatggatagatgcatggatggatggatggatgcatgcatgaatggatgggagggtggatggatgggagggtggatggataaatggatggatggatagatgcatggatggatggatgcatgcatggatggatgggagggtggatggatgggagggcggatgggaggatggataaatgggagagtgggtggataggagggtggacgaatgggaggatggatgaatgggaggatggagggatagaagggacagtggatggatggatgcacggatggatgaatagataaatggatgaatgggaaggtggatgcatggatggatggatggatggatggatggatggatagatgggagggtggatggataggaggatggatggaggagggagggagggagagatggaaagagggaggatagatggagggagggaggcatagaggagagagggatggagggaggagggaaagaagaaggaggagggagaaaaaaggggggaagaagggggaagaaaaggggcaggaagcagggaaggagggaggaaggagggcagactagcgcccttggcctggggctgtgtccctctggggtggtgaccttgggaccatctcggaaaggcagagaacctggggcactatcagcagaggtgcttctgggcttgggggtctcctgcgggggctccagtccaccctgcctggatagcagcttcccaagggcccaaggtgccagggctgggctctggcttctctccccatgttcaga

SEQ ID NO: 12453 - DNA, 1199 bp, Artificial sequence
  DNA replication origin
tgattcaattacctcccactgggtccctcccatggtacgtagggattatgggaactacagctcaaactgagatttgggtggggaactacagctcaaaatgagatttgggtggggacacagtgaatagacatgtgtgtgcacaggtgtgtggacggggtgtgcagccttcagagactcagaaggccagtggtgcgcaggcccccgggggcgtgactgggccaggttggagccctccaggctgagcctgacctggcaggtgtgcagggggtgggctgccctgccaggcgggtcagacttctggttggcagcaagacaggagtgtcctgggctgagtggaattcccaggccaagggtcttgcacaggagaaagggtggggggtggggctgtgctgatgcagaaccccagagaggggctctggtggacaccaccccacctgtgatggccacagtttgtggtgggagcaaggtctgtggggttccatgggtgggcggggtggtgggaggcagcatctgtgggcgtgggcttctgaaaatgctgatcaggcgggtaggaggggtggctgttgtgaggcccagcccatccctggagcgacagtgggagggttttggagaaccagacttggtggggaggtcactctggaactgggattcagaggctcagctgcggtggtgcttgaggctgtgtggggtccgaggagaggtggctcccagcaggcgaggcctcgaaggggctgtgcagccatgcggaagtcacttggcctctctgggctgtgtccttgtcaacgacttcagctcccatttagcttccccagggccaggcccgggtgacaacaccccagatgtgtgggacttgtgaccagtgtggacccgagagaactgggaggaggtacaggagcggggagcccggtcctggtggctgggactatcagcagggagttatggggcaggaacagggagaagccagagcttcccgcaccttcggggctgtggtccgaggggctgggtgctgggacgcctgtgactggggagaacagggcctggcagggcctccctggtgaggcgggggagagtggaggccctgggcgatgcccgcctgtttgcgacatgagggtctctggcaggaagccaggaagacaagcccctcagggtcctgggtgttcagggtgtttggaagcccagagagctcaaatggaggacag

SEQ ID NO: 12454 - DNA, 1329 bp, Artificial sequence
  DNA replication origin
tgttcataatagccaaaaagtggaaattgcgccaacacccctcagctgaaggctgggtgaacacaggagctggtgtagccacgatggaatattatccgacaatagaaaggaatgaagttccacacaggctgcagcatggatgaacactgaaaatattagaggcttagtttattattttattttatttatttttttttttttgagatggagtctcgctctgtcacccaggctggagtgctgtggcgtcatctcggctcactgcaacctccacctcctgggttcaaatgattctcctgtctcagcctcccgagtagctgggattacaggtatgtgccaccacgcgcggctagtttttgtaattttagtagagacggggtttccaccatgttggccaggctggtctcaaactcctgacctcaagtgatccgcctgcctcggcctcccaaagtgctgggattacaggcgtgagccactgtgcctagcccagatgctaagtttaaaaagccagacacaaaataccacatctgtagaattccactcatgtgaaatgcccagaataggcaattccatggagacacaaaatagaggcgtggctgtcaggggctgagaggaagggtagtggggagtgatggcttaaggtgtgtggggtttgtttttgggggtgatgaaaacggtctaaagttgattgtggtgatggttgtacgacgctgtgaatactctaagaagcgtcgaattgtgtgctttacgtgggtgagttgcatggcatatgaattatatcttagtaaagctgttcgaaaaatcacagtgcctaggtagattgttaaaagtatccgttattttctgtagaatatttaaaatagtgcctgagacatgctggatgttcaataaatgttagctattaaaaataatacattccttttaagcacctgcagccctgcctcctccaggaagccacggggccctgacaggaaaggcctctgcgggggcttcctcaagacccctgccacccccggtcggccacagccactctctcctgccttatttctgtttaactctgagtttcaggcagacatctctgtccatggctttgttttgttttgtttttctggggagagggtctcactctgttgcccaggctggagcgtagtggtgggatcacagctcactgcagccttgaacttctgggctcaagtgtcttcccgcctcagcctccagagtagctgggaccacaggtacccaccacccccatgcccagccctgattttaatagtcaccctggagggtgaccctttctcttttctgtttctgcttctcccaagttcctcagat

SEQ ID NO: 12455 - DNA, 903 bp, Artificial sequence
  DNA replication origin
gaagtcagcatgcatttatcctgcagcgatgagtcctcccacaggcgatccgtgtggctctgggggtgcagagtcctaccacaggcgatcccgggggctccgggggtgcagagtcctcccacgggggatcctgggggccccgggggtgcagagtcctcccatgggggatcccgggggctccagaggtgcagagtcctcccacgggggatccagggggctctgggggtgcagagtcctcccacgggggatccaggggtctctgggggtgcatgggagtcctcataatctccccatcctgggggcccagggcaggctggacaggagtggccaggagggagctgggcctcgcaggtgtgatgtggtggaaatgttcccggctgatggagcagcatgttcaaaggccagcacccctggggagctgcaggtctttccgtccaacaggaacctgtgttcagctcgagggggacagtgggcaccaatgcgactggagagctggagacagatggggcttggaagtcacgccaagggatctggatctcaccttgtgggcactggggagccttggagagggggattacaggcagggccagagggcagacttggcctttagacgatctcagtgaccacccaattcaggggctggattgaaggggttaattcctgcagcggggaggctgatgtttagagcatgtccctcagggcttgtagatgagcggaaagagcccaactccaataagatgaagtaaatagcagggaatttagcggctcacagaactgggaaacgcaggccttcaggtttggctggtcaagggtaccactgagatctcctctctgggtccctctctttctggggatggatttcctccttgctgctggggacagtggccaccagatgttctaaac

SEQ ID NO: 12456 - DNA, 1826 bp, Artificial sequence
  DNA replication origin
ctcctaagtagctgggaccacaggcatgcaccaccatgcctggctaatttttaaaaattcttttgtagagatggggtcttactatgttgcccaggctggttttgaactcctgccctcaagcaatcctcctgcctcagtctcccaaagtgctgggattacaggcacgagccacggtgtctggccagagacacggtctttaaagagataatggagggaaaatgaggtcactagggtgggctctgatccaatctgactggagtccttctaagaagaggagattaggacacagatgctcacggaaggacaatcacgtgaggacatggggagaagatgctgtctggaagctgaggaggaggcctcaggggatccagccccacccacaccttgatgttggacttccagcctccaggatcgtgggaaataaacgtctgttgtttcagccacctggtctgtgagagtttgttatggcggcccaagcaaactgacccaccgaggaatttcgcttttgatcttatgggtggtggggtcagtgggggctttgaagccttggtcccacacagggctgggggctcctcggctgcagggtggagggggcactccacggggagaggcacaggctgggagaccagtgtgtaggagtgtgtctgtgtaggggtgtgtgtttgtatgtagggatgtgtgtatgtaggggtgtgtgtgtgcgcctgtgtagatgtgtgtgtgtaggggtgtgtgtgtctgtgtaggtgtgtatgtaggtgtgtgtgtatgtaggggtgtgtatgtagggtgtgtgtgtgtgcctgtgtagatgtatgtgtgtgtaggggtgtgtgtgtgtgtgtctgtgtaggtgtatataggtgtgtgtgtgtatgtaggggtgtgtgtgcctctgcaggtgtgtgtgtgcctgtgtgtgtgtgtatgtagggggtatgtgtgtaggggtgtgtgtgtatgtagggggtgtgtgtatgtaggggtgtgtgtaggggtgtgtgtatgtaggggtgtatgtgtgtaggtgtgtgcgtgtaggggtgtgtgtacatgtaggtgtgcataggtgtgcgtaggtgtgtgtaggtgtgtgtaggggtatgtgtgtgtagggttgtgtatgtagggggtgtaggtgtgagtgtatgtagggggtgtgtgttatgaggggtgtgtgtgtgtaggtgtgtgtgtaggtgtgtggaggggtgtgtgtaggtgtgtagggtgtgtgtacatgtaggtgtgcataggtgtgcgtaggtgtgtgtaggtgtatgtgtgtatgtgtgtatagggttgtgtgtgtatgtagggggtgtaggtgtgtgtgtatgtaggggtgtgtgttatgtaggggtgtgtgtaggtgtgtgtataggggtgtgtgtaggtgtgtgtatgtgggggggtgtgttatgtagtgtgtgtaggtgtgtgtaggggtgtgtgtaggtgtatgtgtgtgtatgtgtgtgtgtaggtgtgtgtgtatgtaggggtgtgtgtaggggtgtgtaggggtgtgtaggggtgtgtgtagctgtatgtgtgtgtaggggtgtgtgtaggtgtgtgtgtatgtaggggtgtgtgttatgtaggggtgtgtggcggtgtgtgtataggggtgtgtaggtgtgtgtaggggtgtgtgtaggtgtgtgtaggtgtgtgtgtataggggtgtgtaggtgtgtgtaggggttgtgtgtaggtgtatgtgtgtcggggtgtgtgtaggtgtgtgtaggtgtgtgtgtgtagggtgtatgtacatgtaggtgtgtgtgtgagtgtgggtggcgcgagggttctccagc

SEQ ID NO: 12457 - DNA, 917 bp, Artificial sequence
  DNA replication origin
gtggtgaaatctcggtctgtgccccacgtcagtggacatcaggtcttctctctgacatggcccagctcctcacccttcttatggaaggttgtgcctgcatagaagtcaaagaatgccagagtgtgaagggccctgggaaatgggttcattcgactctttcatttaaagataaggcaacttaggtcttggaaggcacatctgtggcccagtgtccaaaacagttgttgatcagaaattgggatgagtatgtggaagaagatagaaggaggtatgggtgaatgatggatggatgaatgaatgggtggatgagtaggtgaatggatgaatgggtgggtggatgagtaggtggatggatgaatgggtgagtggatgagtaggtggatggatgaatgggtgggtggatgagtgaatgatggatggaggaatgggtgggtgaatgggtaaatggatagatgaataggtgggtagatgggtggatgatggatggatgaatgggtgggtggatgatggatggatggatgaacgggtgggtggatgatggatggatggatgaacgggtgggtggatgatggatggatggatgaatgggtgggtgaatgggtggatgatggatagatgaatgggtgggtggatgggataaatggatggatggtggatggttaaatggacagagtgtagagggatggatgggtagatggtggatgaatggatggagagatggatgagtgtatggatagacggatgaatggatagacaggtggatggatggaagggtggatgtgtggatgagtagatgggtggatggatagatggatgggtgggtagacaagtagatgaatggatgactgaatggatgggttaatgataggtggatggggtgagtgggaactcacagcattagacatccccactagcat

SEQ ID NO: 12458 - DNA, 1173 bp, Artificial sequence
  DNA replication origin
ctcaggcaggaccatcccctggcccctccgggaagctggtgaaatcggcttcttctgtctgacagccttgccgtgagcctgccctgtggccggggctcttgtaccaggatcaacaggaaagggcacagaaccctggcctcgtggaaccgacattttagcaaattagggagagagagggggagggaagaacggatttcagacagtgaagtaagtcaaccatggcaatgcgatggaaagagctggggggcgggagaagggggtagcactgtgcttgaacctggggttccggaatggcctctcccaggagagggattttgagccgagacctgggtggtgagaagcagcgacgctgtgaggaaccccagctgaaggacaccaagtgccaacaccctgcagccgggcgagctggctgggtggacagatggaaggccacacatggggcagggggcaggcagggtgagggctcgggaccctggggaacagccggctgttctgagccaggaagggtacctgagtgtgaggacagatggggcagggagaggacggagctggggaccctctgtggggccaaagggggtgcagggagggctcccagctctgtgtctgtctgatgaccttagataggggaagactggggaaggcgtaggtctgggtggggtttgtgggcaccgtcaggagctcggctgagagtggagggggaccagtgggcaggtggggcatggaggggagaggtgggctgggggagaaaggcgaggtggtagccagcttggagaagggctagagtaactcgctgggaagagaggaggtggaggggaggccaggcccgctgaagctgcagagtgcacgtgcatgggccagcacgggcctggggcaaggctggggggaccagggagctccgagctgcagcggtgggaggctgacccagtctggggtgcagctccccactgaggggggcagcctgggcctgctggtggtggctcctggcatcatggggtctggggctgctgggcgtgggggctggggttggggatgtttgaagctgaggggtctagtttgggcatttggcttcctgagcagaggttattggggcggatttccaggtgaatgagttttgcctctgaatttggtcaaaggctttcctgagccttcaaaatgcccaagaacaggggtggg

SEQ ID NO: 12459 - DNA, 1136 bp, Artificial sequence
  DNA replication origin
tgctcattccagaagcccaaaaaagcccaaaatgtaataagggggaagagaggagatggggaatagaaaattaaaatcatgaaaatagccccggaaagcctcctgatgtctgccgggagtccgtagcatgggagggagggagggagggagggagggagggaaggaaggagggagggagggagggaaggaaggagggagggagggagggagggagggaggcaggcagggagggaggcaggcagggagggagggtcgctgctgtgccgagtgataaacatttttctgcagctgaaacagcacggggcgcgggcaggaggcggctcagatcatccatcaggcagcagtgatggatccttcctgccatgaccaaggcagccaggccggcccacaggccaggggccagctcctggccacccgtgagggtgggtgggctcttgatctggaggcagggggctgcctctggtggccctggccaagggggcagctcagctggagtcacaccacggcgtctgtccaaaaaaggctcccgggcccatggaatgcaaccttgggatgagagaagggaaactgaggcccagagagaaggccacacccacagtcacacagcaagcccgtatccgcgtgggagcaggggcaggtctgctagggcagacgctgcacccagggcccgtcccataggggcttctgcggagaggaaggggtgttactgtctggggttccctctcgccatgcctgttcttccagggtggggggtggggatccacctggggcctctcactcctgcatggcccaggaaagtcccctcacccccttgttcctgcctgacttgagaagggcagtaagggctgggtctcggcaggaagcgggacccccaccatgtccacggctgacgctggagctccgggtgccattccggctggggcagggggtctatgtggggagaacagcagggggacagggtagcacgccaaatccaggctcctcggggggcttggggttttacaaagcacatcacctccctccaccatgggaagctgtccccctttcacagatgagaaaacagaggctgggatacagttggtgaggccactcacagaggaccaaagaatggaacccaggctcaggcaggaccatcc

SEQ ID NO: 12460 - DNA, 1056 bp, Artificial sequence
  DNA replication origin
caggtgggtgggggtgcacccaccatccctagctctgtcctaggtcctggcccagctgactcatctctggaaagacaggctgtctgatggaccgggccatcgctgctgcgtctgggctgctgccgggcagtggcagcacctcagaaaggaggcctgagcgagcacgtgtgtgtggagcgactgtgcgtgaacgcatgtgcatatgcagatgggaacatgcttagtacagctgccttcaagtttgaccatctggattcaaaccctggcttggccatttccagtttatggtgaccctggccaaggtacttgatctctggacccctcgatgttaccctctgggaactggagatcttcacagctggttcacttctagggttgctgtgaggactaaatgacttcatgccagccaccagccattaggaacctccatcacaggaaggatcgtcatagtgccacaccagtgtgcgtgcctgcgtgtgagggttacactgggtggggcggggtgtgtgcgattcgggggtgtgtgaagcaggatgcctttgcaactctctgcacaaccacagtgtgagctatggggtggggggggttccagccttcctgtcccagtgaggctgcggcatcttcctgtgggacaccggcttgcggcggggagctggggtgggtatccacacgcatcttccctggatgtgctgtaaggtgtctacaccacacaggctgcctctgggtacctctgtctgctgggggagggggatcaggaggagatgaatgtcagagagaaagagaccaagacggagaaagaaaaggagagaggagaggcggaaagggagaggggagaagaggaggaagaggaagagggaaagagacagaaaaggagggtggagggagagagagagaggaagagggagagagagaacaaacatattctctgacagaggcaaacagaggcggggagagagagctccagaagaggccagagacagccagccttcctcccacctcctctcttcgggtctgtcctggggtggcccattcccagcctgaggggggacagcagcc

SEQ ID NO: 12461 - DNA, 1044 bp, Artificial sequence
  DNA replication origin
cagtgaggctgcggcatcttcctgtgggacaccggcttgcggcggggagctggggtgggtatccacacgcatcttccctggatgtgctgtaaggtgtctacaccacacaggctgcctctgggtacctctgtctgctgggggagggggatcaggaggagatgaatgtcagagagaaagagaccaagacggagaaagaaaaggagagaggagaggcggaaagggagaggggagaagaggaggaagaggaagagggaaagagacagaaaaggagggtggagggagagagagagaggaagagggagagagagaacaaacatattctctgacagaggcaaacagaggcggggagagagagctccagaagaggccagagacagccagccttcctcccacctcctctcttcgggtctgtcctggggtggcccattcccagcctgaggggggacagcagcccgaggccagccaggccccgcgggggccctgccttctcacgggacaggagggcatatttcagcattggaaggcgctgcagagggagtcagtcagggctgaaattcctcagcgccctggaaggtccgcgggacagctcccttctcccagcttcctccaaggagccaggtccgggactctccaggcccctcgagtaggggaggggggaagtgagagaaaggggctgtgtgcgcacctaggccactgcgcgcttcagagcagccgggaccctccctgagggaccaggaagagaccccccccaggccgggctcggcccgctctgtctccctgttccctggaggtctgggcgcccccgcgcagggactaagggctggacagccgcaggcaggggctccgtccttggcctccacccttcgtgtccagcaatcccgggagcaggcggcggcacttcctccatgccccggcctcaatcacggtctcagtccccccaaccccgtcctgcaggaacaagtgtggtagaggctcggggtcggagggcgggcggccgtcccgcgggctggacggagtttctgggctgcggagaggccgttggac

SEQ ID NO: 12462 - DNA, 1470 bp, Artificial sequence
  DNA replication origin
ggcggcgccggcgtccgggtaacagcaggccgccaatcggcgcggccacgggggaggggcgacccggccgggactccggggactcggtcgcagccggacggcgcagcctccgctcggggtggggggggggggcggccgcgaggactcgacccctgccgtgcagcccggcctccagtcctctgccgtcccctcccccagctccaggtttcgctctctgctggggtcctggctcctcaggttgcgggatctcgcctcccacggccccgcgcgcgtacccctacccgcccctcaagttgacctctgaggttctccgtggatctcagaccccgagtgaccgcagaactgacctctggggtcaggcagtaccggtcaagggcgctctgaagaggccctcggcctcagtttgcaccccgaggaaatggactcatcatgcctgctcctgggaagtagcaggacgtcctggcgcggctcctccgggcaggcgcccagcacagcgcagggcacacgggggacacctgcgaaggcaaaggaggctcattccagagcttcggctgcacttggccagcacaggcctgggggaacctgctggaaatggggatccagtacctctcttggggtttatgtttggcaggcggagtggataggctggggcccggagcccggtggtcatcttctgcacaaggctggccaggccagaagctggagggtagcttactgggaccttccaagcgtgaccaaggaagctctgggggccgaccagcttctccctagtggagctgcagctggggagacctcacagacaggcagggaggagagggtgccccgctcaccgccggcctcgttccacaggcccaggcctggcacatcccaggcttgcagtatctatctggtgggtaaacaaggacctgctcttggcctgcggcctggctctgaccgtggtccaggtcggggcagagggagaaaggccacagcttaggtgttccaaaccaccggtgcccttcctgccggcccctggggctgtgctgggtttccagggcccctgccccccagtatttgcatgaaatcgtgggggcgcactggctttcgtcctagcactccccttcaaggctctgcacccctatcacgggagccccacccagccagccgaaggaggccacaagctctaaattactaaattcgggccagtgctgggggcctgggagccaaggcagctcagagcccactctccgattctggctcctggagaaccctaggacccgggcgtgtcaggccctgcagccgggctaggccggtccatacaggactgaacggcgtcgtgggcgttcattcacattccctctccggtccccacacactataggatttatcttgatttgctgcctttgaattgagtcaactcttttgtatgctcgttgaattgcccagctgctggcggcgagcggagagcgtgccgggggtactgaggccggg

SEQ ID NO: 12463 - DNA, 1348 bp, Artificial sequence
  DNA replication origin
caggcactgtggtcatattttagtcccattaatttttctctcctggagagcaggtgaagcctacaagtatacatttagggtgaaaatattcaaatgccggggtccgagacaggcaactactccaggctctggccctgggcgcttgctgggaccccggacacctgtttcttggtggggaccgtggtagggaggtggaggagcagcagcctctccctggcccaggtgtggggagcctgcctccaaagacactttgaaaaatcagtgctttccagtggcagtcctggggcatggtggggaagggacgccgccctccctcccctcctctggtcctgggtgcaggtgcccaccacatccctgcacccttaccccagacttaccaggcctcaggagtgtggctctggttcaggtgcccactggcttttctgggagtcgggagctgcctgccgagcctgctgtatcatcctgaattatacgcacacagcagtcctgctgcggccgaggaggagggggctgcacagctggctgtaggacagggggaggggcatggcccccaatctctgacttggagacccccaggtcttctgcccactaggggtggggatcagaactccctgaccaccgtatgcccaggaaaatgagggacccaagtgctggggtcctggctgggctccaaaccccctcaaatccaggtgagggggtgaccccctcccacacacggccccctggagtttgtccccctgctttggtggagtggggcgcaaacctgggctgggacctgtaagccagtcttctcaatgcttgttcaattaaaaggtggcaggggcagggacccagggggcaggaggccagggggccagccaggcagagaagaggagcatgttgatgcttttcaagcaacctatgcccaacccaatggggtttcccccaaggctgggtgcaagctggacctctttggaggctgggggcctctctagggggcagcccctgagagaggcaatatggggagatttgccatttacatctgctcctggctcccggtccctccacagcttctgtccccaggctctccgcacagcccttagcccaatcgagggaatgagcggcagaggcagccagcccaagccagggtccaaagaggccccactccgggtgtgcaggaagggaaagtgctggcacggaggctttttgaggacgtgcacacctggctcggccggcctcgaccctttctgctaagccttcgtttttttcagaaggcatgatcatcctagccccatttcacaggtgtggaaactgaggctctgagattcacctgccccaaggtcacacagctgagacctggaaaagccgg

SEQ ID NO: 12464 - DNA, 1497 bp, Artificial sequence
  DNA replication origin
agatggaggggtggatgaatgtatacatggatggactgatggatgggtggatggatgcatgggttgatggatgggcgggtggatggatgagcaagtggatggatggatggataggtgagtggatggatgggtgggtaaatggatgaatggatgaataagtgaatggatggatagttgatgggtgaatggatggaagaaagatgagtgggtggatgggtaggtgggtgagtgggtaggtggataggtggatgggtggatgggtggattggtgggtgggtggatgctagaaggatatatggatgatggatggatggatgggtgggtgggtgaatggatgaatggataggtgagtggctggatgggtggatgaatggatggatgaatgggtgaatggatggatgaaggatgaatggatggatggataggtagatggttgagtgggtgggtagataagtggatggataaatggatggattggtgggtggatgctagacagatatatggatgatggatggatgggtgagtgtgaatggatgaatggataggtgggtggatggatggatgaatggataaatggatggatgaaggatgaatggatgaatgggtgggtggagaggtgggtggatgggtggatgggtggatgctagaaggatatatggatgatgaatggatggatggatgggcgggtgtgtgaattgatgaatggataggtgggtgggtggatggatggatgggtggatgaatgggtgaatggatggatgaaggatgagtgggtggagaggtggatggatggatgaattggtgggtaagtgggtggatgctagaaggatatatggatgatgaatggatgaatggatgcctgaatgagggaggatgtagattaatgatgatggaagtagataatgaatgagtggatgatacatacagagacctacagggactggaaaaatacaatgtcagtatggacaggagcttggaagaaatgggagtgtagaagtcccccaggtaaagaggctaatgtcaccaaatggcaaatggagataatgaggcccccagaagtggcttgtccaagcccagggagtcagagagcgacagagttgggacccaaacttgaccgtgcctaagtccagatccaggcttccctctccactgcttcacatctgcagacagcagggtctaaaccaggagccaggggcctccgggatgccgacactgatcccagcagacaggaggtctgtttgcaccctcggaggttgatgcagggagtctgggagtcagggctctgcagtctccacccaaggctgccaccttctgctctgcagccttgggtgcttactcctggcaacaagcattgattgagcaccagctgtttttggcactaaacgttaggccctgggctggaccctgagatattcggttgggtaagcgctgtggtccctgatgttaggggacttatggccctccctcagcttcctcatctgtaaaatgggcaggggg

SEQ ID NO: 12465 - DNA, 1588 bp, Artificial sequence
  DNA replication origin
gaaaggggaacccaggacacggaatgccgggtggctggggctggggtttgcagaggagatggtgggggagggtttgcagaggtgatggtgggggaggcccccacctgagtgccagtggctggggctggagcttgcagaggtgatggtgggggagggtttgcagaggtgatggtgggggaggcccctgcctgagtgccagtggctggggctagggtttgcagaggcggtgttgggggagggtttgcagaggtgatggtggggaagggtttgcagaggtgatggtaggggaggccccccacctcctagccatttgctcctggcctgatcccagtgcttcgaaccccaccatttggggagattcctctgggccctgttgtgtctttggttttcaagaagatgccaaaggtctgccaacagatctggaaagggcagtgtcctcacagaatcagagtctgtggccccatccaaactcggctcctccttctgtcggttgaggtagggagggagggcactgcgggggctgggaggcttggggaacaacagggccatgtctaagacacaggggtctccaggggtgggtgtgtccagagggccctgtctgcggaagcgggaattagacggggctgcctagcccagagccggtcctgttggtgggcggggccctgttggtgggcgaggccctgttggtggcttgggtcctgttggtgggcggggccctgttggtgggcggggccctgttggtggcttgggtcctgttggtgggcggggccctgttggtgggcggggccctgttggtggcttgggtcctgttggtgggcggggccctgttggtggcttgggtcctgttggtgggcggggccctgttggtggcttgggtcctgttggtgggcggggccctgttggtgggcggggccctgttggtggcttgggtcctgttggtgggcggggtcctgttggtgggcggggccctgttggtaacccctgggggtggagatggaggcactcattcaaccccagatgtgattcaggcactcaggcccctggacagctccgggctggtcccagacactcttgggggcaaaaaaagaggaagctcacgtttccagcctcctgtgcatcccatcctaagaacccctggagtgtggctccgcggaggtgagattctcaggaagagaaatgagggcagaggcccaagacccttctgtccaggataggatgccagagaggtcacagctgaggtccacaaaccaatcaatgggcgagagggaatctgaacaatctgaaccaacacggccagggagggggcccttctggagtcctagagtggctccatcattaacttgagtgtgaccgaggacctcagcttccccagccagaacacagatgggagagtctccaggtggggtgaccgcacatcctggtccgccctactgtcccgatgtcactgcaaacgccacctctttgtactctcagaagtgctctggtttggacactaagttacatggtcggtgtctctctgggcaccctttgcattcaaagcatgctaatgatttcctcatatttcaacttttagcaagaaaggctttcg

SEQ ID NO: 12466 - DNA, 854 bp, Artificial sequence
  DNA replication origin
gttattgaaggcggttttccattcattcatgccacaaacctgcacgctggttccctggctcatggcctcggtgttctctgctgtgcctgggtggaggctggggacccattcctgaggcttgttggggcatagctggctgccccttgcccgcagctgtatgggcctcctggcaggcgtgagccagcaggcctctgggaaaatcaagggcaggcagaggaagcctggggcccactgtggagacgtctgcccaccggctgttcccatcttcgtcttcccactggagtaagggcagaggccgtggactccatccagcctgggcctgagtgcaaggatagtggcttccctgggacagggaaaatgggcagagggtggggtttaaaaggagaggtgtctggctgggacatctccaggcagcatcaggctcgcaaaggacactgtgccagaatgctgtcagctgagtcttatttctgggctgagaaaggggaacccaggacacggaatgccgggtggctggggctggggtttgcagaggagatggtgggggagggtttgcagaggtgatggtgggggaggcccccacctgagtgccagtggctggggctggagcttgcagaggtgatggtgggggagggtttgcagaggtgatggtgggggaggcccctgcctgagtgccagtggctggggctagggtttgcagaggcggtgttgggggagggtttgcagaggtgatggtggggaagggtttgcagaggtgatggtaggggaggccccccacctcctagccatttgctcctggcctgatcccagtgcttcgaaccccaccatttggggagattcctctgggccctgttgtg

SEQ ID NO: 12467 - DNA, 1029 bp, Artificial sequence
  DNA replication origin
gtgaccctggaaatgtgctcggctctgggcctgtctggagggtggagaaggggcaggaaccaccagtggcctctggaaacaggagcactcctgggacccagctctgtccaacaagctgtggcaggtagtgagccccccatcagcaggggtgttcaagcaggagctggcgcagaggacagggctgcggggaggtggtgtgagcgggaatgcccccgatggaatgagctggccacttcagggaacgttgaaggtggagggaacactcaaaaggacggagtctgaagcacatttgaccttcccgaagaagctctctctcctggatgggtggagggcgagtggcttcgcatctgagagtgggacccacccgcctcggacagcagaaaagaccccgactccagctggaatctgctgggattcagagccaggggccagccagtctaccgcctgctgtgcccccgagacccggagcaggagggtccgtgttcatctcctggccttgctctgtccactgaaggtgggttgccagggactggacatctaggaaccacggggcccctgaaggacttacagaccaccgtggggcctgcagggaaagaggaggcttggctgggctagggaggtgtgcgagacggggtgtaaccaggcagggctttggcaggagctgcgctcgaagggccccagcagaagagtaggagttagggaaggagggtaacaggcatcccagggagagggggtgtgttcgagccatgaaggcaggaggcccctccagggagtgtggggtgtccagggcacaggcagtggcgggcaatgctgggcgggaggtggggctgcaggggtagctgggggcaggtggaagggcttgagtgctgggagaggagcctgttctttaactggatcatctcccctccctgggcttctctgctcagaaggggtgggaggagagagtgcagcattgctccctgagaaccctctcctgggagaccctctcccgtctgaatactggagttgctgggagagctggccacagca

SEQ ID NO: 12468 - DNA, 973 bp, Artificial sequence
  DNA replication origin
cggccctgggatgccacagcagtgaccaggacacacagctcctgctcttgcagtggcaggaggagctccaacatgaattaaaagtaaataaccaagcagaacatcagggagagagaagggccaggatttaaactaggtgggggctgagagtgaattcggggtgcagagcagggagggctcttggggcaacgctgctgcgtctcggagtgaatgacaggagggagcttcccaggcggaggggcggctggtgcaggttcttcagccaggaagggggcatgcaccagaggactgggagtgagaaggagcggaggcccatccagtgggccctggagattgtgtctggaggccggattctcctccacgcgtggaggactggacgccctcagggctgcgcggggccgcaggaccgccttggtggttagcgaggctccctctggctgtggagggagaatggattgtgggtgccaggagaccaggtggtaccttgggcgtcgtccccgctggaggtgggtttgggcggtcgtggtgggagtggagtgattccagatgcttctgcaggtggattagatgctgctggagttggaccaggtgtggggggaggaaagagaggagtccagaatgcggcgtcaacttttggtgtaggaatgtggcggatggtgaggcagggagatgccagcggggacgggaacttggagcagccacttagacgcaacgggggagaatcttcaagtcgggggcagccgagggcctcaagatagaccgagggtcagctgcacagagacaagagcacggggcacaagaccccctgggagagctggggagaggaggcagtgaggaccgagcctggcctggaacatgtggagtcgtggggaaggtgaaggaggctggacagagagggcggtggctgggatgctggagtggagagggcggcaggagggagccagcagcttcctgggccaagggctgccgagag

SEQ ID NO: 12469 - DNA, 1032 bp, Artificial sequence
  DNA replication origin
ggtgagagcggctcagagggcccgaggggggacgcccggtggggcggggctgaggatggaagaggaggtgagggagggggatggaaactgctggcgatccttccaagaaaacctgctgcaatgaggcagaggctggaagttacacaggtcaagttggtttgttttatggaaggttctagaactacgagttccaatacggcagctactagccacgtttctggcactccagagccacaggggacccgtggccaccctgttggacagcgcaagtacagaacctctgtgcatccaagaaagtggtgtgggcaggatggcattgcagagggctggaggtatcagacctgaggggtgcccattccagaggcgccacggcctctgtgtctccctgaggcaggaggccaggccctgggagcaggtgcagatgggctgagaggaagggagctcctttcaggcagtggggagccgccctcctgagggatgcctattgccctccctggggccttgtggtccacgcccatacgagcctctgggtctgaggcagcaagtgtgctgaggaggggaccagggctggagctgggtctgtgaaggacagtaacgcccatgcggggtctccgcacctgccctccgtgccagacagcactcctttctagaaatgttgtttaatgatcggatcgctggacgtggggtgcagcggcaggtgtgagtgcggatcagcgagggcacaggctggcggggcatcgagagtgacttgagtgagcgagcccagctggaaagggctttgggggggcctgtggtctgtccagaaccttcctaggtgattcggcctttccctgtttcctgtgccaggtccgcagcctctgcccttggggactcctggacccgggccaccccccgaacccctcctagcacagcacctgtccagcctctcccccccggcccctgacaggaggctgcacagggctgactcacagtgtgacttcggacaagtccttctgtgtctgtgcctcagtttccccgctgtaaagtgagctg

SEQ ID NO: 12470 - DNA, 1087 bp, Artificial sequence
  DNA replication origin
gtgcctataatcccagctacttgagaggctgaggcaggagaatcacttgaacccaggaggcagaggttgcagtgagctgagattgcaccactgcactccagcctgggtgacagagcaagactctgtctcaaaaaaaaaaaaaaaaaaagaagaaagaaaactttggggtccctccaaagctgggggccatagagggggcaaaatctgtgcctcctaaggggctgtgggcccacccttcctccctggcagggcgctggccacactgggaagtcgtgcccacacgccctaaagatctccctgcccaggagacttggcagcgaggccaggctgggggtggggggaggactccctgagcccctgcaggccaggctgctgctcacctgtactctggggcaggggccgagcaggaaggtgagggctggactctgggctggggacggcctgcctccctcatcacacaggctccccagcctgatggaggagggctcagagctgggtggggaggtgaggctgcgttcccagcaccactcccaaggagtctgatgcacagattcttatactcacaatggggggagtggggcatggtggtacggaaagggctggcaggggatgaaccaggtgagccaggaagggggagagagtgtggcacccagccaggccctggagatgtcagccaccggtgcacacttagagcgtgtttcctgcatgcatgcaacatgccagacatacagacccccgtgcatgtgtgaacatgaggaggaaatctggggggctccgagctgcactaccgaggtgccacccacacctgcctccacccagccccagacgcaccagagccccaggcctcgctgcccagacagggggtcctcagtgacacctgctctgcccagggccccagtgagcatggcctgcgcactcatgtacacaatcacctgccctgtgtacacacctgtgcacacacatctgtacacacacacagacaacctggcacacacatacgagggctcacgtgtacaaacacgtgtgtgggtggacacaggtatacatgtgtccacaaacacacatgcacacacacacacgtgaaccc

SEQ ID NO: 12471 - DNA, 2079 bp, Artificial sequence
  DNA replication origin
gtactccagcttgcccaggccgcgcagcatgccctccgtgaggttgcgcagccggttgtagcccagctgcagcacctgcaggttgaactggcccgagaaggcgccgtcctcgatgtagccgatctcgttcttggtgaggttgaggtacgtgaggttgccaaagcggctgagcgaggcgtactgcacgctgcggatacggttctcgttgagccgcaggtccacgatggtgctgttgatctgctgtgggatggcctcgtaggggggttggttctggctgcagatggccagccacacgaagcccttgtcgccctcgatcagccagcagtctgcgcgggccaggccgccagcgtgcagcagggtggcggccgccacgcacacccacagcgcgccccacccacgcccggccatcgggaccgccctgcagggagccccaattcagcctgcccagggggaccaggtggggggccaggcgccagcccccagagggatggaggggcgggagggggaggtgcctgcactctcaggggtgtcctgtcccaaaccgcatggccgcgcgacgtaagcgcggggagggagggcgcctccctcacggccggccgcctctcgtcttccgccccagtcctgtggtgaccgaggcctcctgccccatgggcctgggtgtcctgatggctccactgactcctcctgctccgacgttcctgctgcaagacaagagagaagacagcggtcaggggacaagagagaagacagcggtcaggggacggccggcatctcacagcggcggcatcccaatgtggcctgagtccctgctccgctgagccccctgaatctcttctgtaaaacacagaaaaaacagaagctccttcctcagaagcccctggggggtcctgagacaggtcaggatagcggaggaaatgcttcaccctcccgtggaggggtctcctcggctctcggcctcagtttcctcatctgcaaaatggacggggcactgcctgcttggccatgttccaaggtactgacagcccagaatcgaggtccctgaagcccatttcactctcggcgcaaccccggtcggataagggaactgaggcaggggactgggacctaaagtcgcttggctgaggagtgactgggcttccgccggctggctgcggccagggatgtgcgtgtgaaggccctcactgggcacggtgcctgtcacctggggcttctgctcccaggaggcccggccacaacgcccctggagccgcctgtaggagctaccctgcgcactcaccgcagggtccgcagccctcaacacagaatccttccggggcgcgggctcctctccagccctctgggagggaggcaccgggaggtattctggcctgtccggggactcgtgtctgccaggtctcggtctgagctcgcccgccctgtgtccctggcacgctgtgccccctctgggcctcagtttccccaaatgagccagctggatggtctctgagggcgtctacccggcactgggacttggcactgtctgcacctcaccttggtggataggggccacctcccttctggaaggaagggaactgcttgctctgcggagaatttccaggctccacacatcctcctcaggctgggagagggacagctccgaggtccctgggggagccgcatgcctctcctgccatcctccccaccaccatacggggtcctctgctctattcctcagcctccactggaccctgagggtctccaggcaggacggtgcctcctccatctgcctagtgtctgctgagcctggacacagaggatgtggcgaccgagctgtaggcggggaagccccaggcaggaaggaccctgcagacggggctggaggtacgtccggggagcgaggcatcccgctgggctcctgctcccccatggacccccccaccactaccctcgagataagggggcccctggtgtgcgacctcacctcccggccgcctgtgttttccctgcaggatagagaaatgggtgtgtttgcttgttaatatgtggatttacagtcggcctctgtcaccgagccgtggcctggcgggcagccagctgggt

SEQ ID NO: 12472 - DNA, 1181 bp, Artificial sequence
  DNA replication origin
ccgtggaggggctgggcaccggaccaggcgggctgggcagccggggcaagcagatggtgaggcaggtgtggttgtggcgcagcccggcgctggtggacaccacgcagtaggtgtagttggtgagcgtgaacaggttggtcagacggatctcctcctgggccttggtcagcctggacacggtggaggccttgctgttgttgaaatgctccagggtgtacatccggtggaacgggctgggcagctggacggtgatggtggccgagttctgagtgagctgcttgaccttgatgagggggcgggcctcggcctgcgtggccagcgtgggcagggccaccagtggcgtggtgccgtccccggagaagcactcatcatcggcacagggcatgtcactgggctccggcggaggcgggggcggcggggagcggcccggctgtgagcgcccggatgctggacgtgggggcccgaccacctcagccgcgtacgagtcctcggtgcagactgactgcagtttgctgaggatgctgcggtggccgcggcggccctggcccaggaggtagtagccggagtagacgggcggcgactcgcactgcatgcggtcgtacgtctgtgtggcgttggtgaaggcggccagccagcgcaggaagcccagcagctcgcaggagcagtagaaggggttgctgtagagctcgcacaccgacagcttggccaggccggcgaaggtgccgctgttgagctgctggatgcggttcatggacaggtcgatgttgacgatgttgggacactcccagaagctgctggccatgaccacctcgatgaggttggcctgcaggtacaggtactccagcttgcccaggccgcgcagcatgccctccgtgaggttgcgcagccggttgtagcccagctgcagcacctgcaggttgaactggcccgagaaggcgccgtcctcgatgtagccgatctcgttcttggtgaggttgaggtacgtgaggttgccaaagcggctgagcgaggcgtactgcacgctgcggatacggttctcgttgagccgcaggtccacgatggtgctgttgatctgctgtgggatggcctcgtaggggggttggttctggctgcagatggccagccacacgaagcccttgtcgccctcgatcagccagcagtctgcgcgggccaggccgcca

SEQ ID NO: 12473 - DNA, 998 bp, Artificial sequence
  DNA replication origin
tggccgaaggcgtccttgtacccgggcgccaggaagccgtgcttggcggccagcggctcggacagcagcaccagcggcggctccgcgacggacacgggccccgacttgacgccctggaaggaggtggactcggacttgagcgcgtcgatgcagttgttgatgatctggttgaccttgtccacctccttggcgatggtggagatctcggccaccgaactctggctgtcggggcccggccggcccagctcacagtccctgcgttccggagggtccccggttcgaacctccatgtagctgcccttgctggccttgggggtgtccgcgctctccaccagcttgtactgctccacctcgccggccgcaggcaggtaagggatgcgcgtcacggcctcggggcccagcagcgggccctgggacagcggggccaggccgggcgcctccagctctggcccgtacttgagctcgatgatggtcttcttgaggctgccagctgcggctgccgaggcggccttcttgtgcttctcctcctggcgccgccgcctgcgcaggcagtagtagacggcgcccagcaccagcaccatgccgaagaggcagcccaggatggtcatgatgtagtgggtggccgtggaggggctgggcaccggaccaggcgggctgggcagccggggcaagcagatggtgaggcaggtgtggttgtggcgcagcccggcgctggtggacaccacgcagtaggtgtagttggtgagcgtgaacaggttggtcagacggatctcctcctgggccttggtcagcctggacacggtggaggccttgctgttgttgaaatgctccagggtgtacatccggtggaacgggctgggcagctggacggtgatggtggccgagttctgagtgagctgcttgaccttgatgagggggcgggcctcggcctgcgtggccagcgtgggcagggccaccagtggcgtggtgccgtccccggagaagcactcatcatcggc

SEQ ID NO: 12474 - DNA, 818 bp, Artificial sequence
  DNA replication origin
actcggggctggaggagtagctcaggctgtggtactgcggggacagctgcgagtaggcgaggtcgcggggccgcggccgggtgagtggctccaggatggacgccttgcgccccaggccctcgtgcggaggcggcggcggtggcccggggggcgcaggtggctcggccgggtgggagccggggtacgagtgccggtgctcgccgtactggcgacccttctcggcctcggcccgcagcacggcggccgcgggtgtcacagtgaggatggcgtcggccgcgggggagcccttctcgatgtacttggcctcggcggccgcggccttgtgcaccccgacggcctcggctcggaaggcgcgggggctgcgcacggagccgctggacgaggtgctggcacgagggggcccggcggcctccacgctgtggtgccgctgcaggctgtggccgaaggcgtccttgtacccgggcgccaggaagccgtgcttggcggccagcggctcggacagcagcaccagcggcggctccgcgacggacacgggccccgacttgacgccctggaaggaggtggactcggacttgagcgcgtcgatgcagttgttgatgatctggttgaccttgtccacctccttggcgatggtggagatctcggccaccgaactctggctgtcggggcccggccggcccagctcacagtccctgcgttccggagggtccccggttcgaacctccatgtagctgcccttgctggccttgggggtgtccgcgctctccaccagcttgtactgctccacctcgccggccgcaggcaggtaagggatgcgc

SEQ ID NO: 12475 - DNA, 1170 bp, Artificial sequence
  DNA replication origin
ggcgtcaagtcggggcccgtgtccgtcgcggagccgccgctggtgctgctgtccgagccgctggccgccaagcacggcttcctggcgcccgggtacaaggacgccttcggccacagcctgcagcggcaccacagcgtggaggccgccgggccccctcgtgccagcacctcgtccagcggctccgtgcgcagcccccgcgccttccgagccgaggccgtcggggtgcacaaggccgcggccgccgaggccaagtacatcgagaagggctcccccgcggccgacgccatcctcactgtgacacccgcggccgccgtgctgcgggccgaggccgagaagggtcgccagtacggcgagcaccggcactcgtaccccggctcccacccggccgagccacctgcgccccccgggccaccgccgccgcctccgcacgagggcctggggcgcaaggcgtccatcctggagccactcacccggccgcggccccgcgacctcgcctactcgcagctgtccccgcagtaccacagcctgagctactcctccagccccgagtacacctgccgggcctcccagagcatctgggagcgcttcagactgagccgccggcggcacaaggaggaagaggagttcatggccgcgggccatgccctgcgcaagaaggttcagttcgccaaagacgaggatctgcacgacatcctggactactggaagggcgtgtcggcccagcacaagtcctgagccccccaagaccggcgatgcccactggaccaaaaaggatgcaggatccacccagagactcagcaccaaacccaacacacgcacgccaccacagcaactgtgacagcggggggccctgcagaggcgaggggggagcgagtggggacagacaagggggacacgtcccgagctcctgtggccggtcctgggatgcgcttgtcgccccgggtggcacgtgtccacacacacacacacacacacacacacacacacgagggacttcggaaaactgtgtcttagggatggggggtgggggtggggatttttttttcattatctttcctcttttgagtcttctctgccttttcttttcctctctatctctttactttcttccttttttaaaaaaatataataaaagacaagttattttaaaaagacataaaatgccatccg

SEQ ID NO: 12476 - DNA, 942 bp, Artificial sequence
  DNA replication origin
tcattgccgcctccggagtccactgcagaggggcagagtgaatgccggcggccaagtggcctccgggacaggtcctggagccctgctggactcagggtgggtggaggctgtgcctgtggacggccggggtggccaggacggccaagggctgggaggcacgtcccccagcccagcccccatgtacactgtagtcgttctattgtacagaaaaaaatatttctatatttgcaatgtttgctgtaaaatgagaaagaaaaaaagactatgtctactaaaaaaaaaaaaaaaaagactatgtctacttaaaaaaaaatctgcaaaggaaaacaaatcaaatgcttgtttgtcctgggtttttactgtgggtttcagggaaagagttgaggtttcttttatgtcccgtttagggggtggttttactgattttggccttggggtggggacacgctgtgctctcttggctagagcgtggtgtgaccaggggggtgcacgtgggaacccttgggaggtgggcggcccgcactgggctggagcgtgtctgagagccggtgtggacagggtaggcgggagccaagctcaggtggcggcgggaggacgggcgggagcagggtcttggtgtggtggatccacggtgcggggctgcttctgtgtgtgtctggctgtgcgtgccagcggggtgtgtgcagaacccagcagccgagggggtgtgagtgggcctgggacgcccagaggctcttgagtgaggttccgggtgagccgatggtgtgggtttgcatgtgattgagcgtgagcgtgaggtggttggagggtgtgtctgtgtgagggcgggttcccctgctgtcgccagagccccacctacaggaagtgcccagagacccctaattcttcgggggtctctcaggacgctgagcccggagccagaccctgcactgcagccccctc

SEQ ID NO: 12477 - DNA, 1621 bp, Artificial sequence
  DNA replication origin
cccagagttagttttaaaagtcacatgattgctgtttttgcatttttgcctcagtgctctaaaactatcctagcctaggtgcagaaggaaaagtccccttagaaaacatggagtcagttggctgtttcgctgttgcaatcgttttaaatgtagtgggacgtttaaaatagagacacagagacggtgttttgttatgttgcccaggctggtcttgaactcctggactcaagtgatccgcccgccttgatatcccaaagtactgggattacaggtgtgagctgcctcgcccagccagtatgtgaaataataataacttttattgatttttttcttatctcaaaagtaatccttttgcttgtgtcccctggtggaagtctcttgcctctgggagccaggatcctgggagccgcggagcctaaagttgtgggatggaaagcagacattccccaggtgggtcaccagtggtgacggaccgtggggtcacccccgcctcctcccgtctggctctcgggaacctgtcttctattcattggggaaacagccctgtataaatagcaccaccgtgtcaacgtgtaagccacatgccgaaggacgtgtccctgtcttcacagcgtcatctccaagcaggtccccttgctgtcattacaattccacccaccactctatccagctggcagttttggggtgctgtactgtgtggtgggatcagagaatcccggggtcctgtgcttaccgactcaccttctcctccataaagcgggtcccttaagccagagtgaggttaggtgggtcctcgtgccagcgcatgagacactccatgggccttggggttggtcctggctgaatcccaggtagcacgagtccaggccggaaggagtccactgaaatccacttgccaccaccaccaagagacggcctcatagcgaggttcagacatttggcagtggcagaagctagatgaaccctggtgaggggaagttcttgctattgggccctgcagaacctccctccctgctaccatggctgtgccaaataagagccaccgcaccagcactgagtggtcaagggcgatgctggggtggccaagggtggagactgggatggccgaggatggaggctgctggctgaggatagaaactggggtggccaaggatggaggctggctggctgaggatggaggctgggctgagggtggaggctggctggctgaggatggaggctgggctgagggtggaggctggctggctgagggtggaggctagctggctgagggtggagactagctggctgagggtggaggctggggtggctgagggtggaggctggctggctgagggtggaggctggctggctgagggtggaggctggggtggctgagggtggagactggctggctgagggtggaggctggctggtgtcccggcatgagccatcctttccacctggtttctcagagcctcgtctgccgtgggctccctctggtgggtgccacagtgagctgcaaagattctcgtactttgcgcccactcctgcaggtcccccatgtctcttccaaaattatttgtccccagtattccaatcttgctccttccgcctccccagcccagcagccacgccattt

SEQ ID NO: 12478 - DNA, 1128 bp, Artificial sequence
  DNA replication origin
agcctctgccccaaatcctcctggtaagttccattcccacctgggctggctggagtttagctctggccttgcaatcaagaccaccacctttgggggggctcctgcctggacctggacccggctgtcgcccaccagggaccactccccctgctgcccctggggcagaggctgcgggcttctgttctgcctgagggctcagccctctgtcctcccccaggatggcccctgacctccagcctctgggcccaccctatccccgcttcctacctggtggggtcccatccgccttcagggtccagtcggaccccatctcctaaattgccttgacaagaaccggcccctgtccctctgtgttcacagccagggtggtgctggctccctggtcctgaagggccagctgagtggggctcggtcccagaagccccaggtccatgagtgtgtgtgggggccgtcaccggggctgctggcggtgaaagggtgggtggaggcaggcacctcggctctcaggctgtggcacggcaggaatggtgatggggaaagcagggtggtgggggctggggtgccaggaccctgggattgacctggggggtattggcagaggacagcccaaaggctagaccagggccccgttctgattatctgtggctgtgggagcagcatcctgtgtgggccccgctgtgctcagctgagacatggggctgtggccaccccagggctgcgatggggccgaacagtctgggactccgggtttcagtgtgagagccagtggttgcccagctctggcggggctgtgtgtctgtctgaggcacatgtgtgtccaggggccgagccagggcagaacaaccttcacgtgacatggagacatctcacttctcttgtctgcacagcctgcgtcccgcacaaagcctcgtgaagctgaaccccatgggcctccgaggacccctccgtcaaaccccttgcgcccaggaacagaagccaacactgaaaggtgacattggggggtagggagaggacacgcaggaggaatcaggggcttcctgtctcgaggctgggggacacaacacatccgtctctcccagtgggcctcttagtggacggccccccaactttcccctgagacctggagga

SEQ ID NO: 12479 - DNA, 1122 bp, Artificial sequence
  DNA replication origin
ccggcgcccccactccctcggctcccctccggctgcggctgcaggagcagctgcgtgtggctgtaaagcagaacgcccgtgtgcgagggggagctgtataaatagaataataataataataattgttggtttgggatttttctgcgactgctggggtgcctggccttgcccgccccgccagtcactcttgaaggaaaggtcaccctcgccgggaagataaaccccaataacgctggtataattagcacaggcagtatttagatgctttcctcggtacaattaggcaggaataattggctgagctattttccccgtgccggacacactttttgccagcttccgttctttggaacttcatgccgggacatttgttctcggcgttctgtccaagctgtcctgacccagttgccgccaggccctcagcgcggtgctcacgcggcagcatctgcgaggcctcttttgggcccggctgtgtcgtctcccccgagggacgccggagggacagtggggcagagaggggtgggagctgagggtcgtgcacacagcagggtgtcctggggtcaaacctggacctctggaccaggagctccgcggagctgagctgggctgggcctggagctggagggcttgtgcagggtggggctgggccggccatgggcatccatgagggagtgaggccatgagcgggggagtcaggcataggctgtaacaagtcctgtggccagcctggaggaggaggccctcggccgaggtaatacaccagcagcgagaagcttgctctctccctcctcagagcgcggacgggccaggcagtgactgtcagggctcggtggtggctgctgctcctggatcaccttcgggccgtggatgtgcagcaggcaggctggccccacagcacctgagactcctgtgcagagcccagctgtgagttgtgaggctgccaggagtcctcggtatcccggtctaacaggttgcgtagaccacggtagcaccagccattttcacgctgtacccggcaggctcagcacggtcttgacgttatcacgcctgaactttgggatacagatcactgctgccgaggtcatgaagccaagctggggccgcgccgacctccaaccctgg

SEQ ID NO: 12480 - DNA, 849 bp, Artificial sequence
  DNA replication origin
cacaactcacagctgggctctgcacaggagtctcaggtgctgtggggccagcctgcctgctgcacatccacggcccgaaggtgatccaggagcagcagccaccaccgagccctgacagtcactgcctggcccgtccgcgctctgaggagggagagagcaagcttctcgctgctggtgtattacctcggccgagggcctcctcctccaggctggccacaggacttgttacagcctatgcctgactcccccgctcatggcctcactccctcatggatgcccatggccggcccagccccaccctgcacaagccctccagctccaggcccagcccagctcagctccgcggagctcctggtccagaggtccaggtttgaccccaggacaccctgctgtgtgcacgaccctcagctcccacccctctctgccccactgtccctccggcgtccctcgggggagacgacacagccgggcccaaaagaggcctcgcagatgctgccgcgtgagcaccgcgctgagggcctggcggcaactgggtcaggacagcttggacagaacgccgagaacaaatgtcccggcatgaagttccaaagaacggaagctggcaaaaagtgtgtccggcacggggaaaatagctcagccaattattcctgcctaattgtaccgaggaaagcatctaaatactgcctgtgctaattataccagcgttattggggtttatcttcccggcgagggtgacctttccttcaagagtgactggcggggcgggcaaggccaggcaccccagcagtcgcagaaaaatcccaaaccaacaattattattattattattctatttatacagctccccct

SEQ ID NO: 12481 - DNA, 762 bp, Artificial sequence
  DNA replication origin
tgagaaggcgcagaggccgctgacgtcctctcctgttctcattcggctacatctggaaagggtggtgctgtctagcccgggcccaggaggggaggaccccacacccgggacgggctcaggaggggaggaccccacacccgggacgggctcaggaggggaggaccccacagccacgcagggctcaggaggggaggcccccacacccgggacgggctcaggaggggaggcccccacacccgggccgggctcaggaggggaggcccccacacccgggcggggctcaggaggggaggaccccacacccgggacgggctcaggaggggaggatgccacacccgggacgggctcaggaggggaggcccccacacccgggacgggctcaggaggggaggaccccacacccgggacgggctcaggaggggaggcccccacacccgcgacgggctcaggaggggaggaccccacacccgcgacgggctcaggaggggaggaccccacacctgggcggggctcagggagccactgggcgagggctgtgctgcagctcctccctcctcacccgtgtgcctgatctgagcacctgtcctccctgcccgctgcgtcccctttcttcccttaaccttcattgtgttctgtgctcctgctgccctcggggccagtccctgtcttttaacccacactcagccccttctcccaccttctccatccccgccacctcctctaactcatccctgtggcctccatgcccttccacggcccttg

SEQ ID NO: 12482 - DNA, 921 bp, Artificial sequence
  DNA replication origin
cggggccttgccacaggctgaaggtctgtgtccctctaaaatccatacgttgaaattctaacgcccaagatgagggattaggaagtgcagcccttggactgggattagcactttatgaagaagccgagagctccctcaccgcaccccacgtgagcgcaccgcgaggaagtgcctcccctcagcagacaccacgtctgccggcgccttgagttcccacttccactccagaacctgagcagccaatgtctgctgctcataagccaccctgtctgtggggttccagcagctggacgcaaagagacagagcattggtaccaagagtggggtgcagctgtaacagaccccgaaagcctctctggagctggggagtgggagaggctggaagggttggggtggagcctgtgaaaagcagatgttgccgagaacaggccatgaaaggtgatgctggtgagggctcaggaggaagggaggagcactgtggagggagcccccatcttcctgcacaaggaatgctcccagaatcttaggagggggcacggacaaggccgctctgaggaggccgtgggtgtgtgtggtggtgaggggagacccgcctcgggtggagctgggctgggctgggctgggcccgggccgtgttttctggaaagtgagtgtgtgagggatgagactggagatttggccacagctctttccaggccaggcgttgaggtgcagcctttcctcccgctgttatagtcagatgcgggcacagaggggcggcctaggatggcatcaagcagaaggaagcggaacttaagcacctggggaatgctcagcttgtcgctgtcatcgctgctggagaaaacgagagcaaccctagggagagaaccctagggtgtggcccgcaaccgtttgatagggaggctcgtgtgggtgtgacct

SEQ ID NO: 12483 - DNA, 1114 bp, Artificial sequence
  DNA replication origin
cctccagacggttccagtctctggggcagagacacgagggtgcactgtgctgaggagaggtcttaagtggggaagaggaggctcagggagcgctacagagaagctgctggtgtgagacgccacgggaggctgcggacaggcaggcaacgcagaggccatggcacctcttgccggccagccccagagcagtcctgcttggcgggagcgttgggggcaggcaggggtgaagggcagggaacatcgtgaaaaccaactagatctgttccacgggctgacgggagccctgagggccttcagtgagggtgtaccatgactggggaagcagcaggaggcagcgacatagggcccggtgagggccaaggaggagagatgggcagctcagctgccagcgctggctgggccaggctcctgcaggcgtctcactgtgctggcctgctctccatgcccacagcggtcctcctgcagtagggatggggaggtgcagctcggaggtaggggaggtagtgggcagcactcactacagggcccgctgggctcctgaccgcagagtgggtcaccacagcagcacctgctggcccagtgggtgaggggctgaggtcggctgcagtacttggagatctagggccaagctggggcgaagtgggagacagaggcaggcagaagctggtgagatggatggcacggtcagtgccacagacatgggcaccgtaggcctcccctggcatcactgaccacatgccagggacacacatgaagctcatgcccagcccaagctccagaggccttcggggctaatggaggaggggaatgccgggacaaggaagtgtgggacaaggaagaggtgctggctgcctccgcaggacccccccggaagatgtagaggagagaagcgggtccagcatggaaggcggcactgcagcctgagctccaggtctggatgaggcggtggcagcagcttcctctgggggccgcaggaattgggacagatctggcccttctgctcgcccaatcttctgcagagtgcaaagcgggccatgcatcccactgcaggtgtgcagtgagtaggagcgaggtgggccatggggcgcggaggcttctgcacatctcagcagca

SEQ ID NO: 12484 - DNA, 820 bp, Artificial sequence
  DNA replication origin
aaacctggggagtttaggaacctggacttggttcttgcccttgagagcctataaggtggagttcagggagagctaagagcctgcgccgaggtagatgctgggaactcagagaggcctctgggagaggctgtgggagggggtcccaggcaaggggtgctctccacgtgggctgactgctccttccctggcgttcccccgggcctctgtggcccccacagcagcgtgtgtgccttctccttgagacccaaccccgccccatgccggcagccatgggggcgggcgatggtgcctgggcatggatcgttgctcggatgttcccgtcccgggcctcaccgtccacgtgtggcctggaccagttgcgtcggtgccattcgggccccaccccagcctgccgagccagagcctgcctttcacagagccttgggggagtcctacacacgcgagggtttgggctgtgccgggctagctttctgcctggcgcggtgaggcggcgcttccgtgctcagcttcgtccgtgtggggaagaggccaggttctccatgcagagggttggtgtgccagggcttgcaccgctgggcccctgtgtggggaggtcacaccttcagctccttagctgacatgctggtcttctgggcgttcccctggtggtcgtcactgcgtcctgttggccccttggtgctgagccgcatccccaactgtgagaactctcgcctctggttaaggctgtgaacacgcagtgcgtgtcactcctacccggcatgggctgtgctgacttccaggcaggccgcaagggtatcgcatgacgcgctggagaaatcca

SEQ ID NO: 12485 - DNA, 2202 bp, Artificial sequence
  DNA replication origin
cggcagccccagtgtggccccgatcctctctatagagtgtttgagtcccaggcctgcagcaccccgtggggctcacagtgtgcatgtctgaccctgcaggcagccctgcggggtaggtgtcagcctctctgtcgcgggacaggggacagagggagcgcagatggcctgcagggtgtggaggaggctccccaaggcctggggcctggactgggctgtttgggcctgtatctgtcagcaggagctgccgcctgggagtcatgctggaacacagcagagcctggagatgagaggtcttcatcctgtctctccctccctctgctttctctgtcctgtgggctctgagccaccgtagttctgccccctctcttctcatctcctccacccccaagtgtggggaccctagaccctgtcccctccatgtcccctccacatctcctctggggctccgagctgctggccctccggggaagcctgcaccgccatcacaggtgcaggagttcagagtggcaggcgtatgttgggttcagcgtggcaggcgtatgttgggttcagcgtggcaggtgtatgttggcttcagcgtggcaggtgttatgttgggttcagcgtggcaggcgtatgttgggttcagcatggcaggcgtatgttgggttcagtgtggcaggcgtatggtgggttcggcgtggcaggtgttacggtgggttcggcgtggcaggcgtatgttgggttcagcgtggcaggcatatgttgggttcggcgtggcaggtgttatggtcagttcagcgtggcaggcgtaggttgggttcagcgtggcaggcatatgttgggttcagcgtggcaggtgttacggtgggttcagcttggcaggcgtatgttgggttcagcgtggcaggtgttacggtgggttcagcgtggcaggcatatgttgggttcagcgtggcaggtgttacggtgggttcagcgtggcaggcgtatgttgggttcagtgtggcaggtgttacaatgggttcagcgtggcaggcttatgttgggttcagcgtggcaggcgtatgttgggttcagcgtggcaggtgttacggtgggttcagcatggcaggcgtatgttgggttcagcgcggcaggtgttatggtcggttcagcgtggcaggcgtatgttgggttcagtgtggcaggtgttacggtgggttcagcgtggcaggtgtatgttgggttcagcatggcaggtgttacggtaggttcaacgtggcaggcgtatgttaggttcagcgtggcaggtgttacggttggttcggcatggcaggcgtatgttgggttcagcgtggcaggtgttacggtgggttcagcatggcaggcgtatgttgggttcagcgtggcaggtgttacggtaggttcatcgtggcaggcgtatgttaggttcagcgtggcaggtgttatggtcggttcagcgtggcaggtgttatggtcggttcagcgtggcaggcatatgttgggttcagcgtggcaggtgttatggtcggttcagcgtggcaggcatatgttgggttcagcgtggcaggtgttacggtgggttcagtgtggcaggtgtatgttgggttcagtgtggcaggtgttacggtgggttcagcgtggcaggcatatgttgggttcagcgtggcaggcatatgttgggttcagcgtggcaggtgttacggtgggttcagcgtggcaggcgtatgttgggttcagcgtggcaggtgttatggtcggttcagcgtggcaggcttatgttgggttcagtgtggcaggtgtatgttgggttcagcgtggcaggcatatgttgggttcagcgtggcaggtgttacggtgggttcagcgtggcaggagtatgttgggttcagcgtggcaggtgttatggtgggttcagcatggcaagcgtatgttgggttcagcatggcaggtgttacggtaggttcaccgtggcaggcgtatgttaggttcagcgtggcaggtgttacggtcggttcagcgtggcaggcatatgttgggttcagcgtggcaggtgttatggtcggttcagcgtggcaggcatatgttgggttcagcatggcaggcatatgttgggcaccaactaggccggatgtgacacatcgtgagctgccacctgcacagccttcctgccgacagttctgggcagcggctcgcatctggggtcagtcactctccctg

SEQ ID NO: 12486 - DNA, 1139 bp, Artificial sequence
  DNA replication origin
tccgggtggagtgctcctcagcactcaggggtcctccctgcacccaccccgcccagaaccctgctccttgcccctctccttccagagccctgtgtctggctgctccaattactggagcagttccgtgtcctcttcccgagtctcctgctatctgaagagttcattacataggaatccgaggcctcgctgcctacattagcaggttttcatagactgccacatctccaaaaggggaaaagagacaggagatttaaaactctcgtcttgccgaaagcagacagattgactcgaaaatgacccagtcaataaaagatgagctctggaaaggcttccctcttctcagagggggctcgcctgccggggagctgaggttctgcaagcctcggtgggaaattaatcatgaacgcggcatgcaaagcggccggagcccacacagccccgcccccacgtctcccaggacctcgccgccgccaccccaggcctctctccacggaccagctgctgggcatgttcctggagggaagcttccggaaacagatgaggtggccgtgttctgtggtcacgtcttgactcggctgtgatatcgctgtggggcactgctccctctggagtgtttctggctctgggaggtgcgtgcgcggtgggctccctgcctgcacaggggccctggctgtgggcctgtgaggctgggtctgcctggagctggtgggatgagaggggagtgctctgaggaccgttcccccactggtgcagggatggggagcacagggtcccggtggctctgatgcatcggcggcagggaccgcagccctgcctgtgccaggaggagccgtgagaggatgggcaccccttgccctctgtgggctggcatctccgtgcagggcctgcagtctctgcagtggccacccattcttatctctcctggtgcccacacctgccgcctgcctcacctcacccaaacaggaggagtcacctctgaccccaactgcttccttttaccagagtttctcagctcatgttccccaaaaggataggttaagttttccttttgagccacacatgcccccatttgctgtctgtctctcagatggccatccttcatccagtcgacagggctggccttgcggtttccactgctg

SEQ ID NO: 12487 - DNA, 1715 bp, Artificial sequence
  DNA replication origin
gaggtggaagaaaagaggggaggcccgggaggggaggagggaggggaagatggttggccacagagttgctctgcctggaatccacctgctcggcctcagggaggagggtgccctcgaggggaggcctggtttggtgtccctgcctgggctgaggacgggagcagtgactgcctttctgttgcgtcctgtgcactgcttctgtctgtatcggcgcgtgtcctctgcagtctcaggactcacacttttcctgcttggctggcgctggccccacaggtggcctcagtgaggtgccctaatggctgctccgtggaccaccaggacaagcactgtggagagctacccattggcctggcagtgccaagccagctgtgccctcccacggccagaaatcagtgcccagctctcacgtggcacaggcctgtgtttacgtcatgcccccaccccgtgccacctgggcagggccgccacctgcccacgcctctgtttgctcagtacaaacaccgtgcaatgccgacagctgagcggttcaaatgggatgggggtgcaggggctccagccctgttcggcagttagtgggagttggagaagaagggctggcgtctgaagtgcaggaccatgcctgtttggcccagtcctgtgccaagctgagatcgtctgcctgggtcctgccatctagggacctgcaggtcatggggaacagtctcaggtgtggcaggagttccgtcgtgggctcctctagggaccggtgggtcgtggggagcagtgtcaagtgtggcaattctgtcgtgggctcctctagggactggtgggtggtggggagcagtgtctggcgtggcaggagttccgtcgtgggctcctctagggaccggcgggtcgtcgggagcagtgtcaggtgtggcagttctgtcgtgggctcctctagggactggcgggtggtggggagcagtgtctggcgtggcaggagttccgtcgtgggctcctttagggaccggcgggtggtggggaacagtctcaggcgtggcgggagttccgtcatgggctcctctagggaccggcgggtcgtggggagcagcagcaggtgtggcaggtgttccgtcgtgggctccgactgtagtgctggagacagaagtgatgtgacgtcagccaaggcctcgggcacgagctggtggctctccactgtctggagaagtagctgccccccacgtgctgcttggtgctgcctattttttaattgaattgttagtattgagtttggggtgaatccaagttgagtatatagctgataaatatcttctcccagcccgtgacgagcctcttcattttctgaccctgtgttcctcggagcaaatgcttttcatctgggtgcatgctgatgatcaggttttcttttataggggtcagatccagaaactctctgcataactccaggccaaacatattttttcttgttttctactaaaaggttttaagttcacatttaaatctgtgacccattttgagttagtttttgcccatggtgtgagcttgagttcaagctacttttcttttttgtttttatatggatgtccaattgtgccattattattgaactgactgtcctgccaccattgaattatgtttgcacctttgtccaaaaccagttggccatgcgttatgggggtctctttctacaccttctcttctgttcccttgatctaagcgtctgttcctttgct

SEQ ID NO: 12488 - DNA, 1115 bp, Artificial sequence
  DNA replication origin
agtaggggacgggatgaggggttgtggcagtggggacgggatgaggggacgtggcagtggggacggggcaggggacgtggcagtggggacggggcgaggggacgtggcagtggggacggggcgaggggacgtggcagtggggacggggcgaggggacgtggcagtgggggatgggcgaggggacgtggcagcggggctgcagagtcaagagctccctttcgtgtttgccacggcttccccaagggctgtctctggtgtgggccccagacctccggtcagagaagacacagaaacacataaagaggcccctgctctcggggatctgagtccctgctcggaagttcaggcaggaacacccttgtgattttcctggtgtctttgacaaggcagtcactaaacaacccttgccatcggcacgggcccttggcggataggagccccaaagcccggcctcccgtgctggctctgactcctcactcagcccccctgccacgtccaggctgggccagggagattgttaattgcagcttaattagggaatgcattaatattaaaataatcttagcagcacattgaaggtgatcaaatttgtcactgcctgtgtgggcacagctgatcctagaggtgtctttggggaggagggaggcagggggaggatggaggagcgaggaagagggagaagagataccagggaggagaagggaggaggtggaagaaaagaggggaggcccgggaggggaggagggaggggaagatggttggccacagagttgctctgcctggaatccacctgctcggcctcagggaggagggtgccctcgaggggaggcctggtttggtgtccctgcctgggctgaggacgggagcagtgactgcctttctgttgcgtcctgtgcactgcttctgtctgtatcggcgcgtgtcctctgcagtctcaggactcacacttttcctgcttggctggcgctggccccacaggtggcctcagtgaggtgccctaatggctgctccgtggaccaccaggacaagcactgtggagagctacccattggcctggcagtgccaagccagctgtgccctcccacggccagaaatcagtgcccagctctcacgtg

SEQ ID NO: 12489 - DNA, 1317 bp, Artificial sequence
  DNA replication origin
ctgagacagcgcccagtgtcccaccaggaagcaagtcccaggggagtcccctcacaccctgatcacccagcatctcgggggtcagcagatgtctcttcctgctctggggaatcagggcccccaaggaacaaggtgaaggggatgtgacggtgggacgaagcaaggggacacgtggcagtggggtgggcgaggggacgcagcggtgaggtggggtgagcggacacggtggtgggatggggtgaggggacgtggcagtggggacggggcgaggggacgtggcagtgggggatggggcgaggggacgtggcagtgggggatggggcgaggggacgtggcagtggggacggggcgaggggacgtggcagtggggacggggcgaggggacgtggcactgggggatggggcgaggggacgtggcactgggggatggggcgaggggacctggcactggggacggggcgaggggacatggcattgggggatggggcgaggtgacgtggcatcggggactgtgcgaggggacgtggcagtggggacggggcgaggggacgtggcagtggggacggggcgaggggacgtggcagtgtggacgtggtggtgggatgtggcagtaggggacgggatgaggggttgtggcagtggggacgggatgaggggacgtggcagtgggggcagggcgaggggacgtggcagtggggacggggcgaggggacgtggcagtgtggacgtggtggtgggatgtggcagtaggggacgggatgaggggttgtggcagtggggacgggatgaggggacgtggcagtggggacggggcgaggggacgtggcagtgggggacggggcgaggggacgtggcagtgtggacgtggtggtgggatgtggcagtaggggacgggatgaggggttgtggcagtggggacgggatgaggggacgtggcagtggggacggggcaggggacgtggcagtggggacggggcgaggggacgtggcagtggggacggggcgaggggacgtggcagtggggacggggcgaggggacgtggcagtgggggatgggcgaggggacgtggcagcggggctgcagagtcaagagctccctttcgtgtttgccacggcttccccaagggctgtctctggtgtgggccccagacctccggtcagagaagacacagaaacacataaagaggcccctgctctcggggatctgagtccctgctcggaagttcaggcaggaacacccttgtgattttcctggtgtctttgacaaggcagtcactaaacaacccttgccatcggcacgggcccttggcggatagg

SEQ ID NO: 12490 - DNA, 1732 bp, Artificial sequence
  DNA replication origin
tctaggacagaacctggtgcgttgggtgtcatgatgcggaccggagctttccacacgtgtgtgccaggcgtgggctgccatggacgttggtccccaggtccctgggtcactctttggcagcctcctccttccctgcgtgccacacacatttctcaggttttaggtttgctgccccgcacaaaaagactgggaagcacctgtgtagacagctggcaaagagggatggctgccaagagccatgagcacctagaaggctgagtgcgtgggaagcaggacgaccattggctctggggacagcagagttgcatgagaagcagcagaagcagcagtgtcctgcattctgagctggccctgagcagcctcacacagtcgtaagggagctgaggcctgatctgaacacagccctgagcctcatattaagaaaggggaccaggaggagggagacgcgtgttgcagggtgggagggagggagagctgaagcctcgctgtctctcgggaagtcagcaggacgtccgagcgctcaagtccagaaggagccacagaatgtgtattccagagaaatgcagttaataccgacatgatcggctgagaggtgaacatggtggactctggagagaaaggaaggaaatgagaagtgtggagaccgctgttccctgacacaccccacagaattcctgggctcttaactcatgtgcatgtaaatctaaagttaaaaagagaaaagtccaggtcacgccgcttgctgccagagagggctgtcccctccccattctccagatgaggagcaagggtgtgcccgcagtgtcagcagacccttgacgtggaccccacgacgcgccctcgctcctgtgaccgtgcgtggggtgaggagttgggggtgttcccgtggtgtcagcagacccttgacgtggaccccacgacgcgccctcgctcctgtgaccgtgcgtggggtgaggagttgggggtgttcccacagcatcagcagacccttgacatggaccccatgatgcgccctcgctcctgtgaccgtgggtggggtgaggagttgggggtgttcccgtggtgtcagcagacccttgacgtggaccccacgacgcgccctcgctcctgtgaccgtgggtaggctgcctgcacagtccctgcaaagggtgagatggcaggtgtgagcctgagacagagacggatgctcctccccggcctggctggccctgagcatgggttaggggtgggtctcctgggtcacgagagagaccagggtaagttgtgagggcttcaggccagcaggtctgcagatggcaggcctgtcactggcttaagggggagccgcgtggcctgagacagcgcccagtgtcccaccaggaagcaagtcccaggggagtcccctcacaccctgatcacccagcatctcgggggtcagcagatgtctcttcctgctctggggaatcagggcccccaaggaacaaggtgaaggggatgtgacggtgggacgaagcaaggggacacgtggcagtggggtgggcgaggggacgcagcggtgaggtggggtgagcggacacggtggtgggatggggtgaggggacgtggcagtggggacggggcgaggggacgtggcagtgggggatggggcgaggggacgtggcagtgggggatggggcgaggggacgtggcagtggggacggggcgaggggacgtggcagtggggacggggcgaggggacgtggcactgggggat

SEQ ID NO: 12491 - DNA, 1142 bp, Artificial sequence
  DNA replication origin
gactgccctgagtctgggcgcaccctgccggcaggtaggggcttagtggctggctagcgggtggtgtgccctcctggagtagtatggtggggttggaggacaaaagccagaagggggggcctgtgttgccagattgaggggcgagctgatggcagtcgggggctcctttccagctccccacctgcacaagggctgctcccggtctccactgtggctgtgagggcctgagcccccatgtccccagccccctttctggtccagccgtggctccctctccgccctgcattctgcaggtgttattggcaagtttcggagctgaggatgcagacttggagccatatttttaggtggctctgcaccctgggagaggatttgggaaggggccttccatcccctgctgtcacgggcctgtgccttggctgtgcacccattcgcttgtctgtttgttcccctgttgtctgggtctctgcccgtctcgggtttgcccgtctgttcgttcccttgttgtctgggtctctgcccgtctcgggtttgcccatctgttcgttcccttgttgtctgggtctctgcccgtctcgggttcacccgtctgtttgtccccctgttgtctgggtctctgcccgtctcgggttcgcccgtctgttcgttcacctgttgtctgggtctctgcctgtctcgggtttgcccatctgtttgttcccctgttgtctgggtgtctgcctgtctcgggttcgctcgtgtgttcgttcacctgttgtctgggtctctgcgcatctcgggttcgcccgtctgttccttccctttttgtctgggtctctgcctgtctcgggttcgcccatctgttcgttcccctgttgtctgggtgtctgcctgtctcgggttcgcccgtctgttcgttcccctgttgtctgggtctctgcctgtctcgggttcgctcgtgtgtttgttcccctgttgtctgggtctctgcgcatctcgggttcacctgtctgttcctttccttgttgtctgggtctctgcctgtctagggttcgctcgtgtgtttgttcacctgttatctgggtctctgcgcatcttgggttctcccgtctgttccttcccttgttgtctgggtctctgcctgtctcgggttcgcccgtctg

SEQ ID NO: 12492 - DNA, 2062 bp, Artificial sequence
  DNA replication origin
gcgcctctggccccggccctggactgtgtccgtgtgtgtgtgtgtgtgtgtgtgtgtgtgtgcctctggccccggccctggcccgtgtgtgtgtgtgcgcctctggtcccagtcctggtctctgtgtgcgtgcgtgtgtgtgtgtgtgtgtgtgtgcgtgcgcgcctctggccccagccctggcccatgtgtgtgcaccttttcatatgtttatcagctttttgggtgtctttttgggaagtgtctgctcacatgttttgcagatttttagagtgggttgtctgacatgcccttggttatttctgacatgcccttggttatttctgacatgcccttggttatttctgacttcttcgtatgttctggatctgaaccctttctcagaaatgtgattttcaaacagcacctcctgctctgtgggtgcctttccactgtttcagtggatgaagttcttaatttctataaggtcagttgtactcttttttttttcttttacggccagcacttcctgaaccctgtttgagtaacctgtgtctactcccaggagacagaatgtggtggaattgatgtttgtgtgtgatgtgaggtcggggtctcaggtgtgcagtgaccctgcacctccctgccgtgggcggctgttgtttgtgtgtggcgtgaggtcggggtctcgggtgcgcagtaaccctgcagctccctgccgtgggcggctgatgtttgtgtgtggcgtgaggtcggggtctcgggtgcgcagtgaccctgcacctccctgccgtgggcggctgatgtttgtgtgtggcgtgaggtcggggtctcgggtgcgcagtgaccctgcacctccctgccgtgggcggctgatgtttgtgtgtggcgtgaggtcggggtctcgggtgcgcagtgaccctgcacctccctgctgtgggcggctgatgtttgtgtgtggcgtgaggtcggggtctcgggtgcgcagtgaccctgcacctccctgctgtgggcggctgatgtttgtgtgtggcgtgaggtcggggtctcgggtgcgcagtgaccctgcacctccctgctgtgggcggctgatgtttgtgtgtggcgtgaggtcggggtctcgggtgcgcagtgaccctgcacctccctgctgtgggcggctgatgtttgtgtgtggcgtgaggtcggggtctcgggtgcgcagtgaccctgcacctccctgctgtgggcggctgatgtttgtgtgtggcgtgaggtcggggtctcgggtgcgcagtgaccctgcacctccctgctgggggcggctgtcccctgctgtgggcggctgttccctgctgtgggcggctgtcccctgctgtggggggctgtccctgctgcagggctgcatggtgcttgttgctgggggtcggtcacccaccacaggtcagcaggctgggcctccaggcgcactcctccctcaaggatgccacacacatcccggccctgggtttcgtgggaacatcaggttgcgaggcgcattcctgagccacccacgctgatgccaggctcccttgccttccatctctgtgtggttgaccttgtttctcttgtggcacggggcaccttccaggctggtagggaagagatgggaacatggccacacgggctcccagtctcatcccagccaggaacctcagaggagaggaagcctccctcccgggcactgagtgtggaattctgggaagcaccgcacttggctgagcaaaggccgcatgtcccctctcaccctgttcctgtggttaggcagaagggacccagcaggtggccaggccttgttcctgcacctgtccacagggcacagggaaggagccactccttccaggagagatggctgccaggcaggctcaagaagacaaaagaactgagcactgtgctgtgtgtgacccgtgctgtgtgtcttcctgggccatggtgacccatgctgtgtgtgacccgtgctgcgtgtgtgcctgggccatggtgacctgtgctgtgtgtgttcctgcagggtgactatgaccagagcaggaccaaagtgctgcacatgagcctgaaccccaccagt

SEQ ID NO: 12493 - DNA, 1311 bp, Artificial sequence
  DNA replication origin
cagagcccctagaggcagcacgggaggggcagactgggcaccacccacccgctcacgtccccaccgtgattctgggccaggctcttgacctccacgcgttcgttcctgccatccttcctttcttcccttagtccatccacccgcacacctgtctgtccatctgacatgatttccaggccctggatgccctcagcacagctgtgaatacaggggtggagctgccactcatggtgggagcagctggcatcccacagaggagcctcctgggccaacactcagcaagtggaggggacattcccggcccctccagaaggaggccacgcctgagcccctgggggcccaggacctctgctccaggtgagacaggaccgtgccccaaggtggctgggggcgacagccaaacttccagcctgctgctgtgaccacagcctgggcagcgcagagtcaggcacaccattccatgcctcggagcccgcgcgccacacatttcagcaggtgctggaagtgcaggggtaatgggagccctgtgctgaggcccgtctccagggcagccgagtgtcgggatgggaggacggccctatgtcctatacaaacagcaccactcctgcacccaccccaccaagaggagccatttcaaacacacaggcagcaaaacagcatgggaggaaactaggcgggatctaggtgattaggaaacatcccatgtctcggatcagaagacccggcgctgtcgggaccagagactcccagggctgatctgcacattctgtacaatcccaggactcagccggcctccctgaagaactgataagctgattctgaaactcacacggaactgcaggggctcagaagagccaccacaggcttgcaaagggggaacacgggaggaagactcagtctcctgatttcaaaacttactacaaagccactgcaatcaggatggtgtggtgtgggcatgaggaccgacgtacagaccaacaacacagtggagagtccaggaaccaaccacacgttcatgttaagtgattctgagaaaggtgttaagacctttcgatagggaaaaatagtcttttcaacaaatgctgctgggacaatgggctggcgcatgccaaagaatgaagctgggccccacctcccaccataaacaaaaactaagtaacaatggatccaagacccacgcaaagcccaaccgtaaaacctgtggaagaaaacagaggaggaaaccctcctaaccttggatttaacaaagaattcttagcccaaagcacaaagaacaaaagaaaataacaggtaatcagacttcatccaaac

SEQ ID NO: 12494 - DNA, 2762 bp, Artificial sequence
  DNA replication origin
tgagcatgggcctagaaggtacttctgcagcaacaatgcttcgctcctcttgaggcagggagcgccggcaggggagacatctgagcacagcccagtgtcaccgtctctcggcagggtggccgtgcagtgtgagacctagcacacacctccggcaccagctgatgcctcctggagaggttttgggagccccgcaagtgctgtggctttacaaacaaccccctcagtcttcacatcaatctagcagggaagtcctggtgcctgagtaaaggggagactgaggctcagaaagccatctgagaggcccctgatcacagagctggtaaggggcctggccgagggcccagggtgggtgttcctgaccctcgcctcccagggcttcataggggagtgaacctgcccaaggtgatgagtgacgacatggtgggggcctccaaggccatctccgagaagctgccttctgcaggggcttcttgacttagggagacgctggatgaaaaggccccttttaaaatgatattatggattctgaaggcttgggagcaaaatgctttcaagggctgaattggaatgagcgcacgcgtgtagctgcagccatgttaacagaatgacctgcgtgacccaccctcgccgccagacagcaagcccacatgcgggctcatttgtgcaccgaaggggtgcgctttcttctgctgccctcctttcagacaaactgctaccgcacagagagcgagaaagagaacaaacgaataaacaagttggggggatggtgctcaaaagctcagaattctggtttgccttcaaatggctcaaagcaatcagttctggcataagcttcttgaaattgacttactgcaacttttttaaacacgaggagcgctacataaattagctgccagcctagatctttcctcgagaagatgacgccaatcaaagcaggtgcctgtctccgagcgtgtgcgtggaaagcaggtggagggtagccgggatcttgcttataacaaacccatcacacacgggggaaacttttgcaagaaaaatgattagttgtttttgctgaactaaaagatgcataatgggggcgggaggcctgggtgccgcaggtgaggctcctggggcctggagaggggacagtagggagacccgaggcccaacgggcagacagcatccagtccaggaagcccctcacccaggccagcctcccacgggtcccagacccctgcactgcccgccagcccctccccagtgggccttgaccaccacacttcacattttacttctctgtccccttcatcaaatggctagctccacgtttccagccctgatcatggtgtctggctcacagcaggcattgatgaccatttcccttgaacaacgggtgtgggaaccccaccagagaggctggcgagtggggtacgtaggacccccagccctggagatggtcacacaagggtgggtggggcccagcttaacccaacactcgctgcgtgtcctgacacggagcacctcgcccctccaggcttgtttgtcataaagagagcacgtgacaaagccgcgcagacatggcagtgtgacgggtgcccacgcctgcccttcctctcccacagacagggctacaatgcctggacacgtgcccggctctggaaggcccaccgcactggtgggtagggaacatcgtggctcttctctcgcatcccctgacctcaacctcgtgccaccatccaggcagtggtgaggctgctgtaccaggagctcaaggcgaagtcctccagcactcacctgggggccggaaaagaaagccactgagcttcaggagcgtgggaccctccctgctcggagtatggactccccggcccccgtggcccctgcctctgctcttcgcacactaccacgggctcagcccacagggctgcagtggcggcagggagcctgaggcaggagccgtgctctctgtctgaagctgctgtcgttccagatgggcaggacaaactctagctgcgttttcctccctgtcctccctcctgcagggccgggcgtgggcccaacctccatgacaccagcaaagtgcaacagacggtgcgaagagagccccacgtccctggaggaccacaaaggggagacccagaaacgtgaaaggacccgaagatcacagaatggaaggactgaaaagcgtagtcctggagagttggggggcatccctgggtcggcccatgcctgggtcccatccacactggcatctgaagccggtgagagctgagggcgtccctgggttggcctgtgcctgggtcccatccacactggcctctgaagctgatgatagctaagctgacaggcactgccaatgtcccaggccaaggccaggagcgctgccaaggcttcacaacctgaactgggatgggaaccgcgccccacagaaggtcgctgggacctgggctagaaaccacccaggtcggctcactgctaaactaaaacactctcatttctcacaggacttaaacacaaaacctcttctcacaatgctcaggacataaccccaaattactcggcacatgaagaaccacagagatttcaagtcagcctggagagaggcagttccagctgctggggctgaggagatggggctgggttatctgggaagtgcggcggagaggggccacaagacggcccatgcagacgagtgtgcacgctctcacagcacacggaaacccaaaggtctcagcaaattcacagaaaagtgaattgctgaaaaagtatttaaggaaata

SEQ ID NO: 12495 - DNA, 1684 bp, Artificial sequence
  DNA replication origin
gctccaggggacatcaaatggccctgcagtgagatgggggtggcagtggggagagagcacccttcctaggccacacagctttggtgtgtgggcccctggaccccccgcggcagcagcctctgcttcgtccgtcacacccactccctggggttccagttttcacctgtggatggcccctctttctcagggttgccgagagtaaagcaggaaaagggctgcctttagtgtggccccggcccaggaagtgctctgcacatggcagctatgatgccttctagattcgatgttcctccagcgtctctgaagcattcctcatgcatgggctgtgccttacacatcgccctctctgggatctgccggagtctgagcggtttcatttacatctgctcagccgttcaagtgttcagatactgagtgtgtgccgtggcgtccttagggccgagcatggaggctgatggagtggtgagtgggccccgacgcgctctccgtcttcatctgcgtctccatgtctcggggacctgggggccattcttcacctagaggctctgtcgttacagcctgtgaggtgcacgtggtcctgtgacagtggatgtctccccctggaagtgcgtctgcgtgtggtcttcgggttgatggggttgggggctgtgtgtgagtgtgggtgtggggtgggggaagctggagaccgggcaggtgccatggtgagcatgcagtctctttcctagcagcagtgggaggcactagaggctttaaagtggaagaatgtgactggagaaagcactggctgccaggcctggggaggggaaggagagtggcagaggggccgtccccaccacctgctcaccaagcattggtgctgggagcccctccgaagccggagttggcttttcctttgcagagatgagcaaaatatgcctcccacacacaccctgacttgcaagagcagccccacctggggagaaagacccttgccacacagagcagcgggcctggaggcctcggagagggggtagtgtgtagtgagacagaaggaatggcccagaagggcagcccaggcaggtcaggagctcaccaaggccaaggctggatgacgtgccagacaggcttcaatgtgtgtctgcagtgagagggggagctgggaccagcagcagaggccacaccttgtcatcatggagaaagggcctctggaggcacgcgggcgcagggggagaggccgtgcacagcagcgcatcgggaaggtctgggctggtgtggctggtgcctgaccctgcaaggtcctgaatgccacgcgaggcagggtggtctccaccgttgtcctccagtccccaggagccacgtgggaggtggtggagtaggttcttaaatctggggagttgcagctgtggcttccagcatctgtgaaggtttcaggaaggtcagcgtgtcccggcccgtggctgcccacgcaggagcctgcgtcacgctgcacggctccccgctctctgagatggcactctgctttctgctgggccttttggcacctagaacctctcgttctgcagttgatgggagcatggccaggcgtgtgtcagatttgtgtgggctggcatgcttggggtttattcatttttacaatttaagaaaaggcctttatcattgatatcttttacatcaaggtcaaagcttctcgtccccaccattttgt

SEQ ID NO: 12496 - DNA, 1347 bp, Artificial sequence
  DNA replication origin
actctgagaatacagttgggagcttacttatgagtctaaggttacacattaaaataaaagggcttgattttttgctctgaacattgtggcacacgtcagcatttcccccttgtttcctggaaatcatctacaaataacaagaagcgtgaaaaccaaaatggcacttaaattttgacaaaacagaaatgcagctgcaaaccaagccccaggcagaggcaggaagcccgtggtgcaggagagtgcagtgagcagacgcagtgagcagacacatccccggggaagcctggagcagtgcgggtggaggcagctccatgagggagccgcggagtagaacccccttgccggcgcgagggagccgcggagtagaacccccttgccggcgcgagggagccgcggagtagaactcccttgccggcgtgagcccttgcgagaggcggcccctgaccctggctccgcagtgcgggggccggcggcagctggaacgggggtccctggactggcgtgtggttccaagctggactggcgtgtggttccaagctggactggcgtgtggttccaagctgcagcagaggttggtgctgagctgaggggtcacacaggtgcatcacacgtacttgaagccgcatctgtggcagacagaacatttgctcttaggaaaactcacggtgtcctttctctcctgccggagggagctactgggggctgattggactcgcagcaaaactgtcactggatttcagataaaaggaagcaggcctgtccttccccactgtgaacctgtgcacggagccggattcaataaaactcatcttcagcagtgagcagtaaaggttactccatgcatttgtgttagagcaaaggagaaaaagaacaaaaacaagtggcagaaaaagtttcacagaaaaacggtggacattgagcagatgaaaattctatccagacattttgccaagaaacaaaagttaacgaggcggtagagtctgtgaggcttgggcggaacgcacacgctccaagaagagacggtgaggccgggggttgcatgagacaggacccggagggtctcagagcaggagagggggcagtagggggcagtacaggaaggaaggtgaccggatgcacggggaggcgaatcacggggaaaactacctaaagaacccgcagcaagagttccatctcctgaattggaagatgaagtgaatgtggaagcctggaaatgtaagtgctacatgtcatgtattcaaaaagaagtgtcaggatggcagagggaggagagaacatgaggatggcggcttcgctgttgagagccgaagacacagacacaccatctaaaggtagtatcaggtgggg

SEQ ID NO: 12497 - DNA, 1155 bp, Artificial sequence
  DNA replication origin
ggctgccgggcggccgtggccctgccgtgcgggcccggcggctgggcgagggcactgcagttggtgccgagagcaccccgggaccatcctcgcatttgctcttcccccacctgcctctccccccctccccgatggctttccttcccttaaatactgatatgtctacacggcttctcaaattggcggacagcagagcagactccggggcttgtgtgctcagcatgggcggctctcttcgcttcatccgggatacttagacccgccccagtacctccccgttccgagctcggccgcacacacgctggacgtgcctgggaagtggccattgccgcgtctgtgcccaccatctgcccacccgtgtgcccgtccaagcaccgactgtgtgccaggttctgtgctggcaatggggccctacatggttaccacgtctcctccagggaacgtcccatccagtggggaggagagtcacgtgcccagtcaccatgtggtgtggtggagtagagggtgcggtcacagaggagtgggggtgggcacttccagctggcaggggaggggtgagggagctgccaggacagattgtggggaaggcggcatttccactggatctaaatggtggatgggagcggggggtgtaggtggaaggtggcccacagacatggatcatgggtctggccctctgtggctactgtcctgtgccatgggcctggagggggatgtaggggtgagagctggcctggcggggaggtgcagggtgggtggaggacctgcagcatggctgggggtgtcgggcacaggctcaagggggcaggcattggctactctgagaatacagttgggagcttacttatgagtctaaggttacacattaaaataaaagggcttgattttttgctctgaacattgtggcacacgtcagcatttcccccttgtttcctggaaatcatctacaaataacaagaagcgtgaaaaccaaaatggcacttaaattttgacaaaacagaaatgcagctgcaaaccaagccccaggcagaggcaggaagcccgtggtgcaggagagtgcagtgagcagacgcagtgagcagacacatccccggggaagcctggagcagtgcgggtggaggcagctccatgagggagccgcggagtagaaccccc

SEQ ID NO: 12498 - DNA, 838 bp, Artificial sequence
  DNA replication origin
cttctgggtctcccctccctcacgggcctcctgccgctcctcgcctctcatgggcctgccccgggtgtgagtaggtgttctacaggtcctcggtgaggatgcctcctaggggcctgcctgacttcctgccagctcagcctcctccctaggctgtaggctgccccagagatcggagcttcagacatggtcccgtgcctgggagcccgggtttcccacccagggacaggtggtggtatccccgtcgtcacggtgagggctggaggcacaggtgcctgtgagttacctctgagaacgctgctgccccgggcctgtgccctgccagcgagtcccacaggtcctcacaaggagccctctgcaccctccactctcggctgccgagcccgcaggagaaaagacgtggagccggggctgccgggcggccgtggccctgccgtgcgggcccggcggctgggcgagggcactgcagttggtgccgagagcaccccgggaccatcctcgcatttgctcttcccccacctgcctctccccccctccccgatggctttccttcccttaaatactgatatgtctacacggcttctcaaattggcggacagcagagcagactccggggcttgtgtgctcagcatgggcggctctcttcgcttcatccgggatacttagacccgccccagtacctccccgttccgagctcggccgcacacacgctggacgtgcctgggaagtggccattgccgcgtctgtgcccaccatctgcccacccgtgtgcccgtccaagcaccgactgtgtgccaggttctgtgctggcaatggggccctacatggttaccacgtctcc

SEQ ID NO: 12499 - DNA, 1295 bp, Artificial sequence
  DNA replication origin
agcacagaacctggcacacagtcggtgcttggacgggcacacgggtgggcagatggtgggcacagacgcggcaatggccacttcccaggcacgtccagcgtgtgtgcggccgagctcggaacggggaggtactggggcgggtctaagtatcccggatgaagcgaagagagccgcccatgctgagcacacaagccccggagtctgctctgctgtccgccaatttgagaagccgtgtagacatatcagtatttaagggaaggaaagccatcggggagggggggagaggcaggtgggggaagagcaaatgcgaggatggtcccggggtgctctcggcaccaactgcagtgccctcgcccagccgccgggcccgcacggcagggccacggccgcccggcagccccggctccacgtcttttctcctgcgggctcggcagccgagagtggagggtgcagagggctccttgtgaggacctgtgggactcgctggcagggcacaggcccggggcagcagcgttctcagaggtaactcacaggcacctgtgcctccagccctcaccgtgacgacggggataccaccacctgtccctgggtgggaaacccgggctcccaggcacgggaccatgtctgaagctccgatctctggggcagcctacagcctagggaggaggctgagctggcaggaagtcaggcaggcccctaggaggcatcctcaccgaggacctgtagaacacctactcacacccggggcaggcccatgagaggcgaggagcggcaggaggcccgtgagggaggggagacccagaagaaaaggagtagcaggtagatggagcagcgtgcggaagcacgggtgggaaggtgggatccaggaagagggcgctggggacaaggagagggccctgctgaacgcttcctgacatggcggagggcccattcattattcatccaatggtcacagagcaagactcacctcccacacctcccaggggcaactctgccgctgcatcaggcagcgcacacagcagcccggccgtcccccgttcaggtggcacacagcagcccagccatccccaccacagggacctgaggcccaggcactttgtggagcgcccagcctacaagacttcagcgcagacagatcagggccccaccaatgcagtgacagggcagggaagccctccaaagccaggcctggggacaagacactgctctgggcctggcccaggcacagagcactcagtacctaaaacttcgttttctgtgtttactccctcatgcctgtgtcacggtggctgtga

SEQ ID NO: 12500 - DNA, 1221 bp, Artificial sequence
  DNA replication origin
atttaaaggttatgctgcgctagtgagtttgccacaaggaccattagcatgaatgtttcatgaaggttggggctatgagtggatctggtaggccaggcctgtactccaggagggagggaccttgtaggcagaggaacatggggccagccggcctacactgaggctgggccatgccgaagccgggccacgctggggctgatccatgctgaagccaacctgtgctgaggctgatccatgctgaggctggtccacgctgaggctggtccacgctggggctggtccacgctggggctggtccacgctgaggctggagcgctgccgggacgtctgtgctcgcgctcaggctgctctcccagggtccccacacctgttccagtttgggtctgggcagcgcacatgctgctgtgcgagctccgtcttccagggtgaggcggctcccgccgccgagggctcccagcccgtgcctggctttctgctcccctctccctgtcggccccaccggagatcaacaggttgcttcatctcagtcaaacatacagttgagttccgtaaatgagaccaaaatctgtttctgtgagataaaattgataaacctctagccagactaatcgtaactaagaggacacaaatgaacgctcctgggcgtgagagaagtgacagtggtgccgccattttccacgtttcgttagagccgtcctggcgggtgtgaaattttccacgtttcgttagagccgtcctggcgggtgtggagtggctcccgtggctttgtttgcgttaccctgaggccagtggtcctgaacttcaccctgtgcttatcagccacgcatctgtcttctctggagaagtgtctgccccatccattgcccactttgtaaatgggttgttttgttggttagtggtaagtcttcatgtgttctagacactagacccttctcaggtatgtgatataaggggctcctgtgaggcagcccaggaagggctctcagtcttgctgggcatcagggccttgtcagggaggagatggccatctgtgggccttgggaaggggcatggaggggccaggcacacgtggccctgcctcctgcagcctggtgcgggcacagggtttggccagagagaatgatttccacaggataggctcagtgctaggactgcccggagcacacgcagggcccctggaaggcagccctggccgccgggaatcctgtcctccaggctttt

SEQ ID NO: 12501 - DNA, 783 bp, Artificial sequence
  DNA replication origin
tctctgttccctcagacaacagcctagaagaggcactcaacaaatgcttgctgaattagacaacttccctccaatgcaagaggcatttaaagcaaaggttgctccatgtgacacctgctgtggccagcacgattccttccactctgtggagaagcctcggggggcacctcggggcacgcactgaggatgaggctggacgcagggaaacctgagctggtgaacgggcagcgagcctggaaccagccccggggctgctgaggaagatcaggcccctgttctcacccagaatcacttcccagaacagcctggatcttcccagcacacgaactcacttagctttgtgagactccagggaggctccccgcttcctctctccaccctgaggaccaggcagtgaagcacctgcctgtggccacacagcaagagaggtgacaggtgtggctgagggaagggaccagttgtgtgggatggaagggcgggcgcaggagccccaggcggggggcccaggagaggccgcctccagggctggagaggaggagagtgagctaaggacacagtctcagactttgagccattccccagacctgccccagacacatccctggccccaaagagcctctccaagctcaggacacctgcacaccagcgcgcgcggggacatacatgctggtgcagcgtgaactgaacaggtttccagggaccaggaggctgccagcagccatacagaaccccggtgccaccagccatacagaaccccggtgccagcagcaagcccctccagca

SEQ ID NO: 12502 - DNA, 2649 bp, Artificial sequence
  DNA replication origin
ggacagggttggatggggttggaaatcaccgtcttgagaggtacgggcaccagggcctaggctgggaatgggcgagggctgtctgcagaccctggaagaagctgcccagcggcgcagagaggcaacagcagggcaccgcgcgggtctgggcagagctggcatctgcaggaccaaggccaggtgggctggcaacagctgtcctgagcctctggaatggtcgctgttcactcagcagctgcttaaggacattcttcttggtgctggggacgcggcagccagcaacacaggctcctgccctcctggaggcacactgttgccaagtgagtagtcagtggcccataggagagtgaaagacagaacttccggtggtggcgaatggaggagccgcattctcccggggccgctctgcagagcgtcctgagccaagcctgggggacccgactgttggtggtggaaatggtggggcaggcaggtcccggacccaacagtgaggttaggggtgacagaagcggggtccgcggtggttggtagtccaaccttgtgggccctgtgtggtcacggcagggctgtggtttcatgggtggaggaggtggtgacacaacctggtgtccattcgtaaaggatgcctggctgctctgtgcagggccgcaatgggtgggaagtggcaggccggggtgggagacgcaggtgccctgggctaggactgcaatggcgtgcggaggcgtggtccgagtccgctgcgttgaagggagatgcaggtgaggtagagagcgtgagggctgggaatcaaggacggcttcggcattccgccccgggtgggctcatggtatggggtggggagattgagggtgaagtgtgggagtctcacgcctgccacacgttggatgcacagggctggaggctttgagtcggtgccctggggtcagaggtgcccatctgctctgcatggtgtttctgttgttgggaatgagtaggtagcagagaagtcagaactggaggctcaagcctctttggggcattccagcatcctggcatctagtcttggggagcagccatgagttggggtactccgtggagggcaggtgcagtcacagagccctggagaaggaagtgttttcaggggacagtcagactgcagagaagacccggaaggggagcagaggattgccctgggccctgcggccggcgtttcattgatgagaggagaggcccagaagggcctggtcaggggctgggcctggagccgggagggaagattcgctttaccgatgggcagtgggagagcggtttatgctgaagggagccttactgtagtgacgggcatgatgtagggctggggcagtggaggggcatcgaaaggggctggggccagcaggttgctggagcttcctgtctcctcctgaagtgggcatgaggcgcactggcctgtgagggtccccgcagtcccgctgaggtttgtggtgtaaacttggagccaggttgggcgtcaggcttctgtctgccacgctcaggtgcttcccagcagacacagtcatggggaatggggtttaccagggcgggtttgccaggggagcgcagtggagggagggaggcggagatgtgacgctttgctcagcggagggaaaatcaggctgttgggggctccaggacaggcctttctcaggtctgggttttaaaattggagaaattggagtatcaaccatgtttttctttaggctgtagaaatactggggggtggggttgttgttttgtttattttcctctctgtgttctgctgtgacctttcattgctgatgtagtttgcaggggaacccattgtaactgtattgtttaatggcaggtctgagactcggtttccattcctctgccctcatctgagatggctcagggcaggcctgaaagatgctcctgcttcagtgagcgggttagtggggactctgtggagtgtggggtctggtgtccagcagtgtgtggggttagggggctctgtggactgtggggtctgtggactgtggggtctggtgtccagcagtgagtggggttaggggactctgtggactgtggggtctgtggactgtggggtctggtgtccagcagtgagtggggttaggggactctgtggactgtggggtctggtgtccagcagtgagtggggttagggggtctgtggactgtggggtctggttcccctgagtgcaggtgttcaggaaggatgccagggtcctcttctgcctgtgtgggggcttggcggggggttggcagggggttggtgggggacacacccagagccttcctagttcccagccctgagggctgtcggtgcttccttctcagtgactgagctttctggacccttcagtgaggacccttttcctgttgcctctggaacagcctggggtgggtggagggatgctcccatctgaagatgccctgtggagaccctggtgttctgtgtgtcaacacgctggctgcctcactgttggcctgaattgaaacgtgcctgggggccatgcttctgcatgtgcaggaggccaggagggttagaaatggagttgtctgagcacaggccaagccctcggcattatggctgagccacctgcccggcacctgcagctgccctggagcatggactccccatgtccaacagag

SEQ ID NO: 12503 - DNA, 1073 bp, Artificial sequence
  DNA replication origin
tggggctgggccgggcagcccgacccccacccccaacccctgtggccgtaagtggccctccttgctgccctttccattgacgggtgctgtctccatgtacttattaatcctggtgcaccttttaagcactctttggggcattcgtgcccccgttttgcacaaggagggtgggttcagagacgttaggtcccttgcccaagggtgcacagctggtctgtgtcagattggagcgcaggactgtctgacccgcgtgggtcctccgaggcgcttattactgccgctttcgcctgtcatcatgttctcgatgggccccacggatgccagagtcctgctcatttgggaaacgaccagctgggatgagggttccagagagaggcctcctgcctctcccagcctctgtcccagcagggccttctcctgtctggggcgatcttgctgctggggtcacagcagacctgtccaggctggtgactgggggtctggggaaagagtgggcagaggactctggggaggcgggtggcagcgaggagatggtgccggcgtcagtgggcagagccgtgtctgcagccccacgttcccgcctgaatctattcagtttcttgtggtggctccatgcgtcgggagaggtaattagaacagggcttttcagctatttatgaccatacatttccttttctaaaaaaaggagaagttgtggagtgactcagagttgggtggaggtggctgagctgaggtgggatgggcttgggaagaggccctgcagagaatgtcgcatgtgcagaacagccttggagcccttgcagagtgggcctcggccttgggctggagggggcggagggagggaggcaggctccacagcactggtggcagaggccgggcgggagtgggtggcggaggctgggtgagggaggaagatgggtgaggggctgctgcttcattggagggggcacgcggtactcagcttacttctgggcttctctggaaagtgggggttggtgctggggctctaaggaggggcctctgcatatggagctgcctgcctgcctcacacagccccttcaggctgccactga

SEQ ID NO: 12504 - DNA, 963 bp, Artificial sequence
  DNA replication origin
ctctgaggccagcccctcctctctgatgtgtgcggagcgtgggtcttggcctgccgggggctccttcgtggaatgcagggggtgcacaggtgttgactctgcatgaatggttgtctttccgcctggctgtttccctgcctgacgcccctgtaaacatccattcccaacacgcttcccagaggacgcttgcccttggagtactcctaacaaaagacttcccagtgaaatcagtttctggcaccccatgtggtatagcctgacacggcacctgctgctcagcttgtccatggctctgaggagccctcaggggccccaggcagctggtgggggatggggttggggggtggacagcaaggtgacctggcgggcgcagggcagctggtgggggtggtggggggtggaaagcaaggtgacccagtaggcacagcgcagctggtggggggttgggggaggtaggggacagcgaggtgacccggcaggcgcagggcagctggtgggggggtgggggaggtgggggacagcaaggtgacccggcggatgcagggaaggcccagtcttcatgtgcggtttcaatgtctcgttcctgggcttttctgcattaagtgtgagtttctaacataccacgttgaaacgtcttggatcttgcctgctgagccacgtggctcttcctgaaggacaaggtcagcgcccccctcgccaccacttcatccagatcccaggagccccttctgtcctgtaggccaaggctccacagcaccacgtgggttatggacgagaaacctggagtgtcctgctaggagagaggctgtggaattcccagtccccctcagctttggaggtttataccagagagaccgaggcttagagaggagcccagggaggctcctccagtgcccaggccaggcatcatccagctggcacaggtggctttagcccagcctcggggggacacaagcagggcct

SEQ ID NO: 12505 - DNA, 1222 bp, Artificial sequence
  DNA replication origin
tggactggccagctgaaaagggattgagaaggagaaacccagactcagttcactcactcgatcattaatgtttcattccccaacttcttctttttgggggggcggtggggggaatggagtcttgttctgatgtccaggctggagtgcagtggtgcaatcttggctcactgcaacctctgcctcccgggttcaagcagttctcccctcagcctctgagtagctgggactacaggtgcacaccaccatgcccggtgaattctttgtatttttagtagggatggattttgccacgttggccaggaacttctcacgtcaagtgatctgcccaccttggcttcccgacgtgctgggattacaggcatgaggcaccgcgctcggtcattccccagattcttactgtgcgtctcctgtgagcctggcacatttaggtgctgtggaaaacagcagggagctgcacagcagactcggagctcaagggcccctctctaggtggggctggggcaggtgtcagtcgcgttgaggcggtgatggctgctgtgaagaaagggaggcgctttagggctcgtgtgtcagggagggtgtgggaagccggtgaacaggcgcccttgctgagcccagaaggtcactgcggggagagctgtgtccatctgccgtgctagaccgtggtggggcttggtttgtggtaatgatagctgcacgggtacttgggaaggttgtggggcgaggtgccacgtctccccggcttccccgtggcaatgccgtaggtggtcgtggtgcagtgggaagaccaggggctttggcgttagcacagcctgtgttcctctccgcgatcggccgcttgtgtaggtttctgtggccccacaacagtccccctgggctgcctcttggagccacaccaactccttgtcctggttctagtgttgagtaggacttgtccttcacccctctgtgataatgggcgctgggtgggagcccgtgggagctctgtggtgggccttggttcgaggtgagcaccgccctcgctcacgtgggtatctcctgggtcgctttgcagatgggtcgtggagccagtcttgtacttccttccacgtctttcctggatagccattctgtggtttcttcctctgccccagtgggagcctaaatctggctgtgtgctcctccctcccctgagggtgtgagatctagccctctttccctagagcagagcagagcagagcag

SEQ ID NO: 12506 - DNA, 2664 bp, Artificial sequence
  DNA replication origin
gcgcggtgcctcatgcctgtaatcccagcacgtcgggaagccaaggtgggcagatcacttgacgtgagaagttcctggccaacgtggcaaaatccatccctactaaaaatacaaagaattcaccgggcatggtggtgtgcacctgtagtcccagctactcagaggctgaggggagaactgcttgaacccgggaggcagaggttgcagtgagccaagattgcaccactgcactccagcctggacatcagaacaagactccattccccccaccgcccccccaaaaagaagaagttggggaatgaaacattaatgatcgagtgagtgaactgagtctgggtttctccttctcaatcccttttcagctggccagtccacctgtattatatgctttgtatgcgttaaatcctgctggaaggccagactttctaaatccacagagaatatcagaaaatgttttgaactcaacagtaacaaaaacaacccgcatcaaaatttatggggtaggccttcgtgacaaagactcttagaaaagcacaagttggagaggatttcattaattcagtaaagagtatcacacagaacatctagcacacaccacgcttactgatggattaccaaagcgcccgtcacagcctgaaggagacaaggtgcctactgtcatcattcctccatgacactgcacctggaggaaaggggcatggagagaagcagggccggagagggagtgtggccagaggagaggagaggcgcggggctggagagggagtgtggccagaggagaggagaggagaggcgcggggctggagagggagtgtggccagaggagaggagaggcgcggggctggagagggagtgtggccagaggagaggagaggcgcggggctggagagggagtgtggctagaggagagaagcagggctggagagggagtgtggccagaggagaggagaggcgcggggctggagagggagtgtggccagaggagaggagaggcgcggggctggagagggagtgtggccagaggagaggagaggcgcggggctggagagggagtgtggccagaggagaggagaggcgcggggctggagagggagtgtggccagaggagaggagaggcgcggggctggagagggagtgtggccagaggagaggagaggggcggggctggagagggagtgtggccagaggagaggagaggcgcgaggctggagagggagtgtggccagaggagagaagcagggctggagagggagtgtggccagaggagaggagaggcgcagggctggagagggagtgtggccagaggagagaagcagggctggagagggagtgtggccagaggagaggagaggcgcggggctagagtgggagtgtggccaggggagaggcgcagggctggagagggagtgtggccagaggagaggagaggcttgaggctggagagggagtgtggccaggggagaggagaggcgcagggctggagagggagtgtggctagaggagagaagcagggctggagagggagtgtggccagagaagaggagaggcgcggggctggagtgggagtgtggccagaggagagaagcagggctggagagggagtgtggccagaggagaggagaggcgcggggctagagtgggagtgtggccaggggagaggcgcagggctggagagggagtgtggccagaggagaggagaggcgcggggctagagtgggagtgtggccaggggagaggcgcagggctggagagggagtgtggccagaggagagaagcagggctggagagggagtgtggccagaggagagaagcagggctggagagggagtgtggccaggagagaagcagggctggagagggagtgtggccagacgagagaagcagggctggagagggagtgtggccagaggagaagagaggcgtggggctggagagggagtgtggccagaggagagaagcagggctggagagggagtgtggccaggagagaagcagggctggagagggagtgtggccaggagagaagcagggctggagagggagtgtggccagaagagagaagcagggctggagtgggagtgtggccagaggagaggagaggcatggggctggagagggagtgtggccagaagagagaagcagggctggagagggaatgtggccagaggagaggcacggggttggagaggcagcgtggccagaggagagaagaggcgtggggctggagagggattgtggccagaggagaggaaaggtgcggggctggaaagggagcatggccaggggagaggagaggcaaggggctggcggggaagcatggccaggggaggggagaggagaggcacggggctggtggggaagcgtggccaggggagaggagaggcgcggggctggagagggagcatggccaggggacaggagaggtgtggggctggcagggaagcgtagccaggggagaagagaggcatggggttggtggggaagcatggccagcatctctcagagagtatgagtgtgcacgtcaaacaccagcatcagagcaaggttgtcatgtgcagggtcaatgtgcaggacccaatggtacatccacaggccaggaacacatacatagaagatcaaagtccaagaagacaacatgaaaactgcgtcgaatgttcaaatacg

SEQ ID NO: 12507 - DNA, 1006 bp, Artificial sequence
  DNA replication origin
tgcggggctggaaagggagcatggccaggggagaggagaggcaaggggctggcggggaagcatggccaggggaggggagaggagaggcacggggctggtggggaagcgtggccaggggagaggagaggcgcggggctggagagggagcatggccaggggacaggagaggtgtggggctggcagggaagcgtagccaggggagaagagaggcatggggttggtggggaagcatggccagcatctctcagagagtatgagtgtgcacgtcaaacaccagcatcagagcaaggttgtcatgtgcagggtcaatgtgcaggacccaatggtacatccacaggccaggaacacatacatagaagatcaaagtccaagaagacaacatgaaaactgcgtcgaatgttcaaatacgcagggcagaaagtctaatgacatgtaagaatctaccctaaaatccatcaaacttgctgagagaaattaaaggccatcaaggtaaatggtggaacatgtggcattcatggttcacaagatacgccgatgccgagatacaccgatgccgaggtatcaagatacgctgatgccaagatacgctgatgccgagatacgccgaagccaagatgccgagatgtcgagatacgcagatgccaagatacgccgaagccgagatacgccgatgccgagatacaccgatgccaagatacgcagatgccaagttacgccgatgccgagatacgccgatgccgagatacgccgatgccgagatacgccgatgccgagatacgccgatcccgagatacgccgatcccgagatacgccgatgctgagatacgccaatgccaagatgtcgagatatgctgatgccaagatacaccgatgccgagatgtcaagatacgctgatgctgagatacactgatgctgagatacgccgatgctgagataacgccgatgccgagataacgctgatgtcgagatatgccaatatcgagataatgccgagaccgagataac

SEQ ID NO: 12508 - DNA, 910 bp, Artificial sequence
  DNA replication origin
ggtgttcccgggagcttgttctccgttctttattcctcggtctctgcttttccttcttacataagttcttgtgctttgacatctcttcttgtcacttcagtgtggccagacttcagagtctctatctttggctccaacctctctcctaatctccatgatcagattttcctctgtccctggaagctgctaccttgctgttattgctcctgaccttggggccatgtcaggcgtgccctgctgtctccccaggggtcccgtgatctctgttggccactcgcatgaaggcccagcctccccaccctgacggcaggtgtgtctcccgctttcccaccagctaggccaggcggccttcccctctctaacctgtgctccggcttttctccctcgcacttagctcctgccccctccgccgggcctgggccgttgtgctccgccgaccacgggggctggaacagtgacggcggacccctgtgtggaggacagagcccggaagagagaagtcctggggcctgctggctggtcgagggagtgaaggggtgcatgatggtgtcctgggctgcagtgatgcagggagcgccccccgcctcctgtgtggggtgggttccggcccgatgcggggatttttggcagtccctgagacccacagtccctccacaggctggtgtcctccagctgagatgtgtcctgaggtttcccgggtcgcacgatggcgttctggaaattggagaagtgttggtggagtgggactgatacgtggatgctgtgattttcgttcctttacgcgtcagtttgagggaactcgatggactttcgctagaacctatgatccagatgaggaaggggcaaggagcccagtgtggcaaccctggccccaagtgactcctctgcccacaggccgctttccaccacc

SEQ ID NO: 12509 - DNA, 1104 bp, Artificial sequence
  DNA replication origin
acagcatccacgtatcagtcccactccaccaacacttctccaatttccagaacgccatcgtgcgacccgggaaacctcaggacacatctcagctggaggacaccagcctgtggagggactgtgggtctcagggactgccaaaaatccccgcatcgggccggaacccaccccacacaggaggcggggggcgctccctgcatcactgcagcccaggacaccatcatgcaccccttcactccctcgaccagccagcaggccccaggacttctctcttccgggctctgtcctccacacaggggtccgccgtcactgttccagcccccgtggtcggcggagcacaacggcccaggcccggcggagggggcaggagctaagtgcgagggagaaaagccggagcacaggttagagaggggaaggccgcctggcctagctggtgggaaagcgggagacacacctgccgtcagggtggggaggctgggccttcatgcgagtggccaacagagatcacgggacccctggggagacagcagggcacgcctgacatggccccaaggtcaggagcaataacagcaaggtagcagcttccagggacagaggaaaatctgatcatggagattaggagagaggttggagccaaagatagagactctgaagtctggccacactgaagtgacaagaagagatgtcaaagcacaagaacttatgtaagaaggaaaagcagagaccgaggaataaagaacggagaacaagctcccgggaacacctgcgcaggagatgccagagaaagggaagggaggcaggagggggaggggacggggaccaggaggccatgtgtgagtgtgagggggctgtgcacatcccacaacagctgcacgggaaaccagaaaagccagggaaggagggagggaagggaaggagagcggggaccatggggccgtgtgtgagacagagtgcaggagggagaagggagagagcgggagagacaggagggaaggagccaggcctggggagctcagcaagggagatgggagagacagaaggagagaccagagggaaggagccgggcctgggagctcagcggagctgctgtcggagccgtgactt

SEQ ID NO: 12510 - DNA, 748 bp, Artificial sequence
  DNA replication origin
cggctgtgctgtctctgtcgtgctccttggcactgactgactgacctgtctggagcctccaattaaaggtcactggcagcacttcccctaattaccatgccataaggacttggcaggttttgtggctgtggtgtgagcgagggcgtgcctgtgcttcagtgatgcgttacccagtgctgagttgttgagctgcaccttcctttggatgggatgcattttggggaggaggacggagaatctgagcttcttccctaccaggcatcttgtcctcactgggcctgtggggagggaggggctcatccttaggagctcagttgcttgtctttaggagctccttggggctgctggccaggagggagggaggtgacgggtcttgccgtcctcccccgcagcgtggagtcctcccgggcagggtgggattcctgggggtaggtggagctgcgcacggaggtgatgggtctcaccatcctccaggccttcatacatgcctgatgggcctgtgaagttggcgggagtgggcagtcggcgccctcgtacgcacctggtggtcctgtgaagctgcatctgccgtgagcgtccagtgggtcttcagaggttaggcggtcactggatgacccagcaacttcccttctaagtgcgcacccaagagaattgataacatgtttgcacgaacactcgtgtcatcgttcatagcagcattgctcatagtagccaagagatggggccaacccaaatgcccctcagctgt

SEQ ID NO: 12511 - DNA, 1305 bp, Artificial sequence
  DNA replication origin
gcggggcaggcaggcccaggccttcactgagtgcaggagcgcaggtatgactgtgtgtgcagggcccgtcggggcagccatggcttgggctgcgacccggccctcagcgtggccggatggacggcctccctctggacacaccatgtgggctgagagctgaagcgtggtcggagctgcccctttgtagggtgcaggggcaggggagagagcccgttccaggcagaggcagcagcaagcgcaggggccctgaggtgggagaggacgcgcgtctccagcaggcaggcagcgtggccaggcctgacccagcgctgacccaggtgttggcagcatcacggaggctgcctcctctgagttgtggagctgatgtcctgagaggggacagtgccacctctgccgaacctgttttctccgtgtgccttatacacctgaggagaggcccgctttaggagtgggtaggagaagacgccatctctgggcattgtctctggagtgacaaggatgcgtctcatgctgaggatggcgtggagagtggtcctgagagtgctggtgacggtggagacggtgacggccatgatggtgcgagggtggcggtgaccgtggtgtcactgatggtgacagtggtgatggtggggacgtggtgagagtgctggtgacggtggtgatggtgtggagagtggtcctgagagtgctggtgacagtggagatagtgacagtggcgatgatggtgcgagggtggtggagaccgtggtgtcaccgatggtgacagtggtgatggggatgtggtgagagtgatggtgacagttgtgatggtgacggtggtggtgatggtgacgtgagaatggtggtgatggtggttattggtgacagtggtgagtggtgacagtagcagtggtggtgagtggtgacagtagcagtggtggtgagggtgacagtggtgatggtgacatggtgagagtgctagtgatggtggtggtgatggtgacggtggtgatagtgacggtggtgatggtggcggtggtgatggtgatggtgacggcggtgatggtgacggtggtgatggtgacagtggcggtggtggtggtgatagtgatggtggtgatggtgacagtggcggtggtggtggtggcggtggcgacggtggcggtggtgacggtgacggtggtgatggtggttgtggtgacagtggcagtgttggtgatgatggtgggtgcagtggcaggacttggcatctgttgagagtctgccctgtgactggtgccaggacctagcctgcgttttcaccttatcctgtgctctcagcctctt

SEQ ID NO: 12512 - DNA, 1162 bp, Artificial sequence
  DNA replication origin
gcctgggtctggtgggctggagaggagggaggcggtctcctaggagggatttgtgcccctggcctgccttctccccccacccctgggagagtggagctcacgtgtcctccttggtgttaggcagggttggagagggagcctcggagagcctgctggcttggcacaggtttccaggagcgcatgtgggaagggcagggtggggccgggcctgggaaagggggagagtgagtgaccatggccgtctccagggatgggcatgtatatccgatagagaaggaagggcagggtggggccgggcctgggaagtggggagtgtgagtgaccatggccgtctccagggatggacatgtggatccgatagagaagcggcctgccgtgctcgcacctttcacgcaaggcaccgacgcagtggaggggtgctgccgatgtgccagcactaagggcccaattcctagcctaggcgtaatggggcaagggccctgtgctgggggtgggaggcgggactgtgtgctgggcagggtggaggggcggggctgtgtgatggctggcgctgtgtgtgatagataggtctggggggtggggcttcgtgctgggcagaatggaggggcggggccatgtgtggggcaggggcggggccatatgtggggcaggggcaggggcagggctgaggtgttggtgccctttggttgtggggccgcagctggatagggctctgggactgtgctccagaaggtgttgctaggtggcatctgtgacgatgggggcctttcctgctgccctaccctggagctggggagcggggtgggtgaggagcgttgaggaggagagagctggagctggtggtactggggttttggctgggcgtctcacgtgcctggactttctggtctcatctggaaggtggtctcttactggaccgtgcgggggtgaggagacaggccgaggccaccaggtaaagcagggctgtggtgagagaggccccattttccctcagaaccttcacagtgcgtggctggccttggcaaggctgcatggctggtcccagggcttcctggcctcgttacttcctggcttcagggcagtgtaggagcagccacaaagcagacatttgggttgtcctttatgaatgcctcgggtgatgatccacgctccctgccttgcc

SEQ ID NO: 12513 - DNA, 710 bp, Artificial sequence
  DNA replication origin
ctgccaccggatgctccggcagcgagacctcaccaactctgactgtcccgccccacacactcctggcttaccgcctgcagggaaggtgcttgcgactcctctgtgttgctagggatgttggccctgcctccttccacgcctcccggtgcgctgccatcctcaggccctccggctgtcccaggcagccaggtgctgagtgatgctgtatgtgggtgcccttcctgtccttgggagccaggctgtggggccgggccctgtgagaacacacggcgtcaggagcctcctggctctttcacactagactacgctcctctaggggactgggccagctgcgttctggacccccgggcccctgcccaggtctgcactcagctgtctctcagccagggccaggagggtctccatcacgagtcctcctgggggctgaagggtgactggctcccagctgagagagccggctgcagcatggactcatgacagctggggaggggcagccctgcagaagggactgaatggtgactttcctctctcaggtttcgtggaggccctacagcccatgcgggacaacacgttccagtgcagctgcaggcgtcttttgcgggatgggccgagagtgtgacgggctatgctagcctgggtctggtgggctggagaggagggaggcggtctcctaggagggatttgtgcccctggcctgccttctcccccca

SEQ ID NO: 12514 - DNA, 755 bp, Artificial sequence
  DNA replication origin
gttttaaaacaggtgttttccgagcacctggatgggtttcatgtccccactgagcatcctgttggtggggggtgggggggtgccggtgtctcctgtcccctgcctggactcttctgtggagagctatggtgtcacagcccgggacacagtccagcgacatgtgccaggcaccatccccatgggtgcccttgcaggtctgggtggcagctgagaaaccattttcacccatcactgtgtccaagcatttaccatctccgaccctcaaataccctctaatgttttgaaacataggaagtgcgttgaaattattgaaagcactgtgaaggaaatgctttgggtgttgtggaatgacagggtgggaaagacgtcactgggggccaggcagggccttaccaggaggcagcatctgagcagaggcctgagggcagccgggggctgggcaggggtgaccaagcgggacagacgagctgctgggacgccagcagggctggcacagtgcggggatcacagcatgattgcagcgggcagctgttgaagactggaagcgcggcagtggcatggttacctcacacagtcggaagagcgacctggagaaagaggccttcgggatggggagcaggaagtgtgtcggtgcgtgaggatgcaggggtccagcgaagaggctgtgggtagttcagggggaggtggtggggtggcaaagaccaccctgcagtgaccacataatcctcgagggccagccccctctgccccagggc

SEQ ID NO: 12515 - DNA, 1010 bp, Artificial sequence
  DNA replication origin
ccagaggcaggacacagagctcagggctgtggccctgggggcatggctgggggagtcaccttcactgctgagggtggggggcatctcagtgtgcgtcctggggcccgcagcgctcccgccttggcaagccctggactgcagcctgtgagctcagagggagggtggtcccgtgagctagggtggggtgggggtgcggggagggtgctcccatgggttggctgagagtacattgctggctcagggggtcgggccgtgtgatccccgtggcagccagggcttaggctgtggacatggtgtggggtgcttcctgggggttgggccctcctcacagtcctcgccctgtctgggtgggctggccacacaggagggtgaggctgaggcagcctcgcctgctcttcctcctcgcctctggcctcggtaccggggcgtctgctgaggaggaagaccgcttgtcctgctgggaccttgggcctctccgatgcatgttgactccagctgagaggtgttctccttgcctgtcctgcttttcatctggaaaatcaggtccaggactcttgctttgcaagatgagtggagaattgaagatttcagaagttcccaacatcaagcaggtgctcagggaatggcggcattgtttgcaggagtggggtctgtggtctctgtcactgggtcctgctcacttgacccccgagcctttctttcctcatttgtattagggtcagttccaccctcaatgggtttctttgaagggtatgtgcagcctgcctgggggaaggcagcggagtgctggccttcctctcagtgcttgcttggcccctgggcctggggttctcagagtgaggtgctgcaggcgatggcggtgtggccttgagagcgggggaggccccatctgctgcttcccctccggctgacttctcctaacaagccggaagtgtgcgtctggcattcatgcccccaatccccacctcttgatgtggttccttccgttttgtcagtaggatctgttttca

SEQ ID NO: 12516 - DNA, 1219 bp, Artificial sequence
  DNA replication origin
ctgccgtgtgcagaaaagtcaaaacctgcatggctgtgttgattcatttttgcacaaaagaagtctggccaggcgcagtggctcatgcctgtaatcccagcactttgggaggcagaggtgggtagatcacttgagcccaggaatttcagaccagcctaggcaacatggtaaaaccccgtctctgcaaaaaaaatacaaaaaattagccaggcctggtggggagtgcctatagtcccagctactcaggatgctgaggcgggaggatctcttgagcctgggaggcagaggctacagtgagctatgatcgcgcacggcactccagcctgggtgacagacagaatgataccctgtctcaaaaaaaaaaaaaaaatctaaaagataaacaagaaaataacaatggcctcctgctggagaacaagaacatggcaggaggcttgccactggatcctatttttttttttttttttttttgagacagagtctcactctgtggcccaggctggagtgcagtggcgcaatcttggctcactgaaagctccgcctcctgggttcacaccattctcctgcctcagactcccgaggggctgggactacaggcgcccaccaccatgcccagctaatttttctgtacttttagtaaagacggggtttcactgtgttagccaggatggtctcgatctcctgaccttgtgatctgcccgcttcggcctcccaaagtgctgggattacaggcgtgagccaccgcccccggcctatttttttttcttttttgagacagaggctcgctctgtcgcccaggctggagtgcagtgacatgacctcagctcactggaatctccgctctcctgcctcagcctccagagtagctgggattacaggtacccactaccatgccgggctagccactggatactttttgaatgttttcaatattctgtaccaagaaaatacaatagctgttcaataagtaattttcaaagcctagtattgcaaccttatattgcagaatcaggtactacataaaaattttataaaaagaaaaataattcccacaacaaattaatgcagagaaaatctaattataaacatttgtaacaaaacaattctatcattcctaactgacgctcagctatgcataacaatgcaaataactggcactataaatggggcagcaatatatcactgcaaggtttcctacccagaatcatcaagacgataa

SEQ ID NO: 12517 - DNA, 885 bp, Artificial sequence
  DNA replication origin
tttcttttccccacatttcccccttttctattcgacaaaaccgccatcctcatcatggcccgttctcaatgagctgttggatacacctcccagacggggtggtggccgggcagaggggctcctcacttcccagacggggcggccgggtggatgggcaggggccgccccccacctcccggatgggcgggggccgccccccacctcccggacggggtggctggccgggtgggggctgccccccacctcccggacgggctggctggcgggcgggggctgccccccacctcccggacagggcggctgctgggcagaggggctcctcacttcccagacagggcggccggtcagagatgctcctcacctcccagacggggtggcggtggggcagaggcactcctcagttcccagatggggtcgcggccaggcagaggcgctcttcacatcccagacggggcggcggggcagaggcgctccccacatcccagacgatgggcggccgggcagagacgctcctcacttcctagacgggatgtcggccgggaagaggcgctcctcacttcccagactgggcggtcgggcagaggggctcctcacatcccacacgatgggcggccggtcagagacgctcctcacttcctagatggggtggcggctgggcagaggctgcaatctcggcactttgggaggccaagtcaggcggctgggaggtgaaggttgtagcgagccgagatcacgccactgcactccaggctgggcaacactgagcactgagtgagtgagactccgtctgcaatcccggcaccgcgggaggccgaggctggcagatcactcgcggtcaggagctgagaccagcctggccagcacagcgaaaccccgtctccacca

SEQ ID NO: 12518 - DNA, 815 bp, Artificial sequence
  DNA replication origin
cgcctcttcccggccgacatcccgtctaggaagtgaggagcgtctctgcccggccgcccatcgtctgggatgtggggagcgcctctgccccgccgccccgtctgggatgtgaagagcgcctctgcctggccgcgaccccatctgggaactgaggagtgcctctgccccaccgccaccccgtctgggaggtgaggagcatctctgaccggccgccctgtctgggaagtgaggagcccctctgcccagcagccgccctgtccgggaggtggggggcagcccccgcccgccagccagcccgtccgggaggtggggggcagcccccacccggccagccaccccgtccgggaggtggggggcggcccccgcccatccgggaggtggggggcggcccctgcccatccacccggccgccccgtctgggaagtgaggagcccctctgcccggccaccaccccgtctgggaggtgtatccaacagctcattgagaacgggccatgatgaggatggcggttttgtcgaatagaaaagggggaaatgtggggaaaagaaagagagatcagattgttactgtgtctgtgtagaaagaagtagacatgggagactccattttgttctgtactaagaaaaattcttctgccttgggatgctgttaatctataaccttacccccaaccctgtgctctctgaaacatgtgctgtgtccactcagggttaaatggattaagggcggtgcaggatgtgctttgttaaacagatgcttgaaggcagcatgctggttaagagtcatcaccactccctaatctcaagtacccaggg

SEQ ID NO: 12519 - DNA, 961 bp, Artificial sequence
  DNA replication origin
taggactgggttataaggtccctagcgatggcggtctctgcagccgttgtgctcagaggcctggctgagggctccaatttccccgtagccttccctgtcgtggatggtggtcttttctggaaatagctgttgttttgtcaggaggcttaaggaggcacgtctggatttgcatatctttgactgtctgcaaggtctacaggcatctgatggcgtcggataattgcctctgaactggagcctgtgtgaactgcagtcctggtgaaggttgcttgcattttagaaacagcccagacatgggcactggtggaaattggaatcttctgacctctcctgtcctttgtctgtggcgatcaagatcgctggtgccaagaggaaacatgaaaatctgctggtgtgggggtggaggcgtggtaggggtggggtgggcgtgcagcgggggtcctggaggggtccagaaactggccgcgggtccttcctgtggccgtgctggggaggcgtgttcaggctgttcccctatctgcttctggagggaacgttggcaggagaggaggcgtgattggctcccgagaagctgctcttgccttgcccatgctctgggttccagttcccatgtgctgggctgtactggagttgggccgggggctgtccccgctgcctgcgggcacctgtggttccatgggggagggtgagtcgtgccgagcacttcatgaggggcagaggagcaggagactgcaggagccgcagggcggtgcccggtggggtggggcatagtgaggggaagatggtggcgctgcaggtgctgctgctttggcctgtcatgtctaagccgaggtggccgctcctcagggaagccctccctgcgcactaggccttgactgccttctcctgtcacagggtcctgattgtcacgctccttactctggaattatcttatgcgcctcttccttgccaactgtccggc

SEQ ID NO: 12520 - DNA, 1037 bp, Artificial sequence
  DNA replication origin
gagtggggagaggaggggagagcacagagaggagagcgcgcccatgggagacggggcgggcgcggggtcctgaggcacggggtctgggtcgttgtgccccaccctggcgagcacacccggtccgggccctcggcccctcccttgccattcccgggacccccgggaccccgggaccccgccgcccgcgcgagccgggccgcttacctcagccgctcgcagccagcttgccgccgccgctcggatctccctccgctccgccggcgcccatttatcgcgacacttgcgcctgcgctctcgcgagacctgcgtggcaatcgggccgtaaagaaccgagtctgcgcaccggctgatcctggggactccgcgtccgcacccggagccgccacccctgggagactccgcacggaaaggactcggaaccgaaggctgagccaaggcgcagtcgggggccccccggctttgcgcaggacgcgcttccactaaggctttcgcctcgcgccgtaatgtgtggaatagccgcgcccacggcagcctcctcggacaaacttgcaccgttgactcttcccaaaattttgctactcagtatcagcttgaatcaatccgttattttgcttttttctgggcccactagaaatgcaatttatgctactaggctaccttcccagtgctctgcaagccagggcacagcatccaatggggtgaggtcaggccccaccattattatggtaacctttgtctatccttcaaattggagccttcctgagaagagtgtgccttactcgtttccatattctcttcctctcctcctcccgtctctgcccagcccctggcttccctctaagaagatgctgttcctaagggtctgcaatgaattttccttctttcagagaaagacttccaagttgtgtgccccgggaatgaaatggaataagagaacgaggtggagtagggcaagagtccctggacttaacaacctgactgcaaccagaaataaaatgaaaagtcaaaacatctggcggccgggcgcggtggctcac

SEQ ID NO: 12521 - DNA, 1567 bp, Artificial sequence
  DNA replication origin
tggagctacccggcccagaagcgaaatcccgccccgggctcgcccccggcgccttggatctgggccccggcgctgcgccccccacctggactccgccgccggccccggcctccccacggccccgccggccctgcccctggagacctgagggcgccctcctcccggggaactgcgacccggaatcctggcctcgcccctgtcgcgctcgctgagtgcggggacggtgcccagcgctcggcacccagccccgaggccaggaccgaggaaggcgaccgggcggacccccaaccactcccgctgtctgcacgcgcagcagcagcgcccagctcaccccgccattggtgttccccgcgcctgcagcgcgccgccggaagtgcctggcctcacttccggtcagaggccacgcccccggaagcggcggtgcaggtacgaaaagcgcgcgcggggattccaggagtcgtggtgaccagggaggggagccgggccagcgggcggcaggagactaggggagctgagccatgggcttgggggagagcggggccgggagctcgaaggagaccagaagagcagggtcgggggctcgagggagacgaggagagcggggccgggggtttgggagagagacaaggagagcggggcggaggcttgggggagaccaggagtaaatcacaaaaatttactttggaaaccgtggcttctggcagaaacagatcagtgtcgggacaaagtacacgggcctggtgtgaaactaagccacaaacccatttaccctgtctgacctgcctccgccaccaggacccagtctcagtgaaatgggaaaggttcccttgtcctcctcgaagggcgtgcgatgaggatgtggctcacttcttcagtgccccgcttctcaagcctctaggggaacatacagacaggcaggctgaggggctcccaccccacggcagtgtctaggggtgaatgtttgcagctcctgaagccccagcaggcatgtgttagagggtgctctttcagtttagccttgtaggtggcttgtgttagtcagctgttagactccctgccttatcgcaaggacagagggctttctgtatccctaggtttcttgccttgatgtactggagcaatcagatcacacggcggcttggagagtgagtgcaaggttttatgagtggaattagccctcagcagatgggggagccagaaggcagttggagtgggaaggtgattttcccctggagtcgggctgctgagcagcctgggctctcctctgaccgcccctgccaaactcatggttccatcagttgatggcctgctggtgcctgttggtgtgctttccacgtcctcttgacgtccagcggcttgtgtctctgcccactataaaaaaccactggggtttttttataggcacaggacggggacgtggcgggctcgggaaatgcaacatttgggcaaaaaaacagaaatgcctgtcctcacccaggtccctgggcacaggcctgggtgtggagccctggccagagaccacgccctcctctacccagcacttccctgcccccttccttatcatctg

SEQ ID NO: 12522 - DNA, 867 bp, Artificial sequence
  DNA replication origin
gggtcaggagggcagggtgaagggggggctggagggcagcggtgacgagggcagcctgtctcccacgtgtggtggctgcttcctgtgtgccctggggttggctctgtggaggggtgggcactggctttggaacacctccctccccttcctcctctgccacccagtgccttctaaagggcagcagaaagaggcctgctaggcaggggtggcggaggccaccttccttctcacaaatacttcttggccctggccctgtgctgcccgggcaggtccccaggctcaggggctgagaggctgcttactgctgcaggtggaggccccatgccggagggagagcggggttccccccatgcctctccagccctcctgctgcccacggcccaagcccaagcttgtgccggtcattacggccttgcctagctggcagggacagctgcgtgtgatgctggtggagatgccagatgccgcctgccctgtgaggacggctggcggggccgtgggaggggggttgtgggctggcggggctgtgggaagggggctgccgatcatggtgaaaggggacattttcattgggtcctcgtggtccgtgtcctgggtactcggggtcaccgtgcagacagctgccctttgtctgccggacacagtgcaggcaggggagacaggtttagggctctgacatggggcacagggactccgagccaagggatgtcagggcagctctgtgcatctgaggcctttgcccttgctttgcgggtcagttcatgtccaaagcactttaggaggctgcagggatcaatacccaatatacccaacaactggaattgtttacacatgacctacattttggacggtttatcaataaacatg

SEQ ID NO: 12523 - DNA, 1335 bp, Artificial sequence
  DNA replication origin
gctcacggccgtgggatggagaggggactcctgtgtgtgccccgcaggcaggtgatccatcgtccactgcgagccggccagagggaacggccgtgccttctggccccgtgggctgtgctgactcggtggctgtggggctcgggcccagcctgccctgccctgtgggttctgctgctgccttcctgctgtgaggtgggctgcttccttctggccagatgagcagagggcagcgttccctttggagcccgatgggtgggctgtcccgtgagtccctagtccacccgagtcttgggctgcgctgccttctgacgcccctctgcagagacaggttctcagttgccatgaatggcaccatgacacccgagccatgaagcgtgaccccgtgtgggcagaaggctgcaaggcctctccgtccaccccgcaccttcctggggcctgtccagctgcaggaccatagaggctgtggggagtcgtggagggcatcaggtgctggggcctctgtgtctccagagtaggcaaggcacgcgctcctgacagcccccaaggattgagcaagacttcagaatgagcttttctgaaggagctttcctggcagggactccggggtcagtgagtgtatgagaggccacatacctggcggcatctccctgtgttggaaacttcaagagcagggtctcagggtcctcatgtccagaggctgaggatggaggtggaaggctggagggcaggggtgaggagggagcaggagggcaggagttgggggagcaggagggcaggggtcaggagaacaggagaacaggggtaagggagggcaggggtgagggggagcagaagagggatgagggggagcaggagggcaggcgttgggacaggagggcaggggtgagagagcaagggggcaggggtgagagagcaggagagcaggggtgaggagagcaggagagtaggggtgatggggaataggagggcaggggtgaggagggagcaggagaacgggtaagggagggcaggggtgagggggagcaggagggcaggggtgaggagagagcaagagggcaggggtgaggagagcaagagggcaggggtgggaaggcaggagggaggtgggggggcaggaaggcaggggtgggagggtcaggagggcagggtgaagggggggctggagggcagcggtgacgagggcagcctgtctcccacgtgtggtggctgcttcctgtgtgccctggggttggctctgtggaggggtgggcactggctttggaacacctccctccccttcctcctctgccacccagtgccttctaaagggcagcagaaagaggcctgctaggcagg

SEQ ID NO: 12524 - DNA, 963 bp, Artificial sequence
  DNA replication origin
gtcctcactagcgcctgaggctgaggtggtgctccctgcggccgcactaaaacctctttccaaacggtgtgtcccggtgtaattccctttggacggcagctcccctccccgccacgccccgtgctgcagctggagcagaggagctcacgcctgcgggtcgggaggcgcatccgtggaccatgggggcagctgggccacactgtccttcgccctgtggcctgctagcctggtcgagagaggtggtggggttctctggaatggtttcctcctgacacccagagctgtgcggggaggcagggatctctcatctcacagagattgtgcctgggggagcgtggaggcagggcctccaggtgctggaacagtcgggaggggcagcatcatggtgctcggtcagccgaggagagagggcagggctgccctgcagcccaggcatgggactgaccacggacagcgaggggacagccagtggtgctgaggctgggagggagggccattgggcgtggggcacgcacggtgaattttctagggaaattgctgcagtcaacacctggagccctggtctgggagtggcctgtggggtccagtggcctcatgccctgtgcccatatgatgaccccatgtgtgcctgtgtccacaccatgaccctgtgtgtgcccaggcctggaagacaaaggcgtgacggagagctggggctctgagagtgggcgctacagcagctgtgttctcgtcccctggactcccttgatttctggtggccagtgttggggtctgcaccgtgtggcactgaggctggatgggctggcagaggacaggtgggggcgtgggggggcgtgttccattccagctgaggctttagaggagggacagcccccttttaagtggatttccttctctgaggcacctagagccctcctcccagcctcccgtcacgcacttgccggcccagccacctgctcacag

SEQ ID NO: 12525 - DNA, 714 bp, Artificial sequence
  DNA replication origin
agtttgcctcctggagggatttgagaagtcggaggtaaagcccgcagagctcccgcaccctgcggctgagagaaggtttctagcgcttcggagcgccgcaggtggctgttcttccagagagccctggccggcttcctccagagcagatggcggttccttcagcctgggagaagaaacgctcccaaggtcctgggacaggcctccgttgatttctggtggccagctcactgcagcaccgctgggattacaggcgagcaccttgtgcccggctgaaattaagtttattaagtagctgcaagtagctttcaagccatggtctgtggtgtgtgtggaatggcaccgagtgtctggggtggtcacgagattccacactgtccccgggaggtgcttggtgccgtgggtgccgtccagcactttgggaatggcaggctggaggcggccgtggtggggctggagaggcggtagacagccgccgtgttaggagcatcactgtgagatggccagggtctcagggaccaggttggacttggacatgtgagtggccgggtgtgtcctcagtgaaggaatgggaccaacaggcgcccggagcatgatgccataaccccagtcctaccaggttttttattgtggtggtgaggaatttccagccctgtgatgctgtgtgcgctgtggtccagtgactcagcctcccctgcaggcccccagggtgcgccc

SEQ ID NO: 12526 - DNA, 1154 bp, Artificial sequence
  DNA replication origin
accccccacctccctcccggatggggcggctggccgggcggggggctgaccccccccacctccctcccggatggggtggctgccgggcggagacgctcctcacttcccagatggggtggctgccgggcggagaggctcctcacttctcagacagggcagctgccgggcggaggggctcctcacttctcagacggggtggttgccaggcagagggtctcctcacttctcagacggggcggccgggcagagacgctcctcacctcccagacggggtctcgccgggcagaggcgctcctcacatcccagatggggcggctggccgggcggagggctgacgccccccacctccctcccggatggggcggctggccaggcggggggctgacccccccacctccctcccggacggggcggctggccaggtggtggggctgacccccccatctccctcccggacggggtggctggccgggcagagacgctcctcacctcccagacggggtctcggccgggcagaggcgctcctcacatcccagatggggcggcggggcagaggcgctccccacatctcagactatgggcggccgggcagagacgctcctcacttcctagatgtgatggcggctgggaagaggcgctcctcacttcctagatgggatggcggccgggcggagacgctcctcactttccagactgggcagccaggcagaggggctcctcacatcccagacgatgggcggccaggcagagacactcctcacttcccagacggggtggcggccgggcagaggctgcagtctcggcactttgggaggccaaggcaggcggctgggaggtgtaggttgtagtgagccgagatcacgtcactgcactccagcctgggcaccattgagcactgagtgaacgagactccgtctgcaatcccggcacctcgggaggccgaggttggcggatcactcgcggttaggggctggagaccggcccggccaacacagcgaaaccccgtctccaccaaaaccagtcaggcgtggcggcgcgtgcctgcaatcgcaggcattcggcagactgaggcaggagaatcaggcagggaggttgcagtgagccgagatggcagcagtacagtccagcttcggctccgcatgagagggagactg

SEQ ID NO: 12527 - DNA, 1362 bp, Artificial sequence
  DNA replication origin
ggtcagccccccgcctggccagccgccctgtccgggagggaggtgggggggtcagccctccgcccagccagccgccccgtctgggaggtgaggggcgcctctgcccggccgcccctactgggaagtgaggagcccctctgcccagccagccgccccgtccgggagggaggtggggggggtcagccccccagcccggccagccgccccgtccgggaggtgaggggcgcctctgcccggccgcccctactgggaagtgaggaggccctctgcccggccagccgccccgtccgggagggaggtgggggggtcagccccccgcccggccagccgccccgtccgggagggaggtgggggggggtcagcccccctgcctggccagccgccccgtccgggaggtgaggggcgcctctgcccggccacccctactgggaagtgaggagcccctctgcccggccaccaccccgtctgggaggtgtgcccaacagctcattgagaacgggccaggatgacaatggcggctttgtggaatagaaaggcgggaaaggtggggaaaagattgagaaatcggatggttgccgtgtctgtgtagaaagaagtagacatgggagacttttcattttgttctgtactaagaaaaattcctctgccttgggatcctgttgatctgtgaccttacccccaaccctgtgctgtgtccactcagggttaaatggattaagggcggtgcaggatgtgctttgttaaacagatgcttgaaggcagcatgctcgttaagagtcatcaccactccctaatctcaagtaatcagggacacaaacactgcggaaggccgcagggtcctctgcctaggaaaaccagagacctttgttcacttgtttatctgctgaccttccctccactattgtcccatgaccctgccaaatccccctctgcgagaaacacccaagaatgatcaataaaaaaataaattaaaaaaaaaaaaaaagaaaaaaaaaagaaaaataccttggccctggtagccagcttacagttcaggaattcgtccccgacgcactgtgctgactcctttaacttgttctgcacatcctgcaaaaggaaaacacacagcttcaccctcttctactagcagcaagaaagctgctgtggggtatgggtcactgtggagcgggaggtcgtctttcctcaggagaaacacatttccatatgttggctttgacattagtattctgcaatctcttgactctcccttagatgtttttctcaccaaacaggacagcctggcttcacagcaggagcaccacaaacctgcagcctctctccagaggcacagccactccatccgcagacggggggcagctctcc

SEQ ID NO: 12528 - DNA, 2325 bp, Artificial sequence
  DNA replication origin
gtacacctcccagacggggtggtggccgggcagaggggctcctcacttcccagtaggggcggccgggcagaggcgcccctcacctcccagacggggcggctggctgggcggggggctgacccctccacctccctcccggacggggcggctggccgggcggggggctgacccccccacctccctcccggacggggcggctggccgggcggggggctgaccccctgacctccctcctggacggggcggctggccgggcagaggggctcctcacttcccagtagggacggctgggcagaggcactcctcacctcccggacggggcggctggccgggcggggggctgacccccccacctccctcccggacggggcggctggccgggtggggggctgacctccccacctccctcctggacggggcggctggcctggcgggggctgacccccacctctgtcccggacggggtggctgccgggcggagacgctcctcacttcccagacggggtggctgctgggcggagaggctcctcacttctcagacagggcggctgccgggcggaggggctcctcacttctcagacggggcggttgccaggcagagggtctcctcacttctcagacggggcggccgggcagagacgctcctcacctcccagacgaggtcgcggccgggcagaggcgctcctcacatcccagacggggcggtggggcagaggcgctccccacatctcagacgatgggcggccgggcaaagacactcctcacttcctagatgtggtggcggccgggaagaggtgctcctcacttcctagatggggtggcagctgggcagagacgctcctcactttccagactgggcagccaggcagaagggctcctcacatcccagacgatgggcggccaggcagagacgctcctcacttcccagacggggtggtggccgggcagaggctgcaatctcggcactttgggaggccaaggcaggcggctgggaggtggaggttgtagccagccgagatcacaccactgcactccagcctgggcaccattgagcactgagtgaactagactccgtctgcaatcccggcacctcgggaggccgaggctggtggatcactcacggttaggagctgagaccggcctggccaacacagcgaaaccccgtctccaccaaaaaaatacgaaaaccagtcaggcgtggcggcgcgagcctgcaatcgcaggcactcggcaggctgaggcaggagaatcaggcagggaggttgcagtgagccgagatggcagcagtacagtccagcttcggctcggcatcagagggagaccgtggaaagagagggagagggagaccgtcgggagaggggagagggtatttttttttaatagagatgaagtttcaccgtgttagccaggatggtctcgatctcttgacctggtgatctgcctgcctcggcctcccaaagtgctgggattacaggtgtgagccaccgcgcctggccgatccccaactctttgagagcctggacaatgtgctctgcattctccttagggtctgtgtgtgaactaacaagctgagaagtaggtagtcctagcctcacttcagagatgaggaaactgaggcatacagaggtttggtaatgagttaggagacagaactcgacgctggaggcagggcctggatagcagtcgaaattgaggactagctgaaataggtccagggcagaatcaccttcccataagacacgcctgccagtgggccatgtcagtttaccatcaccatggcaacacgtggatgcccttttccatgacaatgactggacaacccggaatttactacccccattctagaaatttctgcataaatcaccccttagtttgcatataattaaaagtaggtataaatatgagtgcaacactgcctctaagttgctgctctgggtgccctggtaagggggtggttctgctctgcaaggagcaggacctctgttgctgctgtgcgtgctgctgcttcaataaaagttgctaacaccatcggctcagccttgaattccttcctagacaaagcctagaagcctctgggctaagcccgaatttgggggctggcctgccttgtattcatatgcccatgagcacacggccaataggtggtggtgctgggattcacaccaggtgtggggctgcagctgggacatgagcagtgtggcctggcctgtgagggtctctgttggatttgcgtctggccacgttaagcagccattcgtaggcatggagctttccctcttcagatggttttccttagagggagatagttgcacagacctttctcat

SEQ ID NO: 12529 - DNA, 877 bp, Artificial sequence
  DNA replication origin
ccggcagccaccccgtccgggacagaggtgggggtcagcccccgccaggccagccgccccgtccaggagggaggtggggaggtcagccccccacccggccagccgccccgtccgggagggaggtgggggggtcagccccccgcccggccagccgccccgtccgggaggtgaggagtgcctctgcccagccgtccctactgggaagtgaggagcccctctgcccggccagccgccccgtccaggagggaggtcagggggtcagccccccgcccggccagccgccccgtccgggagggaggtgggggggtcagccccccgcccggccagccgccccgtccgggagggaggtggaggggtcagccccccgcccagccagccgccccgtctgggaggtgaggggcgcctctgcccggccgcccctactgggaagtgaggagcccctctgcccggccaccaccccgtctgggaggtgtactcaacagctcattgagaacaggccaggatgacaatggcggttttgtggaatagaagggcgggaaaggtggggaaaagattgagaaatcggatggttgccgtgtctgtgtagaaagaagtagacatgggagacttttcattttgttctgtactaagaaaaattcttctgccttgggatcctgttgatctgtgaccttaccaccaaccctgtgctctctgaaacatgtgctgtgtccactcagggttaaatggattaagggcggtgcaagatatgctttgttaaacagatcctgaaggcagcatgctcgttaagagtcatcaccactccctaatctcaagtacccagggacacaaacactgtggaaggccgcagggtcctctgcctaggaaaaccagagacctt

SEQ ID NO: 12530 - DNA, 2494 bp, Artificial sequence
  DNA replication origin
acaagcccttcctgatgcaggcctaccaatctccatgccaaaccccacacttttagcctggaatgaccacagcatctgcagctgatgtctcagagccttcgtgccctcctcctacttaactccttattcctccagccctaactctggtaccacccatccagggatcccttcacccatgtagggaagggatcgcccttcacccttcaccctcttctgcggtgtgttgcacagccttgctcccgttttggaacagttagcacacttgctccactctggccatctgtgcctcctccagatcaaggaatgcacaggaaacatctttgtattctcagcacccagcacagggcttcctgacctcctggtggcagccagcaaacctgagtgggccagtgggtgggtggatagatgcaggatgcagtgagtgagtgagtgagtgggtgggtggatgaatgcaggatgcagtgagtgagtgggtgggtgaatgaatgaatgcaggatgcagtgagtgagtgagtggttgcatgaatgaatgcatgatgcagtgactcagtgagtgggtgaatgaatgaatgcaggatgcagtgagtgagtggttgtgtgaatgaatgcaggatgcagtgcgtgagtgagtgggtgaatgaatgaatgaatgcaggatgcagtgagtgagtggttgtgtgaatgaatgcaggatgcagtgcgtgagtgagtgagtgggtgaatgaatgaatgcaggatgcagtgagtgagtgagtgggtgaatgaatgcaggatgcagtgagtaagtgggtgaatgaatgcaggatgcagtgagtgagtggttgcgtgaatgaatgcaggatgcagtgcatgagtgagtgagtgagtgaatgaatgaatgcaggatgcagtgagtgggtgggtgaatgaatgcaggatgcagtgagtgagtgagtgagtggttgtgtgaatgaattcaggatgcagagtgagtgagtgggtgaatgaatgaatgcaggatgcagtgagtgagtgggtgggtgagtgaatgcaggatgcagtgagtgagtgggtgaatgaatgcagggtgcagtgagtgagtggttgcgtgaatgaaagcaggatgcagtgagtgagtgagtgggtgaatgaatgcaggatgaagtgcatgagtgagtgggtgggtagatgaatgaatgcaggatgcagtgagtgggtgagtgagtgggtgaatgaatgcaggatgcagtgagtgtgggtgaatgaatgtatgaagaagcagtgagtgagtgagtggatgaatgaatgcaggatgcagtgagtgagtgagtgggtggatgaatgaatgcaggatgcagttagtgagtgagtgaatgaatgcaggatgcagttagtgagtgagtgaatgaatgcaggatgcagtaagtgagtgagtgggtgaatgaatgaatgcaggatgcagtgagtgaatgaatgaatgtaggatgcagtaagtgagtgagtgggtgaatgaatgaatgcaggatgcagtgagtgagtgactgaatgaatgcagaatgcagtgagtgggttggtgaatgaatgaatgcaggatgcagtgcgtgagtgggtgaatgaatgtacgaagaagcagtaagtgagtgagtgagtgaatggatgaatgaatgcaggatgcagtgcatgagtgagtgggtggatgaatgaatgcaggatgcagtgagtgagtgggtgaatgaacgtatgaagaagcagtaagtgagtgagtgagtgaatggatgaatgaatgcaggatgcagtgcatgagtgagtgggtggatgaatgaatgcaggatgcagtgagtgagtgggtgagtgggtgaatgaatgcaggatgcaataagtgagtgaatgagtgaatgcaggatgcagagagtgagtgggtgagtgggtgaatgaatgaatgcaggatgcagtgagtgagtgggtgagtgggtgaatgaatgcaggatgcagtgcgtgagtgggtgaatgaatgaatgcaggatgcagtgagtgagtgggtgaatgaatgaatgcaggatgcagtgagtgagtggctggatgaatgaatgcaggatgcagtgagtgagtggctggatgaatgcaggatgcggtgagtgtgtgagtggatgaatgaatgtaggatgcagtgagtgagtgggtgaatgaatgaatgcaggatgcagtgagtgagtgggtgaatgaatgaatgcaggatgcagtgagtgagtgggtgaatgattgcaggatgcagtgagtgagtgagtggctggatgaatgcaggatgcggtgagtgagtgtgtgagtggatgaatgaatgtaggatgcagtgagtgagtgggtgaatgaatgaatgcaggatgcagtgcgtgggtgagcgaatgagtgggtgagtggatgaatgaggaagtgcgagtcagaaaaccccagtgtaaccggtgaatgagcgaacaagggcgtgactgggcgaggagagatgggagtgaatgagggtgcg

SEQ ID NO: 12531 - DNA, 1423 bp, Artificial sequence
  DNA replication origin
gtaggcagcgttgggcccatgcaggacgcggagaacgtggcggtgcccgaggcggccgaggagcgcgccgagcccggccagcagcagccggccgccgagccgccgccagccgaggggctgctgcggcccgcggggcccggcgctccggaggccgcggggaccgaggcctccagtgaggaggtggggatcgcggaggccgggccggagtccgaggtgaggaccgagccggcggccgaggcagaggcggcctccggcccgtccgagtcgccctcgccgccggccgccgaggagctgcccgggtcgcatgctgagccccctgtcccggcacagggcgaggccccaggagagcaggctcgggacgagcgctccgacagccgggcccaggcggtgtccgaggacgcgggaggaaacgagggcagagcggccgaggccgaaccccgggcgctggagaacggcgacgcggacgagccctccttcagcgaccccgaggacttcgtggacgacgtgagcgaggaaggtgagggcgcccggggcggggctggcgagcggcgcgggagcgtggctggggttcccgaggtgggagatatcgtcgggctgtgccaccggttcgtgcagaagttccagcgagggtgtccgtgtgttcctgagaagccaccgagggaggggttcccgagtgccctggaagtgttctgagagcccagcgcctccccttttctttcctgaaaaaggggacagggtggagctcacttcgggagccaggcatttgcatgacaaccagaaatctgagagggtgggagagggcacatggggtactccgttatggctgggtgtgctgtgagtgtagcagctgggggtacggcaaaaaccgaagacccggtggcaggtttgcgggtctacgtgtccccagagctgaccagtcagacctcccaaggtctggatcggaggaacagcttgtggcagagccggtgattttgtcctcctgcccctcagaattgtccatctccagagacttccttagtgggacaggcaccctgtgaaattccagtttgatttttctttatctcttgcgctaaatctataaagagagttatttttccaggttttaatattgccgataacagccagctttgccttcatctcaaccttgattggatttacaggcatatttttgcttcctgtctcagagattttttcctgaagctacttctgatgagagctggtctcatttgtttttcttttgttttttagctctcttaagcctttaagttgggaacacatcagcctctgcagattggctaagttgatactagagtgagaaaaataaaaatacccttgctgatgtagccagcgatacaccaggacaatttcgggaataacatggagttgccaatttatgatttaaacgtatttttaaaaggctatc

SEQ ID NO: 12532 - DNA, 2336 bp, Artificial sequence
  DNA replication origin
tttgtcaaggactttcagtatttagtgacttgtaaaaacattgatggaggcactgatacttgaactagtccatgccaatagagcctgtgaaaccaaacgcgggtaattttgtttaatgagatacagaatttgtaggaatatcaacttcccaaatgttactgcaagtgtctagagttagaaatcttcgcattcgaatcaggatatgttgatcacagcctgtgtccaggtatgttcagatgtcactgcggtggggcctgccttgacacttgaaatcactttaggccaggcacagtggctcacacctgtaatcccagcacttcaggaggcagaggtagaaaaatcacttgaacccaggagtttgagactagcctgagcaacatagcgaaaccctagccccattaaaaaaaaaaaaaaaaaaaagactttttaagctgttgaccactctccttgagttatgaacacttagcttccaaaatgccggcctgcaacaaggagtttatgctgagtgccagtgaaggcgccctccttcatgagagaggcctgccatgaggagagcggaactaggcggcgtgtagtgatgcagttagcttacatccagcacagggctccgcacagctcacacccggcccagggctcagcagtgagtagtgctatgcagttagcttacgtttggcacagggttcagtccagtttaaatccagcacggggttcagcggcgcagtagtgaggcagttagcttacatccagcatggggttcttattgccagccagaatgtgcaggcctgtgctgtgatgagcgctgctccagctgctccgtgccccgcactccgggtcggttgcataatggaggtgtcttgcattgactgcccacctaccctgctgtcagctcagcacaggcagagctttgtttgcttcacacgtgtccccgatacccaggaccttgttcagcaagtgacatagtcacggttgtggctctctgacccctctgtgtcctggtgtgtccctgccctggcctaggtggacaacgcgtactggctgtggactttccagggacgcctcctgcagaagaacaacaaggaccgcttctgccagctgctgtggcggccccggcctcccacactcctgagccaggaacagatcaaggtcagcatgcccccacccccgggtgcagggcacatggaggcaattgtggcgttgaaaaggtgtcagttttttctgttattgttagggtggtgactgggggataaaaacgtgacatttgcaaggattctttgaagagacgcaggaacagtgagaactgaatggaatagaacagctttaggatagtaacttgaggctttcagcttctttagggaagttttgcatgaacccgaggggtggataaaaagatgccagggccattaaaaagtcctgctgggattagaagcggcttgtctgggatttacattattgtggtaaaataggccgttggtcttaggtcagagcaaagaggagggttaaatcccagggagaaagtccgtctcaaagtgaaagatggaggaaggagcaggcacgagcgctcctgggatgctgtgttgtgtgaatgaccctgggtgtcaaggaggaaggagcaggcacgagcgctcctgggatgctgtgttctgtgaatgaccctgggtgtcatggaggaaggagcaggcgcgagctctcctgggaatccgtgttctgtgaatgaccctgggtgtcaaggaggaaggagcaggcgcgagcgctcctgggatgctgtgttctgtgaatgaccctgggtgtcatggaggaaggagcaggcgcgagcgctcctgggatgctgtgttctgtgaatgaccctgggtgtcatggaggaaggagcaggcgcgagctctcctgggaatccgtgttctgtgaatgaccctgggtgtcaaggaggaaggagcaggcgcgagcgctcctgggaagccgtgttgtgtgaatgaccctgggtgtcgaggaaggagaaggcgcgagcactgctgggatgccgtgttctgtgaatgaccctgggtgtcatggaggaaggagcaggcgcgagctctcctgggatgctgtgttctgtgaatgaccctgggtgtcatggaggaaggagcaggcacgagcgctcctgggatgctgtgttctgtgaatgaccctgggtgtcatggaggaaggagcaggcgcgagctctcctgggaatccgtgttctgtgaatgaccctgggtgtcaaggaggaaggagcaggcgcgagcgctcctgggaagccgtgttgtgtgaatgaccctgggtgtcgaggaaggagaaggcgcgagcactgctgggatgctgtg

SEQ ID NO: 12533 - DNA, 778 bp, Artificial sequence
  DNA replication origin
gccatgtcttgttgggggcacgggcagccccgtgggagtgaagtcagagcccaccctgaggggcacggggctgagctgctgccttcacctcttcacagagactgagcagatcccagagcagccgccctggtgactgcctgcaggtggcacttcgaatccacccgctcaatgacgcagaactgaaggagggagccgcggtcatcgcccacaaagtgggggaccaggtgaggctggggctcagggggctccctgctgtcacaagctcacagatggggctctgtcctggaggtgtggctaagactgacaccatgcccaccccactgggcccagtttctagtcagggttcggggcacacaaagggagagatgagtgccaccaggagaatacagcagagcccgtgggggtgggcaaagtcagggcaggggagcaggctggagccccccagcaggagcatgtggcagggccacagagcagggagggggctgggaggagggcagagccttcagcaggcctggctctgaaattgtgtggctggaaagggcctgggtggctgcagctcagcagggaagggcgccagcatgctgtccagcacggggatctctgccactttgaagcaggctcagaagccaagctgttgccacaggttagggatgtctatggcctcggtggtcactcataagaagaaatgcccagtgtggggtggaactcagtgtcgccaagtggatcaggttttcccgttcgtcattagagaggcagcttcataaggaaggagacatgg

SEQ ID NO: 12534 - DNA, 1144 bp, Artificial sequence
  DNA replication origin
acgcagggatggcaggggcaggtggagacctgagacgcatgctggccaaacaccctgtcgaagatgaaggtccgctcccgggaccggcgtgttcgcgccacgtcctcggggtcctcgctggggtccatgagcatcaccatctgcaagcaacgagccgaccaggctggtcaggatagggcagggtctgcaccctggatggaccccaggcctggcacccaccctggacccctccaagaggcttggtccgggtctggaaagggctgtgggcctctgtggttgagccaggagcagagttgggggcctgcacccaccccccggcccggcaccctctccacttgcttctgaggagcagcatttaccgctattgcaccctcaaagcacagcaggaagcccccccaggcctgctgggctctgcagcccagcacccacactgggaaacgctgccttggtcaaaacacatcgaggacagcggcccagcacccaccagcctccctcagggcccaggttcctttgatgaacccacagggcggggatgggaaggagatgggaagtgctgagctggcgcctggctgctgtgcgcagggtttctgcgagtgaccctgagtgtttccgctcctggccctgtctcctgtggctcactggggctgaaccatacacaggaaacgggagaacaaaggaccgagccgggtacagtgaataacacctgtaatcccagcagtctgggaggccaaggcgggtggatcacctgaggtcgggagttcgagaccagcctggccaacatggcgaaaccccatctctactaaaaatacaaaaaattagccgggtgtggtagcgggcacctataatcccagctactcaggatgctgaggcaggagaatcgcttgaacccaggaggtggaacttgcagtgagctgagattgttccattgcactccagcctgggcgacagagcgagactccatctcaaaaaaaaaaaaaaaaaaaaaaattaaattagccgagcatggtggtgcatgcctgtggtcccagctacatcagaggctgaggcaggaggactgcttgagcccagcagttcaaggctgcagtgagctgtaatcgcatcgcagcactccagcctggacgatccagccaagatcaccagccct

SEQ ID NO: 12535 - DNA, 1081 bp, Artificial sequence
  DNA replication origin
gttaaggagagccgacccgcgcccctcagcgcggcccgggacccccgcccgggccctgggagcccagcactggccgagagagagggagaccgcgccccgagcccgccgcccgccgcgcccctcacctcgcgaccctcacctcgcgcccctcacctcgcgcccgcagccgccgccgccgccccgcgactagcggaccccccagaggcagccctcgccggccccgcccccggcgcaggagcccctcctaccggtcgtcttctcgcgagacgtcgcggccgccggaggggccacggaggccgaggggcgcccgccctcagcgcgcctgcgcccggccagcccgcccgcccccgccctcgcgagccagtgccatgtggcgccgtatttacggccagagatcgactccgcccaccggccgccacgagccacgcccctttctcagcagccaatccgcggcgttgactccgccccggcggaccgggcgcgcggcggctcggggacgcgcagctgtctcgccgttcgacccgggagctccacgttgcagccaaacacgatcccgttaaccaacctttatgcagtgcctgttgtctatccgaccctttctcgagcatcggctcattggcaaaggatcgtgatgctcaccggctggggcttgagactcgctgtgtgaccttgggcaagtgacttaacctctctgaggttgtcgccaatccgtaaaatataataggttagtgaccctacctttcagggagtatgtgagacaaacgagatgacacgggtaaagagcttagcaagatgcctaatgcatagtgagcatgcagtaattgttcttggcatcaatgtagttttgtgtgtttgtttgtttatttttttagagacaggatctcaccgtgtcgtccaggatggggtgcagcggtgcagtcacagctcactgcagcctcgacctcctgggttcaagccatcctcccacctcagcctcccaagtagatggaactacagacaggtgccaccacacccggctaatttttaatttttaatagaaacgggggtctcactatgttgcccagggtggtcttgaacccct

SEQ ID NO: 12536 - DNA, 1413 bp, Artificial sequence
  DNA replication origin
ggggcgcgggtcggctctccttaacctggcctggcgggcgcggcttgggcctgggttcgagttcccgcgccggcgcgcagtgtgaccttggccctgcgcgcgccctctctgagccccgctcgtcgtcctcggccagggggacccagccctggggccctgatcagcgcgttctgcggctcctcggggtctggacgagaaatctgtggttctgattcagcgacagcagaggctgcagcggccccgccggcccccaggagtccccctgcccggcatcagcctctgccgcccggcaggggtaggaccaattcccgggcttggagttccaggatccccagctcccgagggcccccgtgtgcctgctgtcacctgaacggggctccccggccccgccgaccgcagccctggagcctgcagacgccagcagcaccggcaggtcgctcagggtatcccttaaatgacctctcactccagaagccgcagccctgcccctctgggagaggaaaccgtgcatttagtccgggaacagtgggacttagacctcctctgcgggctcccggccaccgagacaccgccggcaaagccttggctcgggcagaggctccgtctggcaggcagcacaacaagccatagtgtttccagcattattaaattatttagttcataagcggggctgtggggactcggaagccccggggtgaataggaatgtgagttgcaggcgcggtgctggacgcagtacatcttccaggacaccaggccctacggtgctgttcccggctgtgggtggttggggacagctcagcgggtcccccacttacccccacgcggggacccgggttagcccctcaccgtgagcatctggtgttgggagtcagggctggtgtctgagtgaggatggagagaaaacaggggtaatgaggagattgctacacgaaggtgcaacgcttgagatctgaaagagcacctgcctggaatggcatagatgtttgatttccctgcaaaggagtttatgggactttgggctgacgctttggggccagcagtaactgtctgctgtcactcagctgactccagctttattatcaaacctccaatcgagtgcaagatgctaagctggggtagatgccggtaatagcgtgggccttgccctgggagctcacggccagcctggctacaactgtgtggagttgagactgtggtgcaggcgttaacagaatgtggcgacattttccgacattttccacagtggagaggacctatgaattggggcgtttggaggcaaagggcatgcagagatgtggaagtgaaagtgatgtttgggggagatggtgggtcgccgtgttcttgatgaagtggggtttgaggattgggttggaagctaagactggaaggccgggcgaggtggctcgtgact

SEQ ID NO: 12537 - DNA, 1265 bp, Artificial sequence
  DNA replication origin
ttctcttctagtgtgggtcaggggctgaaggagccatcagtgggaaaagacgggttattgatgatactgaaacacatgcggcttgtttgtcatttaaaaaaaccgtacatcttgagtttcgattcttaagttgtctttcttttcggagagtagctgttagtttcacacttgcttagtgggtctgtggctgcaggcgggactgtggttctccagccctggcccacagatgtgcctggagataattgactctccaacttattacttcctgctgttaaggtggtggtttctgtaactgtttagaaactttaaagatatttcagagaagaatgggagacaggtacagttgagtacggggtgggggcacagttgagtatggggtgggggcacagttgagtacggggtgggggaacagttgagtatggggtgggggcacagttgagtacggggtgggggcacagttgagtacggggtgggggcacagttgagtacggggtgggggcgcggttgagtatggggtgggggcgcagtgctgaacagggcacaggaggaggaagcgaacagggaccctttggctcccagaacatgaccagctggggcttttccctgtagacaggaggatggatgtgtctttggggaatctgagtagcccaagagaaaagacctaaaattaatgacatcaggaggtccccagtcagcagacccagctggatcccttgctaacgaagcccgtcattaataaccccctcccagtgttcaaggcatcaagctttaaaaatccccatcccttaaatatgagcagataaccaagggcatctgaagaaaacctctgctacaggagattgagaccagaatacacactgggaaaccagagagcgtgcaggaaggagccttagaaagcaggctgtcattaatgtccacgcggaggtgagcgaaaatatcgcgaacatgaggcaagaacaggaagctctaaaaaaaagccaccaaaaggagtattcgaatatccaaaaagagaactctcggatgtaaaaaaaaaaaataaaagcagaaataagaaaatcagttagtgggtgaaagataaagttgaggaactccctcagaaagtagaacagaaaagcaacgaggtggcaaatgagagaaaaaagaaacggaaaggatcagatcaggaagtcagcagctgaatagtaagagcttcaaagctgaggtgagaggatcgtttgaggccaggagttcaagaccagcctgggcaacatagcaagacccccatc

SEQ ID NO: 12538 - DNA, 844 bp, Artificial sequence
  DNA replication origin
ccgcagcacgctcctccgctccgcctgctgccggccctggtctgggctgcgccgggcgtcgcgcggggaccagtcgtagcctctcacgctctcctccatgctccccggcgcaggcggctgctccgtctcctttctgggaaggtcgctctgcttcacgccagcactgagaaacttgtccagaaactcgtcgacatcggagtcggccgtgagctccctgtccctgtccggcccgggcgtgggcagcggcggccccgtgtgcggcctagagaaggacgtgtgcaagtagaagtgcgcggcgcctgcgctgtcccagtacacgatgatcagcaggatcatgaacaccgaccccagcaccagccacagccggaacagccgggccttggtcatcctgccccgggcgggctgggccctctccgggcctctcacttcagcttcctgcagagccggggcatcctgctgggaacctgcagatgcaatgacacactagttaatgactgaggtgcactggggctctgactcctgccttctgatcagtgggggactggggtccggaggagcaggagcgctgggccacgtgatatcagctcgccctccagaggggctggaggctgaggtcagcagtgcagggagtctacacatccatgtgcccgagcaccagtaatgaccctggacgccaaggctcgcgtgcttccctggctggcagtactccacatgtgctgacactcgccactggcgggaaagtaatattgcccacaactcccaagaagaggacgcctcccagggagtggagaccagctccaggtgtgagccctcctggactctgccctctgcaactcttcccaag

SEQ ID NO: 12539 - DNA, 1083 bp, Artificial sequence
  DNA replication origin
gtccagagtctccagcttccccacgaagtcgtagtcgatctggcacgggtggcagaggcggtacacctgccgccagtgctcgttgaagggcgccagcttctccgtgtgcgggtccagcaggtactggatgaagttggcgaaggacaccttgaggccagcgcggaaggcctcgcgcgccgaggcgggcaggctggtgtggttggcgtacagccgcagcatgggcacggcgaacttgcggtagaactcctcgttctccagctcgaacttgctgcggaaggcggagatcaggcgcacgaaggggtcgcgcacgaagaggaacttggtgtacttcttgagcttgaccttcatgaggtggcgggagagcttcccgtagcggcgccagaacttgttgaaggtcaggtgcgcgctggcgttgtgcacgtgctcgcgcgggatgcgcagcgggtcgcggtagggcgcaccgcggtgcagcaggcttccgctcagcacgatcatcacgcgcttccagttggtgcaggccaccttgggcacgtagcagtagatggccccgtgccggtcgtccacgatcaggtggctcagctccgagttggggatgtcgtcgaatgcgcgctccttggtggggaaggccaggctggagttggcgcagaagccccgcagcacgctcctccgctccgcctgctgccggccctggtctgggctgcgccgggcgtcgcgcggggaccagtcgtagcctctcacgctctcctccatgctccccggcgcaggcggctgctccgtctcctttctgggaaggtcgctctgcttcacgccagcactgagaaacttgtccagaaactcgtcgacatcggagtcggccgtgagctccctgtccctgtccggcccgggcgtgggcagcggcggccccgtgtgcggcctagagaaggacgtgtgcaagtagaagtgcgcggcgcctgcgctgtcccagtacacgatgatcagcaggatcatgaacaccgaccccagcaccagccacagccggaacagccgggccttggtcatcctgccccgggcgggctgggccctctccgggcctctcacttcagc

SEQ ID NO: 12540 - DNA, 971 bp, Artificial sequence
  DNA replication origin
gggccatctactgctacgtgcccaaggtggcctgcaccaactggaagcgcgtgatgatcgtgctgagcggaagcctgctgcaccgcggtgcgccctaccgcgacccgctgcgcatcccgcgcgagcacgtgcacaacgccagcgcgcacctgaccttcaacaagttctggcgccgctacgggaagctctcccgccacctcatgaaggtcaagctcaagaagtacaccaagttcctcttcgtgcgcgaccccttcgtgcgcctgatctccgccttccgcagcaagttcgagctggagaacgaggagttctaccgcaagttcgccgtgcccatgctgcggctgtacgccaaccacaccagcctgcccgcctcggcgcgcgaggccttccgcgctggcctcaaggtgtccttcgccaacttcatccagtacctgctggacccgcacacggagaagctggcgcccttcaacgagcactggcggcaggtgtaccgcctctgccacccgtgccagatcgactacgacttcgtggggaagctggagactctggacgaggacgccgcgcagctgctgcagctactccaggtggaccggcagctccgcttccccccgagctaccggaacaggaccgccagcagctgggaggaggactggttcgccaagatccccctggcctggaggcagcagctgtataaactctacgaggccgactttgttctcttcggctaccccaagcccgaaaacctcctccgagactgaaagctttcgcgttgctttttctcgcgtgcctggaacctgacgcacgcgcactccagtttttttatgacctacgattttgcaatctgggcttcttgttcactccactgcctctatccattgagtactgtatcgatattgttttttaagattaatatatttcaggtatttaatacgaaatgtggaagggaatgctggagtaaaatatcccctctcccc

SEQ ID NO: 12541 - DNA, 975 bp, Artificial sequence
  DNA replication origin
tagctactcaggaggctgcagcaggaggatcccttgagcccgggaggttctaggctgcagtggtgcgatcacagctcactgcatcactacactccagcctgggcaacagagcaagaccctgacaaagggacgaggaggggaggggagagggaggggatgggggaggggagggagggagtggggagggggagagaaaggaaggaaggaagaaggggggaagggagggagggaagggagggaggaaggaaggaaagaagaaggaaaagaaagaaggaaagaaaaaggaaggaaaggggaggggaggagaggggaggggaggggaggggaggggaggggaggggaggggaggggagggcagggcagggcagggcagggcagggcagggcagggcagggcagggccgggcaggggaaactggggagcccccgtgaggccggcccagggccgggcaggggaaactggggagcccccgtgaggccggccccagctcttcacagccctgggactgggttttccggctcagctgtgtcatttgctgagtggccgctgcttccagcttctgacctgcggttgctgcctccttcccccgacaagtccttgtgcccccagagccactgactggtgggaagagatgccacgttcctgcccttggggccacctcagcccactggactgtgtgtgctcggccacctgtgggggaggggctcaaagagtggcctcagccagcgtggtcctggcagcgcgtcttggggcttcaggcctggggagtcggagccactcagctccttgagtcccccagaggggcccagagcagtgacccaacagcaagtgagtggtggagtcagtgtgaacttggttcaaactggaaacaggtcgccctcacggacagtgtttggtgggaggaagacagctctggccagcatggccagcatggtgctgagggcgctgtggggcccagcagacaggaatcacgag

SEQ ID NO: 12542 - DNA, 1231 bp, Artificial sequence
  DNA replication origin
ggaggcaggagccacaactcccattgtataggtgtggaacctgaggctggttggggggacttgtggatggtcacgcagccaggaggggcaggcctgggggactctccccacagtgctcatgtccccttatgaggcctccggggccttcctgctcccaccacacaccagcctggctctcaccaccacacacacatgaggctgctgggacaggctcacgtctccctccaggtgggacaggagaaacaggaaaggcccctgcaggaagtagggggagagggaagccttggggcctctgaggagatggcttggaccaggcaggacatgagtgccccagggctgacccttcccaccagggctgagccgtggcaagagcctgagcccagtggtcctgggtggggactggcccaggccatgcctgcccctgcctttcagtcccctgggccccgctgggaccttctggcccatggcaggtgccctccccacacaggatgccatccgacacccctccccggtccaggtccatcccggccgtatgcgagaccgtatacggcgaggccgtatgcaggccgccgtatgcgagagcttcagcatcctggggacaaagtgagggggttgggtcgtctctggagtgtcggtctcagggtcccccagccccccagcttccagggctgcgtagcaccggccccacctgagcctccccctgccaccccctagcagccaaacgcctgcagccttctcagagtttattgaaggtggagctgcgaggagcacacaggaccacagaccccctcacccagctgccccagggtgggactccaggtaccctggacatgggacaagccgaggctggctcctggggtgcaggtgtcactcagtagccccggtccctgcaaacatccaaggcacgtccctagctcctgccctgcccatgcacagaccagggtgggaggtggaccatggccctgctcccgtggccggatatgcagggctggcagggagaggagcagggtgggacgccaggcagacaacccctccccaggcggaggagggtccccggatcagggtgagaagcaaaatccctgctggggtgggcagtgtggggcaggaatgggcagggacctgggtagaggcagggactttacccccagctcaggcccctcttggccagctccacctgggccaggcagtggtcactcagcacgcgcaccctggtggtggcgcccagcggcct

SEQ ID NO: 12543 - DNA, 776 bp, Artificial sequence
  DNA replication origin
ggaaggtccctgcccacccagcctgcccccaacccagtgccagacataggctaaggctctgttcatctggtgtctttgtgacagggtgaccagggctggggtgggagggacacacctgcccagcaggccagctctggggggaccttcaccctgacgccctctcagccctgagatctgatgagaggccagagcccataccccatctctgtgcagagagagcacgggtggctcagggagcccccagccctgcaccgttctccttctccaggtccagggtctcacccacctgcactgccatctgctcccagccactgtgggagggcgcggggagcctggggtatagatggggggctaggggtgggaagtgccggggggctgggggtggggagcgccgggggagggctgggggtggggagcgccggggtggggctgggggtggggagcgcccggagtgggggggctgggggtggggaacgccgggccccacccccgggtgacttggcaaggtctctgggcccttcccagcccatatctccctacccctcgggcctctcccttccagctggttctctgtgcaggcgcaagggagatgggtcacctgcccctgctcccccaagccctctcctgcctgactctcacccacttcactccttcaggatccaggaaagcagccactcctttctcactgggacggcaaggtctaggcagggaccctggcccggctcttcctccgggatcacgggcccctccagggactcgaaccctcccatccggcc

SEQ ID NO: 12544 - DNA, 1124 bp, Artificial sequence
  DNA replication origin
cacccacttcactccttcaggatccaggaaagcagccactcctttctcactgggacggcaaggtctaggcagggaccctggcccggctcttcctccgggatcacgggcccctccagggactcgaaccctcccatccggccaagggcaggcttaggaggggaggcttggctgccgacccctgccctggcttcccaggtcccgtctgaccacgtggtgctgcagggcctgtcccccagcccaccctggcccccgccgcctgcccccactggctcagccaccccatggggcatacagcaaggattaggccggcgctggtcagcgcattccaggctctggcaggcgaggggagggcttttcccacacccaggatgctccccacctcaggctgagcatgggggggaccagctgggccctcaaggaggaagggaggtgagcagagagagtctcaggctgtcgggcagctttggggcctccgaggacgggaaccggcccgaagtggacctggagggggcacagagccctagggctgctgcaggtgggtgtgtgtgcagccatgtgcagccatgtgcagtgcgtgtgcagtgatctcgtgggtgggtatcctggctgcaggccggacgattgtgtgagcccatgagtgtgcgaggcatggggtgtgagttccagagactctgggtgacagggaggtttgctgtgtccctgcctgtgtgtctgaagaggcctggcccccaggatgcccccgccaggattctccattctcacgtctcctgccgccctgtccccgtgttcgagtgggccctccagtcccccatccgcaggggtcccttccagccattctctccaagccctggcagggctgacctgggtcccgcctgacctctccatgggtgctgccgctggggcctgtgcccggacgtcctggtaggagggtgggactgctgaggccgggaggggcctcaaggtggtcgtgactgtccgccagccccctgggtggtgcagagcagtgcggagcctgcggctgtggagcccgtctctcctgcctggctcgtagcagggctggccgtggccctgcagggggcagccctgggcagcagaggatgagcgtgcctgccctccccggccac

SEQ ID NO: 12545 - DNA, 757 bp, Artificial sequence
  DNA replication origin
ccacccacctcggcctcccaaattgctgggattacaggcgtgagccaccttgcccggctgagtcatatttctttctttctttcctttttttttttttttcttttgagacagagtcgtggtctgtcatccaggctggagtgcaatgacgagacttcggctcactgcaacctccacctccctggttcaagagattttcctgcctcagcctcccgagtagctgggattacaggtgcccgtcaccacacccggctaatttttgtatttttagtagagacggggtatcaccatgttggccaggctggtctcaaactcctggcttcaggtgatccacccgccttggcctctcaaagtgctaaggttacaggcgtgagccaccatgcccaaacttgtgtcatgtttctatcagacggtgcaggatgaagatgatgggtggggggagggagggagggagaactggagcagaatgtggggtgggagtgggaggctcttgggctcttgagggtgacccaggacaggacgctggaggaggaatgctggcacagggacaaagcatggtgagatgggggtgcttaaggagcaggaaggagatccgtatggccagagcagggggtgcagagaggatggggtgagggacattgtggggtgggtccgaggccatgagagagacaggctggggctggacgccgtggggtcctccagcatccctcaaaaggcaggacccagatgcccaggcctggggagtggtgtgggaaggagc

SEQ ID NO: 12546 - DNA, 2496 bp, Artificial sequence
  DNA replication origin
ctgtttatccattggaaggcaggcagtaactgaggcctccatgaagaagtatgggggagaggaagactgaccagaggcgctgactccaacctgcaatatctcccctccacagtccccataactctctgatcctcctccccttagtattctgtcccacatggacagacagacagacagctaggcgtgtgagtggatggatagatggacagaggggtaaatggaaggatgaatggacagaaggactggtgggtgggtaggtgggtgggtgggtaagtgggtgaatggatggatggacagaaggactgatgtgtgggtgggtgggtggatggatggataaatggatagatgaatacaaaagttagctgggcttggtggcgtatgcctgtaatcccagctacttgggaggctaaggtgggagaatcacttgaacccgggaggcagaggttacagtgagccgagatcgtgccactgcactccagcctgggtgacaaagcgagactccatctcaaaaaataaataaataaaataaaatagatggatgtatggacaaaaggactgatgtgtgggtgggtgagtgggtggatggatggctggctggcaggctggctgcctggctggacagaaggactgatgtgtgggtggatggatggatggatggatggatggatggatggatggatgggtgaatggatggatgaatagatggatggacagaaggactgatgtgtgggtcggtgggtggatggatggatgaatggatgatggatagatggatggacagaaggactgatgtgtgggtggatggagggatggatggacagaaggactgatgcgtgggtgggtgagtgggtgagtgggtggatggatggttggatggatggatggatggacagaggattgatgggtgggtgagtgggtgggtgggtggatggatgaagaggaaagtgcaggttgggacagctggatggagagatggatggtgggtgggtggatggatggatgaatggatgatgcatagatggatggacggaaggactgatgtgtgggtggatgatggatggatggacagaaggactgatgtgtgggtggatgatggatggatggacagaaggactgatgtgtgggtgggtgggtggatggatggatggatgaatggatagacggatggatggatggatggatggatggacagaggactgatgggtgggtgagtgggtgggtggataggtgaatggatagatggatggatggatggatggatggatggatggacagaggactgatgagtgggtggatggatggatggatggatggatgaatgaatagatagatgaatgggtggatagggatgggtagaagaatggatggatggatggatgtgtgcatggatgagttggtgtatggatgggaggatgggtaggtgggtgggtagatggatggatgaataagtggatagatgggtggatgggtgaatggatggatggatggatggatggatggatgatggttgggggatgggtgggtggatggtcagaaggatggatggatggatggatgaatgggtggatagatgggcggatgggtggatgggtgaatggatggatggatggatggatgggggatgggtgggtggatggtcagaaggatggatggatggatggatggatgaatgggtggatagatgggcggatgggtggatgggtgaatggatggatggatggatgaatgggtggatatatgggtggatgggtgaatggatggatggatgtgtgcatggatgagttggtggatggatgggtggatgggtaggtgggtgggtagatggatggatgaatgagtggatagatgggtggataggtgaatggatggatggatggatggatggatggatggatggatgggggatgggtgcgtggatggtcagaaggatggatgagaggaaggatggctcctagctcattccttgaatttatactcagatgaaccctggtgccatatgctggatggtgggatctctggctagatggctcagcaaaggtgcgggtttagataccccaaacttccaagctaactacaatccctactaccagttagactacatgacacagaacataagcatcagggctgactgagatggacataggtacattcagaaaacgtctatggtgggacctcatctaggcccagggggatcccagatggcacttgtttggagggtggttggcgcttaagagcagcagcagaaagggaggtcctcagccctgtctccttcctccttgctgtagtcggagtccggccaacacctgggcaccaggggaaagtggcctgctgggggaggaagtcaggcctggggaggctgtggaccctgggagcttccttgcctgcccccgccccaccttcactcctgcacacaaaggcacagagacacacgaatgcacaacgcctcgccacgctctcgcacggatgccacgtggcagcagaagtagaagactccac

SEQ ID NO: 12547 - DNA, 766 bp, Artificial sequence
  DNA replication origin
tgatgaggcccagggtggggcagggtgggctcgggcacctgtgactgccccttccccactgggactgggggtgggacttctgttcaccacccatcagtctcatcctaacctgagtgccttctgcagaccctgggcaatgctgaagcacagccctgaccacacctgtgtcctgaccacacctgtgtcctgaccacacctgtgccctgaccacacctgtgtcctgaccacacctgtgtcctgaccacacctgtgccctgaccacacctgtgtcctgaccacacctgtgccctgaccacacctgtgccctgctccaggatcccagaatggccccacctcagcactctaggtgggtagatgagggaagcaggtcgtgcaggccagcgtggggtggctgtgtggactgcagtcacctctagtggccccaagaaggggaggaggttctggacccaaggcagggtgggggtgggggcagggctcgtctgcaggatgaggcccagagaggggctggatgtcctggagggaagcaaggaaggagagacggagggagagacagagatgaagagacagagaatgctgagatagaacagaaacagagagagcaggggacagagacagggagggacagagacactgggagagagacagatagggagagctagagacaggagggaaagagacagggaagcacagagaagagggagtacaagggtgacccaggccccaccctctgattcggggccacaggccctccccactccgccccagg

SEQ ID NO: 12548 - DNA, 701 bp, Artificial sequence
  DNA replication origin
agatcacaccactgcactccagcccaggcgacagagtgactctgtctcaaaacaaacaaacaaacagacagacaaacaaaaaatgtactgagcacctgctgtgtgctgggcccggtgctggtcacagggacggtgggtagtccacacaagactgccctccacccctcgacagaggaaacttctggcagctggctgtgcggcccagtggtgatgggagacagaagaggcctgggcttgctggaggcaaggttcgtaagtggaagcttaccaggcgtgggggaggcaggatgtgcaaaggccctgtggccaggatgctgacagaggatgggacaagaggccagtgtggagccaaggtgggggcggggacacctagtctgggagacctggggccacaccacacccctgtgagtagagcgtggcatgatgcagtttgcaggggggtgctccccacctcaggcacccagccatgagaacctagagccgagcttgacttaagatgagccggtttgacgctttggctaaggggacagaggggcacacacggaatattccaggggctgtgtttgtgcaggagcagaggtgggcacacaggggcccaggacacacagtcacatacaaagacccacctctagagacgcacagagacagggacccggtggactgcatgcaccagcagcctgtttacctcctaaccctccctc

SEQ ID NO: 12549 - DNA, 1030 bp, Artificial sequence
  DNA replication origin
gaggctgacactgaccctgcgggtcctgcagctagagggaaacagccccagcccacgtctcactgacgccctctcccctcgggatggctctcggactcctgtggcccagacacccacgcccaggccccctcccacgagccaccaccagggctctcggctccctgaagcccaccctgccaggggcagtcccgaaggtgggggccatcggggtgggacgctgagcaatgctggggtgaggggacaggaggtgcaagatgaggtgagggtgctaggaccccgggaggtgggcggaacacggaggtcatttggggtggggggtgtgtggtagggggtgtgctggctgggcgggaccccgggagatggggggagcgaggaggtcatttgggggtatggggggtgtgaggtgagagaggccagctggggggagggtcacggaggcctctgggcagagtgggaggaggaagctcctgtcagcctcagtttccccatctgccacaggagctgaggaggggtttggcacctctagggcttctcaggaggtctggcaacaaggcctcccatacaccccgcattggggagggatggtcaggggccgggacagcaggaagaagggatttcggggaggacaggcgggggagcttctccctgcagtctgtgcgtgggtgagagcgagattccagaactctccggggagactgtggaagatctgcagccgctgtgctgtctcagcctgtggctgccccgaccctgcgcttcctgtccggaccccctcccagagaccctcagctgacacatcgtgggggtcgggctcctctgccgaatgggagacttcacagcccagagaagacatgagacttgcccaaggccacacagcaagaacccatgactgcctgcagaatcaatgcacgaatgaatgaatgtcctggtgggctgctgtgtgagctgtctgtgccatgggctgactcttggagtagcagagcctttctgctgccctcacggctgtacctgcaggtggtctcctgtccccggg

SEQ ID NO: 12550 - DNA, 1109 bp, Artificial sequence
  DNA replication origin
cttggtttctggggacacctgacagtgaatgtttggagacactttcatttgtcgccaccgggctggggctgaacagacagtagggtctggcctatagggcccagagaggctgccccacagccccccatgcacagaacagccccacaaccaagaatgatccaccctcaatgtcagtggccacggcgcagaaaccatccaagagatggcgggccctcccctggccgtgccttggtggggctcttgcggtggctctcctgcctcgcctggggtcctcacaaggtgggcttgtgtctggccatgaggcccgggaacggcgtgctcccgccttcttgcaggaggtcacacaagggcagaggatgcagtggccgggcgtccaggacagtgaggctgccctggattggaaggatcgcacgggggggttccgggggagcccacggcggggggctgggaggaggctgcggcaggggcaggggctgggctgctcaggctgtggtccaggccttggtgagggcagggatggcaaagcttggtcccctccatcccccaccacccccacagcctccaggtggtcccagccttaggacctgaagacaaggctggggctggggtggagggaggggccgcctggaaagctgtttgctcagccggggtttaatctccaaaacaggaaggccgtattgacagaagcagcagccggaactgctgcgggctgccaggttacactccctggtccctcctcctctccccacgctggggggctccccgacagaccctgccctcaaatacagctgctcccatcacctgccacagccccccaggctgcacctcggggagacggtaccccgcttgctctgcaagctgcagggaggcctggtgccagagtgaggcaggaggctggagggggctccggggtcacaggccgggccgggtgtgactcttggcctcattttgcaaatgaggaagctgagcccagagagggaagtgagctggtttgggtcccacagggtggggtgagggtggtctgcctggatgcccccaccccaggtctctaacactcttgggagtggctctgtccaccatcaccactgtccaacccgcacagcaacccc

SEQ ID NO: 12551 - DNA, 1344 bp, Artificial sequence
  DNA replication origin
gtggccacggtggtgcctgtcaggccccaggcatgaccccccaccctagtcatgaccccgtgcccatgtcagtgggatgggatacagagcagtgggaggaggggctccaggccgggtggagggagcaggggtcagtcttggccccaggggagccctgcttgctatgtgatcctgggcttgtgtacctccctgatcccaggctccccatcgctaccatgggccatctttcccccttgaaaggatcagggaagacgatacagcatcaaaggatattccaggctgctctggaagcagaagaaggggaggttatgtccccaggaatggcgatcacacctgctgagagaggccacctccgtaggacctgagagctggtgttgggctccactcatccatccatccatccatccatccatctgtccatctgtccgtccatccttccatccatttcatgtgctcatcccacagccttcctgagcatttgctccatgcccagatctgcttggcactgggggaaggtagtaggtgaggattcaacaggggttagaaaaatgggtccagcccaaaggtgcccagggcccagacgagggagaacccactgtgggctggggctgggaggcaggggacttctggaaagtcttccaggaaaagatggtgacatttgccctggggcttgaaggcttgggcaggtggaggtggaggttgtgcagtcaggcaggggtgtgtgaagcaggtggaggtggaagttgggcaggggtgtgggagcaggtggaggtggaggttgtgtggtcaggcacaggtgtgtggggcattcatggaggtgaggctggagataaagagaagcctgaggatctaggtgtagaatgcaggggtactgggggagacatagggggctccaggttcacgagcaagagggacggctctgagtggcattctaggaggaaaagcaaccctgaggcccacctcatacaatacgtgtccagcctgagccttcctgtctgttcatccatccctctgagctttgggtccttgtggccagggagggaggaagctgcgagggtggccaggagccgccttggcctctgtcctccctcctcccttccttgggaggctctgccagtgttgcagcttagtctgggaaggatttgcagagagaaggcagggccgtgttgctcaggggtgggaccctggcaggaggggatggtggaggcgggtgtggggaggtggggcagagtctctctcagggcggcagaggctgggctgaggctggcatcagaggaaagtccaagcattggaggcaccgtcctctctctgcagcccgtttctgtgcacgccatctgctaggga

SEQ ID NO: 12552 - DNA, 1714 bp, Artificial sequence
  DNA replication origin
ggagggaagtgtttcaggctgaagctgagcctggggaagcgggcgggggtggctaggcgggccaccccctcaacagttttcagacctcaagaagtcaccacgaaattccattctcctgacagcaaagaaattgattcactcttgccaaagcctgcggcccccacaagaatgctgtaaagcttcctcccgctgcttccagacaggcagcagcatcaggtcccccactcctcccattcctggctacagagagacgcgggaaccccccctacccagttctatgcatgtgcccctgccaggctgggccatccacctctgtatggtcactcccttggtacaatatcccccttgctttctctacaatgggcacattgctcccacgacctgctgggtcaaaggcaccgcagtcaggggtagctggggagcaggagttgcgggggtggggcggctcagggcaggaagccccatcccctggcctgggaactgtggggagatggactcacagcatcttgtcaggtggggtgcagggtggcatggcacccaccatcggtgccactgatgtaaagtccaggtacagagcacaacccgtgcacatatttgggggcttggccatgcttggctgcaggggattgaggagggattgggcctcaagaaacggggctgggactaagtcacgaggtgcgtgaatatcaggcgggactttaactcagccagtggagagctatggagggttttgctctttgtgtgggtgtgtgagtggctatgatcctagttgtccagctgctgcgtggagaataagtaaagcaggtaggataggagtgggtgggatgggggtggaggctgcccaagtgattcagggaagagatgatggggatggatgaggctccgtctctgaaacaattcagatatgggagagcctgaagtcagcggtgtgactgaagcacgtggggtcatggacacccctcagtccggaggctggggctgggctgggactcagctgactttgtgggggcagccaacccagtcactgggtccttttctccccggctcaccctcaagcctctccagctgcatggaggctccagggctaggctctggctgatcggaaggggtttatggcaggaggtgacgccatgggagacttgtcacttgggcacagccagcaccatctgctggggcatctgctttcggaggtggtgactgctaattacctggggccaggaagaggcctgggaacccccatcccccacaccacccagcgggtacaggggctaggggtggggcccctggggccctaagagcaaatgggctacagcgtccttagcggggggagagggtctgacagtggggccagacatttatccagtgaattttttcagagcacctactatgtcccaaaacctgttccaggtctgaatgacaccaggtcgctgctgtcttgcggctgacattcaggtagaggtaaggagaggggctccaagggcacttaaagaatttaaaatgccatctcaggcgtgaacataactccgaggggggcagtttagccacggtggtggcggtggtggtcgtggtggtcgcagagaccctgcttaggagggcacgggaagacagcgcagccacgggcagagccgcctccgtccacgcttccggaggacgtggcgggcagggggctcacaccctgctcaggcgacccttggccacttccgggcccctcgcc

SEQ ID NO: 12553 - DNA, 908 bp, Artificial sequence
  DNA replication origin
agcggggggagagggtctgacagtggggccagacatttatccagtgaattttttcagagcacctactatgtcccaaaacctgttccaggtctgaatgacaccaggtcgctgctgtcttgcggctgacattcaggtagaggtaaggagaggggctccaagggcacttaaagaatttaaaatgccatctcaggcgtgaacataactccgaggggggcagtttagccacggtggtggcggtggtggtcgtggtggtcgcagagaccctgcttaggagggcacgggaagacagcgcagccacgggcagagccgcctccgtccacgcttccggaggacgtggcgggcagggggctcacaccctgctcaggcgacccttggccacttccgggcccctcgcccctcaccctcggctgccggcgcgcattcctgccgcccccgctcgtgcgaggggcgggcccgggcccgtgggaagggccggggatgggggccgtgtgccggggaggcggggtggggagggcgcacagctgggccgcatctggcccgagcgcaaggagaccaaatgggacagaaggcggcctttcatccggcgagggaagtggcggccttcgtttctcctcgccatggggcgcctgaggatttcggggagccaaccctcccgacggagggccaggatcgaggaaatcagccagggaggaaggagtggaatttggttctggtgctttctcgttagaacctcgtgtccccacctgcggcacaggtggccaagctcttgctctgtacaaataacggctcccctgaaccgagcgctcgggaagacccaggcgccaccccagtttgcaaggcctgccgcgtcccaaggggaggaagccgtgctcaggaggggaagcgcacagcgaggaagtaggatgtcc

SEQ ID NO: 12554 - DNA, 1552 bp, Artificial sequence
  DNA replication origin
ctggtgctgcgctgctggactgcgccgccggagcgacgggcttcgggtcggtgcaaggcaggcgcacggggaagggcgcgccgcgcggccgccaccccaccatgctcaagcgctgcggccggcgcctgctgctggcgctggcgggcgcgctgctcgcctgcctgctggtgctcaccgccgacccgccgccgcctccactgcccgccgagcgcggccggcgcgcgctgcgcagcctggcgggccccgcgggggctgccccggcgcccgggctgggggcggcggcggcggcgcccggggcgctggtccgcgacgtgcacagtctgtccgagtacttcagcctgctcacccgcgcgcgcagagatgcgggcccgccgcccggggctgccccccgccccgccgacggccacccgcgccccctggccgagccgctcgcgccccgagacgtcttcatcgctgtcaagaccaccaaaaagttccaccgcgcgcgcctcgacctgctgctggagacctggatctcgcgccacaaggagatggtgagccccccgcggcctggactggcgggcgagcggggcggggacccaccatctggtccagctggtggcagtgtcccatgggagtcaggctgcatccccatccagccactagggccatctgtgggcgacgccagtgcaccccggtgcacccagtttgcctgctggggccactctcccgttacagttgtgttactgtccccggggccccgcctcctgtccagctccagagtcctggatggctgcaggaccctacaccagtctccagtgcttggggttggtgccctgtgatacttctcaccccgtaaacattggagcgcattcatagggcattatgtcctcaaacttccacaagcaaattctgttcggacccaccctcagctcagaccccttcctggggagaaaggctcttcctttagagaagtgaggggttctgacctctgggccctttcctcatcacagtgttaaggtacggggagggagggaagtcattgctggttggtgggtcctggggagtacatctcaaagaactccaggttttggggtctgtgtggggaccctccccgcacagtgcagtagtctctgaggcctgcaaccttgggcacagcccacttcagttgggcatcagcttcttacacacacataattaagacacaccccactttgaacatttccctcgaggccacagcaggacggttgggctggggcgggatggggacagtgtgtggggcttgcagtcggggactgggggggtgtctctgggctgggagatgcagaggcatttgctgtgagggtgggggctcagggaagaccctgcacgccttcctccctgctcaaaccccggagacccagggccttctgacctggcgctgtcctgttttggggcactgtgggtgggtgggagcagggcttggtgaggtcatgagggcgacggggaggggcagggtcctccctggtcctggcgtggggaaggggccctgggaaccccatggcagcctcctgggaacacagcgtcccattcc

SEQ ID NO: 12555 - DNA, 2600 bp, Artificial sequence
  DNA replication origin
ctcgaggccacagcaggacggttgggctggggcgggatggggacagtgtgtggggcttgcagtcggggactgggggggtgtctctgggctgggagatgcagaggcatttgctgtgagggtgggggctcagggaagaccctgcacgccttcctccctgctcaaaccccggagacccagggccttctgacctggcgctgtcctgttttggggcactgtgggtgggtgggagcagggcttggtgaggtcatgagggcgacggggaggggcagggtcctccctggtcctggcgtggggaaggggccctgggaaccccatggcagcctcctgggaacacagcgtcccattcccaggggctcagcgggctggcgggagggggcggcgggggccgtgggttttgtttggcggccgggccgttaggattcccagcgccgggcggctctcacgccggccccttgggcaaggtaacaaagcccctttctccagcgagaaaggcgtcgggccccttgtgtgcagctacgcgctccgtgggaaccgctgctggcgtgctggccactcaggttgcctggcgatgaggggaccagcgggcccccccagcatctcttactgacagtccttttggggcaccatccctgagcctggcccccccacccccagcactcaagccttactgctatgtgatcttgggcatccttcagccccactctgggctaccaccagctctgagcacctctcatcttggaatttggggcctttctccaacagaggggatgtggtcagagggctgggctgtgtgatcctgagcaagacctggggcctctcagaccctcactctgatctctgaaatgggggaacatggtccttccaggagcacgttgtaagagactggcaaagcctgcaggcatggggtgaacccggcgggcactcagggtcgaggtgggggccatcactcccttgagccctgaggtccctactggagggtcaccccaccaggggacaggttgaatctgccctcagcatcagttcaccagcacacagcaagcaaagacccccttgtggtgggtgatgggcaggggtcctggaaacccacagaagagggcccccctctcccagccctgcacggaatgactcagacatggtctgatgggggagatagaaagatgtcagggctgtgcggggggaaaaccccgagaggctgtgtgaggcaacagtgggcatctgacccacatgctgggggaagggagggaggagggaagacttcctggaggaggcgccatttgagctagactaagagtaaaaaagtgcccagaaagggcactccatccgggcatggtgatgaccacagcatgggggttgtgcaggaaacttctagcaactggagtggtggctggggggagggtcggttggtcagcaggggccgcgctgagatgggcctggagtccaggatgaagagcctggcctttggcccagaggttccccgcccctcccaggagcagccaggctgccgcgctgccaccacagcggccacaattgctggggagaacttggcatcctgtgtttctttgaatcgcggctccaggaacaatgctgcttcctgtgggtgtcccccggcccccgcccccgtccaccctcatccacccggctcttcctcctgcagccccgtcttcgtctggaaagttaggtggcactggggggtctgggtccctagaaggcagggactgggctggtctagcaccgcctcggccccagggtatgacctcaggctggtgcctgcacctctctgggcctcagtttccccacttgggcctcagctggtaatggcacccacctccgagggctgtcagggagaggaagggagagaatctgtctttgcactttgttctctgcccaggggagctctgttatgcccattttactgaagacgagactgaggctctgagcggcaggtgaggcctatagcccagcagcgcctttttcctcccctcctggtggctcaggtgtcgggagacagttcgaccggcacccccgcaccccatagccccgccttctcagatgctgttctagaggcctccctgctccctgagctgaacaaaggtgactttaatctccgtagccttgggctgggtttttagggcaccaccaaatctcgggagaacaggcctcccttgatctcattaagaaagcattttccttttaacccagcggcgcagtggagcgtctgcaggggctggccctccgcctcccacggcattcctgggctgagattctggggaggccaaggggctgggtgcgagtctgtgcgtgtggctgccctggggtgtctatgggtgctgcaggaggggtgcatgcatggagaggcggagacccagcctgccacccccttagctctgggcctcaccctagtgagcatgtgcccagggctgggtcaggctggataaggatctgagactaccaaggtgttccagggcctctgcgggacctgtgtgtacagggaaggaaactgaggctgggtgggcatcagggggttgtcccttggtcagagcattgcccgtacaccctgggttttgcactcagccatgccagggtgcgccgggcggcacgcg

SEQ ID NO: 12556 - DNA, 1038 bp, Artificial sequence
  DNA replication origin
ccagcagccgcagcagggcccgcaggttgacgtagttgtcatcgtccacgtggcagaaccacctgaggacaaggcagggccatcgggggagggcatgccggggcgggcgctgccaggctcgggcagggagatgggggtcccccggggccacactcacttcctgccggactcgatgaagcggtcatactccacggccatcttgcaggacagcgcctggcggctgtgggcggccgagcagtttgtgatgaccacgttgcctgtggacaggggagcggctgtgagtaggtctgagccggctcccagagaggggcctggcctgggggacgccacagggcccaggggctcgagaaaagccccctagttcaagctgggcccggcggccgtagcctcccccaccctagctcggggcttgggcctgtggaccctcccgcagcccagccccttccagggcggccccgcccccgcccattcaggcagctttttcccagcacccgccacctgttgccgctgcctgggctcaaagggacccggggggctgaatgggcttcatttgcatgagaattggggggcccgagtggtggggcggggcatggagcaaaccccatgagtaaactgccctccctgtcctgcccttggtgacctctcggcccagaggggcagggagactggagggggagcgttcggctctggatggaggcctgggccccctcccgccccaagtccagggctcacccgtgtgcctggccagggcctcatcttccccgtcagtgaagatgaacgtctggaaggagaaaatcggccttcagcaggcagcccttcatccccaccccagggccatctgtgggggccggacggggcgccctggagttgctgcagctgcagctgcgtcacactgacacccacccttctccgggccttggtttccccactcgtgctgagaagggctcaagtgccccatctcagtgccatctgggccagagctcacgcattcactcgccctgggggtgggggatgggggcctcactccccaacctcgac

SEQ ID NO: 12557 - DNA, 1062 bp, Artificial sequence
  DNA replication origin
gggtgccttgccctcccccgtcgctgccccctccagaagagtgctgacgtgctgaatgggcctgcagagacccccttactctaagcctggctgggggctaccctggccttgggggcggctggcagggctgtgaccccaccttggccttggacggtcctgagtcagcagagcagctgcctggggggtgtggacagtgatggggatggcgggaggatggagggccctcaccgtcacgtggcctgacccccgtctgggtggctgtggtcctccctgagcacccaccatgtgcccacccacttctcataggacggcataggcccctcttctgaacgaggaagctgagactctggggtggggcgggggggtcgtgacggaacaggctgcgggcagaggctgctggcctccttcctgcccggctgactcagaggcttggggccttctgccctggccccgacgctgtccccgcctgcagctggcatcgcctccccacagagctggtggggccccgggggcagaggtgtggctggacccaggggtcggacagacccatggatacagctgtgggggccctgccagggcttggggagtccccattaatgttcatatgtccctgtgtgtggagcggggtgggagtgggggctaagtgggcatcggggagagcagaggagcaagaagtggggtggggaggaagcccggctcctcccgaggcctcgacctctccatctgacaaatgggaacaaaggtaaatgcagtccccgggtgctggaggtcagggggtgttttggaaggtgcacaggacagcgcatctggccccttcctcttccaagctgagggagggacgtttctctgccctcaaaaggggaagcaggcccagcagtgtcttaggggaatgaggcagcctgacctcttccatccaccgcccccccaccccccagaaggtgactcacccggcaggggaggtgaagtcattcctcccccaggtacattctggggacagctgtgtcccacccaccagtggtgccatcacatcagattagaggtctggtcagaaaggggcctggc

SEQ ID NO: 12558 - DNA, 1379 bp, Artificial sequence
  DNA replication origin
tccgagcctcttgcgagaccacgtcttgggcagcatcgtagacccggctgtgagcacagagtggctcttccagaaagtttgttgaatgactgactgacctaagtcagtccctgtgccaggcagcccagagggaccagcccagagcctccttctcggggtgcaagcctggcttgggattggggggtgtctgcactcgtggagccccccatgcctgccgggagcctgaagacgcagagacctcctgcctcgcctcgccccctccgtggggaccctcttccccacactccttggttcctgtcggagccaagatgtgtcaccatggaaaccgcttggcaaacgctggcaggcagaggcggccaacagcagctctcccgatcgagctccgggcaccggctggagcaacgtcgcgggacggcgtgagcgagcacacccagccgtgtgtgacacgcgtggggacagaggccggggcggctgcgggagggcgtgcggggaggtcagggcgccccggcgtgtatgcgcccacgtgcgcgcctgtgcgtgtgccaacagtgcagccacatcggagcgcgtgtgctccgagtgtgatggccgcgtgggccggtgcagggtgtgtgtggggatgggggtgtctgattggtgctgtgacctgcggcagcacagccgcctgcgttgagtgcccacggtgggctggacattgcactaggtgctgacaggaccggcagaggtggccactgccctcgtccccagcctgcactcctgggcgaaggctgacgctgaacaggtacttgtaagagtcgccgaagtgcgtgccgggagggttctgggaagaggcagctgtggggcctgaagcctaaatgtggggtgggaggcatccaggctgcggctccaggcagagggcacagcccggctgtgagccaccacgcctggccccaagggccttcctgtgtgtccaattctgggctcagaagcagggggtcaccctgcagaatatctaagaaggctgaggctgtgtgggcacatggacccagcagggaacaagacttgcccattgttctgacagactcgaagatggatctggccctggtccctgctttccctctgaccccaggcccacccggcaagaatggctgaagtcacatagcagcctggccctggcccctctgagcctgtggagagccctagttgtctgtgattggggaggggggatcaagagacccaactgcattgcctgccctccttcccaggcttccagtcctcccagtggatcccacctctgcacctttgcccaggctgtgctgagacctggaaggccccttctctccctactccatcttgacaaagccttcctgcttcagctcagaggcacctcttccaggaag

SEQ ID NO: 12559 - DNA, 1991 bp, Artificial sequence
  DNA replication origin
ttcaggccccacagctgcctcttcccagaaccctcccggcacgcacttcggcgactcttacaagtacctgttcagcgtcagccttcgcccaggagtgcaggctggggacgagggcagtggccacctctgccggtcctgtcagcacctagtgcaatgtccagcccaccgtgggcactcaacgcaggcggctgtgctgccgcaggtcacagcaccaatcagacacccccatccccacacacaccctgcaccggcccacgcggccatcacactcggagcacacgcgctccgatgtggctgcactgttggcacacgcacaggcgcgcacgtgggcgcatacacgccggggcgccctgacctccccgcacgccctcccgcagccgccccggcctctgtccccacgcgtgtcacacacggctgggtgtgctcgctcacgccgtcccgcgacgttgctccagccggtgcccggagctcgatcgggagagctgctgttggccgcctctgcctgccagcgtttgccaagcggtttccatggtgacacatcttggctccgacaggaaccaaggagtgtggggaagagggtccccacggagggggcgaggcgaggcaggaggtctctgcgtcttcaggctcccggcaggcatggggggctccacgagtgcagacaccccccaatcccaagccaggcttgcaccccgagaaggaggctctgggctggtccctctgggctgcctggcacagggactgacttaggtcagtcagtcattcaacaaactttctggaagagccactctgtgctcacagccgggtctacgatgctgcccaagacgtggtctcgcaagaggctcggagtcgaatcctgaggctaaactgacgtcccgccaccctactgaaggccccatctagcaggttggtccgtggctgcgtaagcaccaaggcccaccaagcactttctcaaaggggggctcccctctgtggtagatcagttacaaacgtgtccccgatgccccactcctccctgaatcaccacgccctttgctgtgtgactttgccccaactcctgtctagaggtggcgtctacttccccatccttcaatctgagcctgtcttatgacttgctgtggccaataaaaggtgacagcaatgacattcccagctctgagcttaagcctccagggacatgcgtgcctctgcctgctctccccgactcctgctatagcacgagaacgggctgggctgctttgctggaaggcaagagggcgatggagcctgggtcaccctagctgaggccatcctggactagctagctcccagctgcccacagatgtgtgagtgagcccagctaggacttgccaggcctagcaatgagcagcagtaccaccaggccctttaatactaaggacatgtgaagtcatgtgtttggagctatttgttactcagcactagctacctgatacccctctctctagggccctggccagcagctgcccaacctcagttagcacaggccagaggctctaaaagttcccaggggtgctaagaaccaggccatggtgacagctggattccgctggctaacagtgccagagggtgccggggacagagcttgtgggagggggttcccatgacaagtccatggcaggagctactgaagcagaagcacgagtctccactgcctttctttgcctcggtttttccccctgtgaaatgggcccatcaccctgtcctgtctcttggggacccctggtaaggtagcgtgtgtggcagctggaaacagacctactacgtgccagccccgggttgcaacctagggagagaggcccattgctgccttctaggttcccacaactgagaaggcagcgtcactaatcccagcttacagactggaaacagtggggagaggatgagtggcttgcccgaggcccaggacacacaggagcaggtgggcatggccacaagccccggctgggtctgagctggtggttatcttcatg

SEQ ID NO: 12560 - DNA, 994 bp, Artificial sequence
  DNA replication origin
cgtctgagaagtgaggaaaccctctgcctggcaaccgccccgtctgagaagtgaggagcccctccgcccggcagctgccccgtctgggaagtgaggagcgtctccgcccggcagccgccccgtccgggagggaggtgggggggggtcagccccccgccgggccagccgccccgtccgggaggtgaggggctcctctgcccggccgcccctactgggaagtgaggagccctctgcccggccagccgccccgtccgggagggaggtggggggtcagccccccgcccggccagccgcccagtccgggagggaggtggggggtcagccccccgcccagccagccgccccgtccgggagggaggtggggggatcagccccccgcctggccagccgccccatccgggaggtgaggggcgcctctgcccggccgcccctactgggaagtgaggagcccctctgcccggccagccgccccgtccgggaggtgaggggtgcttctgcccggccgcccctactgggaagtgaggagcccctctgcccggccacgaccccgtctgggaggtgtgcccagcggctcattggggatgggccatgatgacaatggcggttttgtggaatagaaaggcgggaagggtggggaaaaaattgagaaatcggatggttgccgggtctgtgtggatagaagtagacatgggagacttttcattttgttctgtactaagaaaaattcttctgccttgggatcctgttgatctgtcaccttatccccaaccccgtgctctctgaaacatgtgctgtgtccactcagggttaaatggattaagggcggtgcaagatgtgctttgttaaacagatgcttgaaggcagcatgctcgttaagagtcatcaccactccctaatctcaagtacccagggacacaaacactgcggaaggccgcagggacctctgcctaggaaaaccagagacctttgttcacttgtttatctgctgaccttc

SEQ ID NO: 12561 - DNA, 1352 bp, Artificial sequence
  DNA replication origin
cacaaaaccgccattgtcatcatggcccatccccaatgagccgctgggcacacctcccagacggggtcgtggccgggcagaggggctcctcacttcccagtaggggcggccgggcagaagcacccctcacctcccggacggggcggctggccgggcagaggggctcctcacttcccagtaggggcggccgggcagaggcgcccctcacctcccggatggggcggctggccaggcggggggctgatccccccacctccctcccggacggggcggctggctgggcggggggctgaccccccacctccctcccggactgggcggctggccgggcggggggctgaccccccacctccctcccggacggggcggctggccgggcagagggctcctcacttcccagtaggggcggccgggcagaggagcccctcacctcccggacggggcggctggcccggcggggggctgacccccccccacctccctcccggacggggcggctgccgggcggagacgctcctcacttcccagacggggcagctgccgggcggaggggctcctcacttctcagacggggcggttgccaggcagagggtttcctcacttctcagacggggcggccgggcagagacgctcctcacctcccagacagggttgcggcccagcagaggcgctcctcacatcccagacagggcggcggggcagaggcgctccccacatctcagacgatgggcggcggggaagaggcgctcctcgcttcctagatgggatggcggccgggaagaggcgctcctcacttcctagatgggatggcggccgggcagagacgctcctcactttccagactgggcagccaggcagagaggctcctcatatcccagacgatggggggccaggcagagacgctcctcacttcccacatggggtggcggctgggcagaggctgcaatcttggcactttggggggccaaggcgggcagctgggaggtggaggttgtagcgagccgagatcacgccgctgcactccagcctgggcaccattgagcactgagtgaacgagactccgtctgcaatcccagcacctcgggaggccgaggctggcggatcactcgcggttaggagctggagaccagcccggccaacacagcaaaaccccgtctccaccaaaaaaaaaaacgaaaaccagtcaggcgtggcggcgcgcgcctgcaatcacaggcactcggcaggctgaggcaggagaatcaggcagggaggttgcagtgagccgagatggcagcagtaccgtccagctttggcttggcatcagagggagaccgtggaaggagaccgtggagagagagggagacggagag

SEQ ID NO: 12562 - DNA, 853 bp, Artificial sequence
  DNA replication origin
gccctccaggtctagggacctgagcatggccagcacagcctcaggctcctggtcccctgggggctgggcctgctcacccgcccgccacctcggcagggtggcctctgcggaggcagtgttggggctgcccctggcctcccgcaggctgctgtaggaagcaatcttgtccctcaggaagagaaggaggtcacaagacttctgcgccacagggcggtcgcagtcaaacaaggcacaaaaggcgaagtcaaagagccccacgtggcagagagccctcagtgcctcggtgagtggctgggctggggccacctcgggtagggccacggcataggggcagtgggtacgcggcggccccaaagtctggcccaggaacacgagggccagctccaggccctgggcgcggacctcccagtccaggtctcggctcgccgcctgcagcacagtggccacgaactgctccgtgtcctgggccgcgtcggcgtggccgtcccgcagccactcagtgaagacttgcatgaccgcccgccgtgggaagccctccgagtctacggagaggatgtgcaggagctccaggaacaggctctgggggacagggagcaagtgcggatggttggtggggtggcaggagcgaggctcccgcaacaggactccggtacatgatgggggctggccccggacatgcagtctagggccacagcccgctctgacaccttcccatgctgcgcagtgagcacacggccctccaatcctcagtttacccatctgtcaaatggaggtaaccatgtctaagtggaggggtgctggggagacagaaggcgaagcgcacaggtcccacacccagcacagccccagggcc

SEQ ID NO: 12563 - DNA, 2392 bp, Artificial sequence
  DNA replication origin
gtgggaccgcaaccttggctgacggccctcttcctcgcagccccagcgcccttcaccgtggccccaggcgtctctactgggggctacagtgactgtcctgcggctctgtgacggctcggctgcccctgcctccagtgtggggggccacctctgtgggaccctggcgggctgcgtccgggtccagcgagcagccctcgacttcctggggacgctgtcacaggggacaggtgagtgtgttctgtacggctttggcgtggggctatccctgtgcccccactctcctttctgctcggaggcacccgggaactgctgtccctctctgtttcttctctggggtgggggctgaggggtgcaggggccgtgcaggaggtttcagctggcggatgaggccttgttctgctccttcccagagttgatggggagggtcctagggtgggggtgggggtggtttatccactcacctctgtctcaggcccccaggagctggtgacgcaggcgcttgctgtcctcctggagtgcctcgagagccccggctccagccccacggtacggtggtggggatagagagcgaggagaggagggaggcagaggcagtgggacccacccctgactccaccccgtcccgtgcaggcctctgcggatggggccttcacacagggccacagagctgctgctcagagagcttcacgatgcaggtggctgcatggggcgggcccagggcctcttgttggtgaagatacatcagcacgcaggggtgtgtggggccgtggggagcaggggcactggtcaggcggcctgcggggaattctggacaagggaaatgaggtggcaccaagacggccctgggcgtgggctttgggttctcctaagcgccatttgtgaatgtgcctactccacagcccctcacggagctgggccctggcaggtacagaccttgtgccacctgccgctgagcagacagcagacaactttggaggaagggcccagggcttcttgggatcctaaggaaaaggtgccctgcgtaattggtcatgttttgatgtagaaatcccgttgcctgggttgtgggtcttctggtgagggctgccaccacctcctcctgctcacagtctgggaagccggttctgcagcatattctgccctattaaaatcagcccaggaggggcgtggggctcacagctgtgattactgtgcgttggggggccgaggtggggggatcaatggagcccaggacttttgaggccagcctgggcaacatagcaagatcccatctctacaaaaaaatagaaaaattagccccaggagtatagctcaggggtagagcatttgactgcaaaaattagccaggcgtggtgatgtgtgcctctagccccagctactcatgaggctgaggcaggaggactgtttgagcctgggaggtggaggctgcagtgaactgtgattgcagtccagcctggatgacacattgagaccctgtctctaaaaaagaaggaagcccagcgttcccttctctctccacttcctgtccccattgctgtccctggagtacgggcagcacaggtgaaggcgagggggacagacagacagcctgcccctccgtctcccgtggccctgcagcccaccctatctgctccaggttctgaagaaggccttccaggccacgctcaggtggctcctgagctcacccaagacccccggctgctctgatctcggccccctcatcccgcagttcctcagaggtaacgcagccccttgcaggggtgaacggagctggagtcgcaggggtggaggcagcaggggctgggtggaatggctcagctggctctgagggcagggtgagcctggccccaaggtcaccctgacctgtcccttcccaccctagagctgttccctgtgctgcagaaacgcctgtgccacccctgctgggaggtgagggactccgccctcgagttcctgacccagctgagcaggcactggggaggtgagtgctggcaggtggaggggctgccttccccgcctgtggggggctcactgagccagggtgcaccagcagcctcttgctggctctagaaacttgggccatgtcggctgcccacaaggggatggaggcagaggccgaggcgacaaggctcggccctcagtcacagctgcatgtggccgtttcgacccccaggacaggctgacttcagatgcgcactcttggcttcagaggtgcctcagctggccctgcagctcctccaggaccctgagagttatgtccgagcgagtgcagtgaccgccatggggcagctgtccagccagggcctgcacgcccccaccagccctgagcatgcagaggcccggcaggtaggaggtggcaggttcctcagccagcaactcccgcctggccatc

SEQ ID NO: 12564 - DNA, 1539 bp, Artificial sequence
  DNA replication origin
acgccaaagccgtacagaacacactcacctgtcccctgtgacagcgtccccaggaagtcgagggctgctcgctggacccggacgcagcccgccagggtcccacagaggtggccccccacactggaggcaggggcagccgagccgtcacagagccgcaggacagtcactgtagcccccagtagagacgcctggggccacggtgaagggcgctggggctgcgaggaagagggccgtcagccaaggttgcggtcccactgccggcgtggatgcaggggtgctgggacttcgaggcatgtggggcgggggacatcagccaaggttgtggtcccactgctggcgtggatgcaagggtgctggggcagcaaggggtggggggcgtcagcctacgttgcggtcccaccgccagcgtggatgctgctgggctgcatgaggaccgggccgcacctaccagcggctgcagctcctccaggtgagccagggtgcggcacaggaggccggcgcaggacgacttggaggccaggagtgtgtccaccgtcgtggcatcgtctgccgtcccgtccagcaagcctgggggccaagccaggaagagctcccttagagagcacttcagcctccccacggtcaccagccaccccacggtcaccacccacagcacaggccaggacctaggtgcagagcagcagctcaccaggggagatggccatgtccccggtcccctttgctcttggagggaggcctgggtgtgattaaagtggggcgggggtggcgagccagctactctcatccatctcccttcccccagccgcagggacccaggttctgccctcccagccctttctaagcagcacacctgggggtccgggggcctgaaccgtggccttcaggacacaggccaggggctggagaaggacctggaaggcctgggtcctcagtgcctgtggactggagacaaacgcgaggtgagtgccgcgaccctggctgcgagacaagttggctgtgctcctaatgtccccagcaagcctggggcaaatcagccagggggttgggacaccccccgagaaacattctctgcaggccactggccaggggatgccatgggacagagtggcggggaggacaggcctgaccaaggagatgggcctgacactcctgatgtccttaggagcagatactgaggggcctccaggagggcctggccatgcacccagagagaggggcagtgcccgctcagggggacagggatggggtgcccccaggtgtgtacagcgtccactctgtgggagggacctgccctcacgtctgggcctaggtggaggcagtgtccccacaatgcattcctgcagggccgggcctgttcctccatcctcccccggtctactctctcctaaacattcggagaccccggagctcagagctggaccctcatggtacccctgggccctgtgggcagcaggtcctgaggtcacttccacccctattgtgagcccacctggaacactggcaggccatccacggccttcccacctgtcctgaccccag

SEQ ID NO: 12565 - DNA, 2015 bp, Artificial sequence
  DNA replication origin
cccgccttggcctcccaaagtgatgggattacaagcatgagtcaccgcgcctgacctatgacactacttaaaatgatgaaaaatgagaaatataaacatctgacagtggagtgattcaattaattatggtctattcctacagcaaataacatgtagtcaataacattaacatattatgtggagaaaacactcactatgatagcaagagagaaagcaagacaccaaaattgtgtttacagtatgacctcatttttttttccccagaaaaatacagctttatgtgttatgaaaaggctgggagtaaattaaaacgttgatggtttaattttcctctttactcttttgttcatgttttaaagaacatgtattactttgttttttttttttgagacagggtctcactctatcacccaggtcagggtgcagtggcacaatcatagctcactgcaacctctacctcccggactcaaaggatcctcccatctcagcctccagagtagctgggactacaggtgcgccaccaggcacagctaatttttgttttttttttttttagagatgacgtctcgctatgttggaccaggctggtcttgaactcctggacttaagcaatccgctcgcctcagcctcccaaagtgctgggattacaggtatgagccactgcatccggcccctactttcataatcagaaagaaaacaaatctgatgtcttaaacacactaaatacaacgagaacaacaataaaacaagtttgttcacgccttctgtagaactgaaccttggggtgccctgatcgtggctcaactggctgaatttcaggctctaactctccagatcattctctcgggcttcatcttaacttgccctcagtctgccacagataatccttaggaagtgaaggaaagacatctgattggcagtttctgcccttcctccaggacaggggagtccccatctggcccctgctccctgtcccagcctctgcgtctggtctctggataggcagtaaacagcagcaccacctccttacctccttcagtgaccgttttaaaccagtccaggagcttctccaaacaggtgtcatctgccaccggctgcctgggatctaccagaacagcacagagagccgggagcagctgggcgcattctgggtccatggtgaggccgcaggccctgcaaaggcaatgtgagagccaaacctcaatgcccactccagacccagctcgctctagtcacagcagcccaccatgcctgctcaggcctgggaaggggccccagaactttcatctcagaccaggagaaccatgatccccagaccagaggtctgtactgcagggatggatgcaaagctttggtctaggtggggccctgagcgctggtggcggggctgaaaggggcagatgagggtctagctgaaaccacaaggcctccggaactcaaagtctgtcacccttggtctttggtgcagtcggggcaacagcgtggtgctggcccaggctgcaggtgggccagagtcaggggcatctttgagttccggggtcagccatgtgtgcaaggggatgtctacccatgccccagggccagcctgggctggaaagtttctgtccctcccagcgtcaagtggtggctgcatttgacgtcctgaagccagcaggggggtgcggaggggaaggggcgcctgtccgtgtgtctgtccctctcagggtcagtggtggctgcatttgctgttctgcagccagtaggagggtgaggaggggaaggggcacctgtccgtgtgtctgtccctcccaggattagtggtggctgcatctgaagccggcgggggggagaggggggcggcggggtgcggaaaggaaggggcgcctgtctctcccaggaccaggtgtgcatccgtgcgtccagcctcgggggtgggcggggtggtcagcggctctgtctaaccggggcaccgtctgccaatgcccgggaaggctgcgtcccgggaagaggaaccctccccacactttgaagtcagt

SEQ ID NO: 12566 - DNA, 1059 bp, Artificial sequence
  DNA replication origin
ggattagtggtggctgcatctgaagccggcgggggggagaggggggcggcggggtgcggaaaggaaggggcgcctgtctctcccaggaccaggtgtgcatccgtgcgtccagcctcgggggtgggcggggtggtcagcggctctgtctaaccggggcaccgtctgccaatgcccgggaaggctgcgtcccgggaagaggaaccctccccacactttgaagtcagttttggccgcgagcgccaggcccgagagtccagaaggggcgccagagcaggcggccacagtcgggctgggaagcgagcccaggtcgcgcacgccccgggctgggctgctccctggcccgcccgcccccctcggccgggtcttggcctccccgcgccccactaccacgacctcgacccccgaaggcccacgcgcctcaccgctcggttgcgtcctccgccgcaaccacccctcgcccaaggctccgcctccggacagtgccacctgccaggcccggaggaggcggaggacggagacggctggcgtggggaactgagactgcacccctggaggccgctctggaagcctcgagggcccagacttgaaggaaggagttcaagctgagaggggctggggacaggcaggcgccaagccggtcgctccgacagatcacccccgccaggcgcctagtggttcatgccgagcatccggtgggtgggcggggcgtctcgagggcggggatctctgaggaaggcgcggggttgtgtccggaggggcggggcttcgcctgcagggcgcccagtgtctgcaccggcgggagcgagaaaactatgtgccggagagaagcgtcctgatccgtgcaccaaagcccttggtcatttagcttcaggttctcaaattaagtcctccgcggccgcgctgtggctcatgcctgtaattccagccctttaggaggcgcagttgggaggattgcttgaagccaggagttgagaccagcctaggcaacaaagcgagaccccatctcttaaaatttaaaaaaaaaaaaaaaaaaaaaaaaaaaggccaggcgtggtggct

SEQ ID NO: 12567 - DNA, 1388 bp, Artificial sequence
  DNA replication origin
tgccatggcagcggggtcgcgggccggcgccagggaaggccccgaggctgcgggcggccagggctgcccgcggattcccagacccggacgcccgagccagcaaccctgaggggcggccgggcagcgccgccaccatgttcctgggcaccggggagccggccttggacacggtaagaacgggcgagggggcgacgccgggcgggcgtccgcgaggcctcggctcgtctccgtcgcccgcagcctcggggccccgcgcaggggccggcccggggcgtgaggacggggcgcacggccgggtgacagctgccattattgttaccgcacaagagcgcgctgcaggccccgcgccgcctgcagcctcgcccgcgcccgctttcgcagaggccgccgcttccaggaagctctccgggacgccgcgccctcgcctctgggcgcctgcgagtctgcggcccgcaggtgacggagctcacggtgtaagtgcctccgggcacccccgatctaaggcgggatccacggatcccgtgtggccccaagccttcggggtgggagggaggcagccccagggtctgggaacccagcttggtcagaggaggcttcctggaggagggtggggcccgatgtactccccagggcgagggtgcatgagccttaggttagttactttgcccggtaaatatctactgtgtgttagagacacgggaataagctgcattccagtgggggggggggggggggcggagggacaaggtaataaacaggtaattaagatcgtgtcagaaagtgagaagtgctgtgcagaaaatgaaacaggcccatatggccgggagccgtggctcaggccggtagtcccccggtagtccctgcactctgggaagccgagatgggaggatcgcttgaggccaagagttccagaccagcctgggcaacatcgcaagaccccatctctacaaaaaaccatcacattagccgagctgtggtggtgcctgcctgtagtcccaactactcaggaggctgaggtgggaggatcgcttgagcccaggaggtggaagctacagtgaactgtgatcatggccctccaaggcctgagagacagagtgaggctgaggtgggaggatcgcttgagcccaggaggtggaggctacagtgaactgtgatcatatcacggccctccagcctgggcaacagagtgaggccctgtctcaaaaaaaaagaaagcccgttgggacgcgggcaaggagactgagcagaagatgggcatgagcctgactatggggagtcctgctggccatgcagggaatttggattttattggagaaacagaggaagcctttggaaggtttcacatcaagggaactgtgctcaccttgcttcctcctaaggagaccaca

SEQ ID NO: 12568 - DNA, 1224 bp, Artificial sequence
  DNA replication origin
tgaataaacttagttttgtgagaaatccactacagagtctttttttttctttttttttgagacagagtctcactctcgtctaggctggagtgtagtggtgcagtcttggcttactgcaccctgcccctcccaggttcaagcctcagcctcccaagtagctgggattacaggtgcgtgccaccacacctggctaattttttgtattttttgtagagatggggtttcaccgtgctggccaggctggtctcgaactcctgacctcgtgatccacccacctcggcctcttaaagtgctgggattacaggggtaagccaccgtgcccggccccgactacacagtcttttttgtccccactcacgtcaccacaaattggtaaagaatttgtccacagataaagattgggaagcactgccttccacctgagctgtaactgaggatgagcatttgaaatgcatgttagccttggatgagttttattgataaaaatgcgaacaaaacggactttcttgtgtggtcatgggagaaaacgcgtggtgcggcaccgtccagccccggtgttggcggtattcgtttaggcgcgcattccgtgggacggggtttctcatcacgggttccgttggtatctagggtgggaccgttcttctctgtgggggacttcctgtctatccagccttccacgtccccacccactaaatgccaggcgtgccctccggtgccctcacgtgacatccagatttccccccacccaccacacacagagccctgagtgggagccacgcagctttccaaatcccccagctcagtgcttccctgggcctgtgcgcggtgtggtgtgcgtggctgtgtgtggtgtgtgtgcagtggtgtgtgcatggctgtgtacgtggggacgtgtgtgcggtgtgtgcgcagtggcgtgtgcttggctgtgcccgtggggatgtgtgtgcggcgtatacacattggcgtgtgcgtggctgtgcgcgcggggacgtgtgtgcggcgtgcgcgcattggcgtgtgcatggctgtgcgcgcggggacgtgtgtgcggcgtgcacgcattggcatgtacttggctgtgcgcgcggggactgtgtgcggcgtatacgcattggcgtgtgcgtggctgtgtgtgcggggacgtgtgtgcggcgtgcccgcattggcgtgtgcgtggctgtgcgcgcggggacgtgtgtgcggcgtgcccgcattggcgtg

SEQ ID NO: 12569 - DNA, 1439 bp, Artificial sequence
  DNA replication origin
ttggctgtgcgcgcggggactgtgtgcggcgtatacgcattggcgtgtgcgtggctgtgtgtgcggggacgtgtgtgcggcgtgcccgcattggcgtgtgcgtggctgtgcgcgcggggacgtgtgtgcggcgtgcccgcattggcgtgtgcgtggctgtgcgcgcggggacgtgtgtgcggcgtgcacgcattggcgtgtgcttggctgtgcgcgcggggacgtgtgtgcggcgtgcacgcattggcgtgtgcgtggctgtgcgcgcggggacgtgtgtgcggcgtatacgcattggcgtgtgcgtggctgtgcgcgcggggacctgtgtgcggcgtatacgcattggcgtgtgcgtggctgtgcgcgcggggacgtgtgtgcggcgtgcgcgcattggcgtgtgcgtggctgtgcgcgcggggacgtgtgtgcggcgtgcccgcagtgtcgtgtgcgtggctgtgcgcgcggggacgtgtgtgcggcgtgcccgcagtgtcgtgtgcgtggctgtgcgcgcggggacgtgtgtgcggcgtgtgcgcattggcgtgtacttggctgtgcgcgcggggacgtgtgtgcggcgtgtgcgcattggcgtgtgcgtggctgtgtgcgcggggacgtgtgtgcggcgtgcgcgcagtggcgtgtgcgtggctgtgcgcgtggggacgtgtgtgcggcgtgcccgcattggcgtgtgcgtggctgtgtgcgcggggacgtgtgtgcggcgtgtgcgcagcttcgtgtggatggctgtgcatggcccttgttttcttcagtcattgcacgtgcagaagagcgacgtggacctgatgagaacgaagctccggcgcctggaggaggaaaacagcaggaaggaccggcagatagagcagctcctggatcccagccgcgtaagctcctggcgcttcacggacggggcaaggggagggtcctcggggcagcatctgccagccagccctgctgggggctacaccgaaggccgtcttcatgtctcaatctgcttaccacagggcacggattttgttcggactctggcagagaaaaggcccgatgccagttgggtgagtatggtgtgtgcaggacagagcctttccccagacgctagttactggggacagccacagagggacgcctttccctgcagcacccacgcgtgaagagcagcaggcaggggggaggctgcggacccccaaacccttctccactgacacctggggacaccacggggaggggggccagcaggctcaccacagaggccaagcaagacactgtaggaaaaacccatcacaacgggcgacttccccctcacacctgagaaaatacattaagcttaacaagcgctcccagcgctttgggaggccgaggcaggcagatcacttgaggtcaggagttcgagaccagccttgccaacgttgtgaaac

SEQ ID NO: 12570 - DNA, 1232 bp, Artificial sequence
  DNA replication origin
accttcctgaaagccactccaggagggaggccagggaatggcagggaatggcagggcatggccactgggtaggcccaactgaggacaggcaccacgagggcagatgtgaacccttgggcaacgccagttcccacatgtgccagcacctgccgcgggccacgcgatgccccggggatggagccgcaaacagaagctcacagacatccctggaggagacaatgctgtgggagggagagaggagctgggtcagatgcgtgacatgtgtcagatggctgtaagtgccatggaggaggggaggaggacacattttggggtgaggcaggtggtgtgtgcagctgcaagcagggttgacaggaaggcacccccaagacggtgacagctgagcgggacctggaaggggcgagatagccatgaagacggcagcaggcgtgggacaggcggggcagagctgagtgcctgggagacacgtggagtgtggcccctgaggcccagcggggcgaggcagggtgccatgggagccttaggggtgctgtgggagtgttaggcagagggtggaggggggccgtgctgcttcccgaggccccctggcttctgtgcagagatggggatggtggcagacagaggcttctgcgcttgtctagtcgggctgctggtggcctggatgggggcagcagtgggtgtggtgaaaggtgttcagggtctggttgcatcttgtagctggagcttagggaaactgcagagagggtgtaggctctgagagggagcagccaggctccaaggctttttgtcccagcagctgaaaaagacagagttgctatttcctgagatgggggaggcagaggggcaggtttggggaaaggccacgggaggtctgagtgtgtgggagtgggggccaggcagtggctgtgtgggggtgcgaggcagaggcctgggctggagaactgagcatgtgggtcaccagcacttaggtggatcgagtgaggtcacctggagtgagaggagcagggggtcaggccctgaacttggcggtatatgggggaggcgaggggcagccagcgaggcagaggggaggagtggctagcgaggggctgtgcatgccaggaaggggacaggctgagaaccgattgttggatttggcagactgacagtcatcggagatcttgatgagaactgtcttaatggcctggccaggtggaatcgggaaaggatgtcaccccgagatgcttggaggc

SEQ ID NO: 12571 - DNA, 980 bp, Artificial sequence
  DNA replication origin
tacccacctccatcccgtctgtaggtggcgtcccattctagaatggattaaaagtttggaacgctctagatgcttaggaaggagcatccaagggggaatggccgagcagcttgcaagctcacagcgatccgtgccttgccccctcctgccctctataccagtggccagcgagttaacagggaagttggcttttttttttttttttttgaagtgcagtctagctgtgttgcccaggctggtctggaactcctgggttcaagccaccctcccacctcggcctccagagtcctggggttacaggcatgagccactgcacccagcagaaacgctcctacacacgggtagccacccacccaggccccagactcctggactgctgctgtgggaatggctttcagggaatgactccagtgtggactcgaggttcctccatgctggcaaatgtctgcttttgcaggtgttttgactgggggaaatggtgagaatactcagagctgagtttgaaggtgaggagagtgaggctttctggcaggtgtgtaagttggtcctgaggctggagagtgaggctttctagcaggtgtgtaagttggtcctgaggctggagagtgaggctttctggcaggtgtgtaagttggtcctgaggctggagagtgaggctttctggcaggtgtgtaagttggtcctgaggctggagagtgaggctttctggcaggtgtgtgagttggtcctgagggcggagagtgaggctttctggcaggtgtgtgagttgctcctgagggcctgtgtgccccatggcttactgcttctcggggtggctgccgtcttgcctgccggggaagagcagacagtgtaagggtgtccgtggtggcagcccctgaggtcagcgtggctgacccctctccctgtggttcatttctgcagacccctctccctcagggccacaggccttggcacctctacctggggatgacgtcaactcc

SEQ ID NO: 12572 - DNA, 1217 bp, Artificial sequence
  DNA replication origin
gcgggacgtgctcactcttgggaaccagtggcctagagctttgggttacaggcatggagagggctttcctgcctcaggcttggaggccaatgttccatacataaaccgccatgtcctctggtgcagctgggctgctcttttaaaagccagcatccatcttgaagctcgctgggtaaatggcaatgcattctcaagccagtgtcttcagctgatgcccagtgtccagtgctggtcaccagtcccctttgctgggtacagcctgcctggctgttctgtggtcctggaacgctgcagtgtggttttgttccatggagacagtaccaagcggagaggcctccttgcccacggccccagggcctgggggccaggggttctggccctgcggggacttaggcaggaggggaagagaagcccatggagccatgggaggggtgagctgtgggcggggcctagtcatgggaggggtgagctgtgggcggggcgagctgtgggtggggcctagccatgggagaggtgagctgtgaatggggctagctatgggtggggtgagctgtggacagggcctagccatgggaaaggtgagctgtgggcggggcctagtcacgggagaggtgagctgtgggcggggcctagtcatgggaggggtgagctgtggatggggcctagccatgggaggggtgagctgtgagtggggctgagccatgggagcagcaagctggtggagtgggctgggcggagctgtgggggctgctggcagggcctaggaaagtagacaactcccgggggagacgaagtagagagtgagtccccaagaaagggactcctgccccagcgtcaagtgccaaagcaggccccatctaccacttcagggtcgacgttggtggcaggtgttgttcacggtgtactgattgtcactgcaacacctccacatcaccttgaacttcaagaacagcagcaaagctgtatctgctatcagaggctgttaggtagtccagctttaaaataacacactctttctctatcccatgccctttaaacaagcagccacaggagatgtcagtctccagggcctggccccactgtgttgacagcagtcacgtctgttgagctgacactgctgaggctgaagctggccccgtgcaggtggctggtgagccacaggtgcagtacccggaggtgtgctctcccctagaggcctgtccccaactcctccccta

SEQ ID NO: 12573 - DNA, 1132 bp, Artificial sequence
  DNA replication origin
atgtgtgtctgggatgaatggtgttttgctcttccagagctctgccggctggcataggccctccccgcccactggctcacagctacccagagacagggccagcacacccttgggtacagatggtgaacctcaggcttgccacaggtcgcccgcaatggggggtggggggtgtgttgcggggggtggtgctggctggaaccctgggctgaattcttttacctgcaggcccaggacccccattttccttcccagacatcccagctgggcctgcagcctggcagggaggacgtgggatgcaggaggccctgccgggcttaatcagttgggctagagtggaggcccagctctggggacccagcccagcctccgtggaccccagaaagccctctctgctccacagggtccctgtgagcacagaaaggctggggcaggaggagatgggggcaggaggagcagggggaggtgggggcaggaggagcagggggaggtgggggcaggaggagcagtaggagttgagaggaggaggaggaggagctggggcaggaggagctggggcaggaggagctgaggccggaggagctgggacaggagcagctggggcaggagcagctggggcaggagcagctggggcaggaggagctggggcaggagcagctggggcaggatttgctggggcaggaggagctggggcaggaggagctggccaggatgtggctccattccagggggaggggtaggtggaatgtgctccccctcccctgcctggccaggcctccttcccctctgcgtctcttggccaacagccaggctgtccccttccgggggccctgggctctctcctccatggggtcagcacgtatgtggttcctcatcagcccatgacgtcccctcccgctcccagcctccccttctcaaatgcaaatccgatcctgttcccacagctctcagggcaaggtcccccagcccggcctctgtgtctctcctgagccctgtcgcccctgccacacctgacccactgtgtctggccaccttggggcccttcccatcctggaggtgggggccctgctcccttttcctctggaaggaggctgatagttccctgggcctggaaggtactcgcctcccccacctg

SEQ ID NO: 12574 - DNA, 1317 bp, Artificial sequence
  DNA replication origin
gatggggcccaaacacagggaattccattgttctggcttccgccccagcatctggaggagcggtccaggcctggccatgctcagctcaggcctggcctctctccggtgcctgcaggcctttggacaaccattcgggagcctcaaccctgccgccttcctggcgtaggggaaagaccctgggagctcctggcctggctgctcccctccctccgtgccagactgcctcagcagtctctcacagactttcccaggcctggtttttgctcacaatccctatttcacttgaaagaaggaagggaaggagagagggaggaagaaagggagataggagggagagagggaaagagggagggagaaaggaaggagggaaagatggagggagggatggaggaaaggagggagtgaggaagaggagggagggagagagggagaaaggagggaaggagggaaagagaggaagggaggcaggaaaaaagggaaagagggaaggagggagggaaggagggaggaaaggagggagggagggaaagaggggaaagaaggaaggagggagggaggaaaagatggagggagggaggaaaagatggagggaaggaaggtggaagggagggaaggagagagggagggaggaaacgagggagggaggaggaaggagagaggaaaggaaggtggggggagggagaaaggagagaaagggagggaaggcaggagggaaggagagaagggagggaggacagaaggagggagggagggaagaagtggggagggaggaagggcccctggaactaggctgaaccctggttccctgaccagcttgtgattctcaaggcctcccatgcaatggcggggaccgggcctcagttgctccgtctgtagagtgggactaaagtccagcctccagccacagtggttgcaggacagatgggaagaaccacacagctctgggcagtgactgtcgggtcaaagcaggtgggatggtgggcggagcttcctccatgccctggcccacactagatcctctctctggccttctctcctttacccttcctggcagctggagggagggacccacggagtttctcttcaacacccggatcccaagcagcattgcacgggggtgaggtagggactctggctgtgttcttccagaaccttcactgtgggccccttattctctccaccctggatcccttttaccaaattcttcctccacaggccccttaggaatagatttcatggcccaaacacactgcaaatattactcagtcatcagtaccttttcatcccataccatcagaggcacagggcgctggccac

SEQ ID NO: 12575 - DNA, 1242 bp, Artificial sequence
  DNA replication origin
ctcggggatgggggccgtgaccctgggagaggagggggccgtgacctggggtccctgaccccgcgaccccgagaggcccatgtcacctgctggtagtcggtgtcctcgggccggaactggctgctagtggcctcccagctcaggtcgaagtggggcagccggtgcaggaggctcacccaccagggcgccgcgtagctgaccccggccatggcggggcccggccgcctccggatgcgcgcggcctgcgcggggctcccttgctggcccggggcgcgggcttcagggacccgtcgacccccgcctggccgcccgcatcatccgcgcgctcctgggcccggcccggcccggctcggcccggctcggctgcgctcggctccgctcggccgcccgcgcccgccgcctctttgttcgccgccgccgccgccgccccctccgcacccccgcccgtccgcccgccggccccgcccccgagcctccattggcccgcctcccgccagcccagcccccgcgcgccccgccctctgtcccgcctcttacccaccattggtctatcccccgccgatcccgccccacagcgtgccccgcccactcgctcctgaacctctattggtccttttacctgatggttttgcccctccactcgcatccccgcccattacccaatggccccgcccctccacgtgtccccgcccttcggccccgcctctgtaccgtcattagtccgccggcagaagctccgcctacttcctcgccttcttggagggacgcctggcccctaaggcgctggaagaccgaccctcagcgctgtaagacccgggccagccagtctttccacgtggccgtgggggctggaaccctggctgcatatgcagctgcgcttcattccatgaattcgctcttcgtttggatctttgcatgtttcttatttgactcgagggtccggcctggtgggctgggctggtcttggcctccccattgcacacacaacagcccacagcccgcagcgcccagcaaggcaccgagtggcctatctgtacaatggacatgatctggattcagggcctggctggggcacctagagctgtgtgatctggggcaagttacttaaccactctgtgcatcggtgtccttgtctgtaaaaggggatgataaagctacgagtgttggcagggcgtggtggtggttcatgcctgtaatcccagcactttgggaggccgaggcaggcggatcacctgaggtcag

SEQ ID NO: 12576 - DNA, 1753 bp, Artificial sequence
  DNA replication origin
ctccccactccgtgagcccccttggccagtggagggcctctccaccatcactgttggcggcctggtgctgtgtcccagcagagacccctccccagatgacccccaggctctgagatcagagcgggtgcctgagcacattgggtgcaggcaggcagagactcctcgcccactcacccccgactggggaatcccactgccaggcttccagtgggtgaatggcctgggccgccgccagccctctgtggccggtaatgaccccctgcttggcggtcaggctgtgggatgtacacagggtgccgtgtgtggccgtgggagaccaggctgcctgtagcccccgggggagggaggcccggcggccaggaagcaccgtgggcctcaggcagggaggctggaagcggctgagcccaggcagacctggggggcggctgggggccctttgcagccctctcccaggggagcccttagcctggcatcatgccaggccccagcaccacccccatcgccaagctactgtcatttgagtgcggggcaggggaccaagctgtgggcatttccttcctgcctagagatccggattccagaagccccgtgaccagggtccctggtcacccggagtttctctctggacggatcatggcagagccccatggtggggtggggatggctttgcttatcaaaatggcttgggaatccggtattccgcgggcagcctagcacctggactcttcagaactgcgttgtctgtggcctcccgcatccagaggagggaggcggaagtggaggagcagggcacctgggagcccactgctcccagcctcgcgctcacttgcacccaggccccccagccgagccgatgacgtttcctaacagatgaggaagggggcgagggatcggcccaggcacgcccagacacagcagggaggagggaggcggaaggattggtataaaatctcacgcctgcgttctagaagcccagccctgggggaccgttcagtgtgggggcaatgcacattcaggaacttctggaacttattccatgctgatggctttgccacttgtccctggaggactctgttgaagctgcaaggagggtgtgcttcactttggaaagttctctgccctgagggtttggcccatttgtcagttcttaagctccggggcagccctggggcgtggggggcggctgtttcctgctgccccttgggctgccacctgcccgagctgccagccacagttggacttccttccagccctccggggtgcctgcattcccacattcgagacaggcagtgagagggagtgaggggcgatgatgtctgcagcccacaagagcctccgggcagtagccaggcccctctgctcagcctgacctgcctggcctccagcagggtgctatggccctgggaggccctggcttctgccccctttcctcccctgccctgcgctctgctctgctgtgggagggctctgactcactctctctcctgcctcatctccacagagcagaattagccactgaataattcacgatgtggaaaccggcctgcctccatcccccgccgcctccactcccggctcttggcgaggggctgtggcgtgagctggtcctggcgtgcgtcctgcccctgcccttccaatactggtgcttttcggcaactgcttggtgtctctgagccttcattgcctcatcctgaatctgggctggccgtgcctcctgtgtagggtcacccctgggaggcaagggccaggagcc

SEQ ID NO: 12577 - DNA, 1022 bp, Artificial sequence
  DNA replication origin
tcacgatgtggaaaccggcctgcctccatcccccgccgcctccactcccggctcttggcgaggggctgtggcgtgagctggtcctggcgtgcgtcctgcccctgcccttccaatactggtgcttttcggcaactgcttggtgtctctgagccttcattgcctcatcctgaatctgggctggccgtgcctcctgtgtagggtcacccctgggaggcaagggccaggagcccccttcctgggagaatgggcagtgggtgggcctgggctgtggcaggcgccccttcctgcctcccctggtgaggagttgctggctgtagtggggggtggacccctcacccatcctgactgagggctccctcttagctgtctctgtgctgccccaacctgggctgtgccctgctggggagtgggcatctgccccgtggttatgggggcggggggatggaggggaggtggggcctggggttgggagttgggggtgtggcacgggggactggcctttgtcctttgctatttctggcccccgtggtctgctgttgggaaccctggtgaaacccccggagggaccagggccaggtcctgtttcaaggccctgcgtgggactgcctgtcactagtcacttttcccacagccccaggaggtggggagagttgtccattgtacagattagcaaactgaggctccgaatcacatagtgagtaagtggtggggccgcagccctgctgtaggtccctcgtccggccccccgaggagccggggtcagcctggagtcgcaggctccccggattcccccacggctgccttgccgctgggggtgtgaccgtgggattagaagctgatgggggctgagggagctgtgagagggcagggggtggaggggcatctggggtcggctctgtgcagctccccagccagtgactgtcgagaggggctcccgtgctgcctgagcatctgagtgaatggggggctgttgttcacaggagggatttggaggcccacaggaggcctgagactccctggtg

SEQ ID NO: 12578 - DNA, 792 bp, Artificial sequence
  DNA replication origin
ggccaggtcctgtttcaaggccctgcgtgggactgcctgtcactagtcacttttcccacagccccaggaggtggggagagttgtccattgtacagattagcaaactgaggctccgaatcacatagtgagtaagtggtggggccgcagccctgctgtaggtccctcgtccggccccccgaggagccggggtcagcctggagtcgcaggctccccggattcccccacggctgccttgccgctgggggtgtgaccgtgggattagaagctgatgggggctgagggagctgtgagagggcagggggtggaggggcatctggggtcggctctgtgcagctccccagccagtgactgtcgagaggggctcccgtgctgcctgagcatctgagtgaatggggggctgttgttcacaggagggatttggaggcccacaggaggcctgagactccctggtggccctgcagctgagctggcagggctgggcctgaggcctctggcgtggcccggggccagtcagtgctgcatagtgagtcctgaatgtcaagtgggtctggctgtcctgccccgggcaggggcccttgagggcagcagagccttctcttcagctagagcatcgcaggcctgcaccctcgctctgtcgcttcttcctgcgtgaccttgggtggtccagacactgtcctgggctttattcgggggaggcctgcctgctcagctcccaccagccctttgtgaccccgtgtcctcaggcagggatcaagttcatgcccactgacctcagcctctctctcgggctgt

SEQ ID NO: 12579 - DNA, 1373 bp, Artificial sequence
  DNA replication origin
attaaaaatacaaaaaattagccaggcttggtggcgggtgcctgtagtcccagctacttgggaggctgaggcaggagaatggcgtgaacccgggaggcggagcttgcagtgagctgagatggcgccactgcactccagcctgggcgacagagcgagactctgtctcaaaaaaaaaaaaaaaaaaatcgtagagtccccggtactccagctcctgtgctgccttttctgtttttctcagcgtctctcaccatccagcaggcttcacagttcacttacgatgatgctgagtgcctgtgttccctcaccaccctgcaggcggcgccaagggcaagggtgcctggtgcttagcagcctctccccaccgggcatgggcgtcccctgcccactgcccctgggcatcagccctctgcaccagggcagtgccatctgagggacgggcttgcctcgcccagatcctgtttggccagggcttatctcgctctgcctccgttttctcatctggcaagtgggagtgggtggctctggcgccgctgaggaagtgatctggacctggaagccctttgatgtacgctgatgccccgagctctgggtggacatgccaggccggtggctgcggaggtcacacctgtttaggctctgcgtaatgcgtgtctgggattgacctgctcttccagtccccagctcctcaccccaggaggagtttccctgcgaggctgtgagtcccagatgtggggtgcagtacagacaggccctcctagagtcatgtcccaccggagcacagggtcgggggagcgagggtgactccagccagggactggggaggcctctgcaagtggagagcagagggagggctcgctggaggagtctgaccagcccggggccaagatgcggctggttgacatggcccccaggccatgggagcccaggggaggccctgtggatggaagtgcagacgtgggcatgggtcctgtggagctctggtcccggggggcatggtcagctgcccctacaggtctgttctgccgttggcctctgagctataaggagggtactggcagggcctgcagtcacagccggtggggtcagcacctccactccattcccagccccacacaggcaagggcagacccagggagccccagagcgtggcttttccaagctccctaacgtttatagacaacccactgagcacagagcatgggtaccgtgctgggactgttaatatgaggccctgccaagtgactggactgtctccgcctccctgtgtgatcttgggtaagccctactgggccctgaggacccctctgtgacatgagctccctgggaccatgagaccgccctgagctgattcagtttcagtggctctggtgcca

SEQ ID NO: 12580 - DNA, 2450 bp, Artificial sequence
  DNA replication origin
ggcaagggcagacccagggagccccagagcgtggcttttccaagctccctaacgtttatagacaacccactgagcacagagcatgggtaccgtgctgggactgttaatatgaggccctgccaagtgactggactgtctccgcctccctgtgtgatcttgggtaagccctactgggccctgaggacccctctgtgacatgagctccctgggaccatgagaccgccctgagctgattcagtttcagtggctctggtgccagccctgggtcctgcccctggagggtgggggtgcagggcccagcagtcctcctgccattgcaggggcggtaggcacttgtgcatggctgaaggagtgggagggtgcccgcccctgatgctctgcagtgcccagattgctggctgctgggcagccgtggacacaccggtgtggctttggaccatggcggctcatttctgggtgtgccgggctggtcagcacctccctggctgggtggaggtggaaaggccgccttcgggtgtggacgtcggccggcttcctggagggcaggacacggcatcctcccactgcctggcaaccgtctcctgggagatccagcagcaatcccattgcccactgtggctgagcctctcatcccaagggggggccaggcaggggaccatctgccccagcagctcccaaggctggggtcccaagagggccacactgctgaagcattgagatgtggggagagaggcgtttctctgcagtagtgccaatgagggcagcgcaggtgtgcctggtggccaccccacaacactgagggccccagctgctgacaccccccagggcacccccaagttagcctctaggtggtccctggccccatgatgaggcgcagccctgtatcagctccccatccctcccccggcacaggaagtgtgtggaggttctggagggctgagccgggggcagggctatgctgaatccagggacctggggttgcagggcctgtgtgctttctctgtagcttctatgaagcccagtttccctgtggatgaaatggggtgagagcactcggccaggcagatcgaatgcagtgccaggagaagggacagctctggggccacgttaccctccctccccgcagcgggtgctgaggaaatgtcactgttgcatcaaattagccacttcctgtgggggtcgcctggcctcgggacaggggagctctggtgtctgttctgtggtctgtcttttgtgttcagagacctggggagagccacactggaaggccgtgcttggagccagacagggctgtgtgtccgatggggcgcctgtatgcagcctgtagcagtgtggggccagccccaccatctcatccagcgtgggggcacgccatggacggtgcccacccctgagtgcagcttctcggtgcacagaccccagacaggatcagactcctgatggggcctcttccatgttcacccctcagaaacactttcatggtcagcaagagggggttcagtcccccacaggctcccaatttccctaccagacctgaaaacctcaggactacagctggggtgggggatcctgccaggactcaggtaggagagttctgggcctgagacggggacgggctctggggtcctggggctgtctcgggctgggggtgaggacagtagctgatgccggcagccccctccccagggcttcgcttcttcgggggagcagcagcactttttttttttttagacagtgtctcgctcttgtcgcccaggctggagtgcagtggtgcaatctcggctcactgcaacctccgccacccgggttcaagtgatcctcctgcctcagcctcctgagtagctgggattacaggcacccgccaccaggcctggctaatttttgtacttttagtagagatggggtttcgccacgttggccaggctggtctcaaactcctgacctcaggtgatccgcccgcctcggcctcccaaagtgctgggattacaggcgtgagccaccctgccctgctcagcagcacttctttctacagaagataaaccaggctcggagaggtggagggacctccctagtggggctgtggctgcaaagatggtggctcaccagcagcgtcctcgtttgtcacccacattctctggctacctccatccagcgcctctccttggggcctggtggggcagacgtcctgagcacctgccctggactctggggacccggtggggaggggacatgtgcccttgctggagccacagaagcctggagtcggttcacccggcccctcctagtggctatggagtcttcatgctgtgcagccttgaggatggcgagaccggggtcccaggtgtggggtccaggcctgggtgaccccaggtgcatcactgaggtggtgggagactccatgcctcacctacaagtcggggatggggcccacctcccagggctgggggcag

SEQ ID NO: 12581 - DNA, 893 bp, Artificial sequence
  DNA replication origin
gcgcggtggggcggggacggagggcggggccagagggggcggcccgagggggcggggctggagtggggtgtgtgtgggtgggcggggctacatctcacgggcccgccctctccagcgccggcatcgcagtgggattctacggcaacggggagaccagtgatggcatccatagggccacctactcgctccgccacgccaaccgcacggtggccggggtccaggaccgcgtgagtggccgcggagttggggccaggagcactcttgctgctccggagccccacgtctgcgcgaggacgggcggggcagccgggactggggctgtgcaggaggggcccagactctggggcgaggcgggcgcgctcccagcctcacgcccgcgggtccggcgcaggtgtgggacacggcggtggggctgaaccacacggcggagcccagcctgcagaccctggagcggcagctggccgggcggcccgagcccctgcgagccgtacagaggctgcagggcctgctggagacgctgctgggctacacggccgccatccccttttggaggaacacggcggtgtcgctggaggtgctggcggagcaggtggatctctacgactggtacaggtgcggccaggccctcttccctgcccgccccacgtgggaaagcatcaccctccttgggccaatttttgctctcagcacctagtacatgaggcctgatgggcagggtgtggcccagggccactggaggtcacaggcagtggctggagttcccctaatgggagcctttctcaagaactgacaccagtccccatgacccagacgctctgaatgccctctggggtgccaggctgctggcctcagctccccctcaagggcccctggcgccccactcccaggccccg

SEQ ID NO: 12582 - DNA, 1122 bp, Artificial sequence
  DNA replication origin
ggccgggcggcccgagcccctgcgagccgtacagaggctgcagggcctgctggagacgctgctgggctacacggccgccatccccttttggaggaacacggcggtgtcgctggaggtgctggcggagcaggtggatctctacgactggtacaggtgcggccaggccctcttccctgcccgccccacgtgggaaagcatcaccctccttgggccaatttttgctctcagcacctagtacatgaggcctgatgggcagggtgtggcccagggccactggaggtcacaggcagtggctggagttcccctaatgggagcctttctcaagaactgacaccagtccccatgacccagacgctctgaatgccctctggggtgccaggctgctggcctcagctccccctcaagggcccctggcgccccactcccaggccccgggtccctgtgccctggcgcactcccaggtttgcctgcaggtggctgggctacctgggcctgctgctgctggacgtcatcatctgcctcctggtgctggttggcctcatccgcagctccaagggcatcctggtggggtgagtctgggggtgtcggccccccgtgggcccaaagcggaggggcagggcaaggcaccatgttaccccttcccccacctcatctgcagatcctagccacaagctctgcggtgggggctgagcgggacccccctgcactgggcctgctctgagatgccccttctgtgcctgtggcctgtgcccctgtggccagcatcccagcacacttgcccccagcccttgatttcctgcaagagtctgcacgtggggcacttgtagcccaggacctgaagcaacctgcccaggtctccgagtgcctggggccacccagagaccaggctggggctccttcctccaccccttccatccttggccctggggcagcctgggttccagccccagctccggctcactaggagggtgaccttgggcaggtggcttattgttgctgggccttggtctcctcgtttggaaggcagagagagcggcagctcctctgtgggaggtaaggtgttgtcactgcccttcaccacgcagctgcacagccatggctggtgcctccctgggccaggcc

SEQ ID NO: 12583 - DNA, 1204 bp, Artificial sequence
  DNA replication origin
tggccagcatcccagcacacttgcccccagcccttgatttcctgcaagagtctgcacgtggggcacttgtagcccaggacctgaagcaacctgcccaggtctccgagtgcctggggccacccagagaccaggctggggctccttcctccaccccttccatccttggccctggggcagcctgggttccagccccagctccggctcactaggagggtgaccttgggcaggtggcttattgttgctgggccttggtctcctcgtttggaaggcagagagagcggcagctcctctgtgggaggtaaggtgttgtcactgcccttcaccacgcagctgcacagccatggctggtgcctccctgggccaggcctgggagagatgggagaacacacagcctccccccacgtggcactcacaggccacagaggagcagaatgagggaaacgtggcatgggccagaggtgatagcaccctggagaggaaaagccggggtggtgtgaaggcctgcagtagggtggtgggggggggtgcagcttcacgctgtgcccaaggagacctgagcgaggagggattgagcaggggcccaagggagtaagggacgcctggacagacaggaaggatgacagtgtgcagtgggttgtggggtcctcagtggggtgtgcaggcctgcagtggggtgtggggcccgcagtggggtgtggggcccgcagtggggtgtggggcccgcagtggggtgtggggcctgcactggggtgtgttttggggatctgaactgggatatgggggactcgtggtgggggcacctgcagtggggtatgcacaggaggcctgtgtatctggatcaaagggagccagatgtgggtgaggtgaggcctcagatgagggagaggccagtgccgtagcaagagctctgagtccccagttgctgagcgagggttcagcacaggagggcttgatctagctgacgttatcaggccccttgggctgctacgtgggcggcgggatgcggggacccacgtgaaagtggacactgttgcctgttcaggagagggacctgggggacaggaggggcggggccccaagagccacgtggccctccagtcctgcttccagctcagatctctgagccccaccccacctaggagagggatccatctgggccctgggctgtgggcagctctggctgaggccaggccacaggaagagc

SEQ ID NO: 12584 - DNA, 1410 bp, Artificial sequence
  DNA replication origin
gtgggtgaggtgaggcctcagatgagggagaggccagtgccgtagcaagagctctgagtccccagttgctgagcgagggttcagcacaggagggcttgatctagctgacgttatcaggccccttgggctgctacgtgggcggcgggatgcggggacccacgtgaaagtggacactgttgcctgttcaggagagggacctgggggacaggaggggcggggccccaagagccacgtggccctccagtcctgcttccagctcagatctctgagccccaccccacctaggagagggatccatctgggccctgggctgtgggcagctctggctgaggccaggccacaggaagagccccagcccatgtgtgggctgacccctgatgtgcactgggacctgccttctggcctgcagcccagcaggtggcacggcccccaccctggcctgggggctgctgactggctgtctctgccccagggtctgcctgctgggagtcctggccctggtcatcagctggggcgcgctgggcttggagctggctgtgtccgtggtgagtggcagagggggtgaggtccccggctgctggacctgggcactgggggagggacgaggggaagccacactcctctcccctcccatcttcccgggcactgggtcccgagagcggtggggacccaccatgggcacagtccacctgtaaccccagattcacagtccaccctcctgagttgaaagcagactccaggggacgggttctacccccgagagcttccctttaggcccagcttggtcaacccctcttgcttgcccacgcccacctcagggctccagcgacttctgtgtggaccctgacgcctacgtgaccaaaatggtggaggagtactcggtgctgagtgggggtgagtctgtgtccacggccgtgtcccagcgggttccccagggttgggctgagccaaaagagtggggtagctgaggccgagacacccctgccctgtgggtccatggtctcagggagacaggtcccaggccaagatgctagtgagcaaacaggaccacctttcccaagtgggaggctctgcaaagaatgacaggaactatgtggggtggcgggtgcccgcgtggcagggggagcggcaggtgacccagggctgcttcgagtagatgcccaggggaggccaaatgggtggcattaaagtacagccagaggtctgggtgcagtggctcacacctgtaatcctagcactttgggaggccgaggcgggtggatcacctgaggtcaggagttcaagagcagtctggccaacatagcaaaaccctgtctctactaaaaatacacaaatgagctgggtgtggtcgtgggtgcctgtaatcccagctactccggagactgaggcacgagaattgcctgaacccag

SEQ ID NO: 12585 - DNA, 1045 bp, Artificial sequence
  DNA replication origin
ccacctttcccaagtgggaggctctgcaaagaatgacaggaactatgtggggtggcgggtgcccgcgtggcagggggagcggcaggtgacccagggctgcttcgagtagatgcccaggggaggccaaatgggtggcattaaagtacagccagaggtctgggtgcagtggctcacacctgtaatcctagcactttgggaggccgaggcgggtggatcacctgaggtcaggagttcaagagcagtctggccaacatagcaaaaccctgtctctactaaaaatacacaaatgagctgggtgtggtcgtgggtgcctgtaatcccagctactccggagactgaggcacgagaattgcctgaacccaggaggtggaggttgcaatgagccgagatcgcaccactgcattccagcctgggcaacaagagtgaaactccatctcaaaaaaaaaaagtagagccagaaggacgctgcatctcttctaagagccccgaggcaggaggcagacccgaggggagaatggagggtgggaggccagtggggctgagtctctgtggcaagcttcgctttattccagggggaggccattggagggagggaggcaggggagagatttgacccatgattgaaggtccctttcaaagcttcctcaggcctcaagggttacaagagtgggtgaggaggatacctcaagcaggagacagcaggggcttgaataaatggagcaaaaggtggacagggatgggctttgagggcggagctggcaggacttcccggtcagttggatgtagggagcgagagggacggagcaggagttggcgtccctggtttcagcagctctgtgctgcgggaccataagctgtactgtgggtgggggagcaggtctggaggtggggggcagggagctggggcatcgggagtttcggccccctcgggaggtttgcgatgtgtgtcggacggcacagaggcaggtggacgtgggaatctggagatcggggtgccgtcagtgtgttaagcttctcaggccccccttgtggaattattgtgtgt

SEQ ID NO: 12586 - DNA, 2214 bp, Artificial sequence
  DNA replication origin
agtcccacatggagtgtgcacacggccgagccagaactggaaccaggagtgtctgtctgcaccagaactgacccccatgggtctgtggccagctccttcctgctggggcctgagcccgtgctgcgtgtccctcctcacagaggccctgatgaggacggggaggaggaggccgctccagggccgcggcaggcgcacgacagcctctaccgcgtccacatgcccagcctgtacagctgtggcagcagctacggcagtgagaccagcatcccggccgcggcccacaccgtcagcaacgccccggtcactgagtacatgtgagttgacgtgggcctagtggggccagcggacacgtcagctgcggctgagagcgcggatctgggctggggctagctcgaggcaaggggctggagaaggggcggcctccgggctgggcagccctggccttgagtgcctcctgccccaggtgaacacggtccaggggccatggagaggccacatggtcacatggaggttccgtgtccagggcacaaggactctgtggccaaggacctcagggcccagctacatggtgaacaggtggctcggagggagtggactctggctgggccaaggtgggcaggggtctctctgtgggccctctctgagccctttgttactgtgctgggttcgtgggacccccagtgagaatggatgtgcccatctgggcacagcgggcctacccatgggccccccgacctgcagctgggactgcatggccagcaggcactcacagcctctctcccctcatgcctcaggagccagaacgctaatttccagaacccccgctgtgagaacaccccactcattgggcgcgagtccccgccgccctcagtaagtcttggggcaggagggtggatggggggctgctcagccttgggggtccgctgttccactgcgtcggtgggctggtgtggcatgtgcagccagtgtgagctctgggggcagctgtgagctgccaccaccggggtcccaggtgacccttcccagctgggacctctctgcaggacgcctgacctgagttgacggggctgggtgggactgccagctcctccccgctggccttggagtgtcctggggccagagtgggcagcctcgggaccagccgcccagggggtcagctctcaggccctttcctggggaaggagagtgggtgggcgggcagatgtggccccactgtggccctcccagcttgtaggcacggccctgcaccaggccctccctggcctcttacctgccattctctgtgccttctggacctgtggggtgccaccgctccagttcccaggggccccggccctgcctccttttctttttcttccttgagtcttttcctgagtgtccacacatggctgtttcagcccaggcctggtgtcccctttgacttcccgcgtaagacacaggcaggaggggacagggtgccgaagagaaggagttggtggcgaagctgggggaccggggagggggcggccgggctaccaggacagggcttgggaggccgaaggctgccttgctcagaaatccccatcccggggccactgtcatggtcccctgtagcacagagctgggcctggggggcctgggaggggccgggcctgtgaggttcaggccacacaggtgcaggcccagtcccgctcggctgccctcgtcctcgccatcacacggcccacagcccactcctggccccacaccctggcgttgaggccacactctctctctctctctctcttgcaccccacccaccccgggccctcctagcgctatctggctgccctggactctggcagccacgcgggctggcagtttaagcccatggacagtgcccgaacgctgtggtagctgttccctcagagcgacaggtactgacccaccggtcccccatcccgcacggccacccgcctgcgcctcccgcctccaccctgcactcactgccgccctcccgtcggcactgagctggggctccatctgtccggctcctgttggcagggccagctctgagtgccacggctcagccagagacttctaatgccggctctgggcccgccagcctcacagtggggttggcaagtccccttccaggctccccctgcccagttgcttggcctctggggactctgccacagctccaagtggccccagccccttctgtcacctcccagtgaggaatccatgcaccca

SEQ ID NO: 12587 - DNA, 2262 bp, Artificial sequence
  DNA replication origin
cccctggagcaccccatgaagaaacgctactgcagccttgactcccagacagctgctccggcctcggctccagcccggacttgggctcacactgccggctctgggccagctaggggcacccgtggagtttgggggtgaggttagtggttagtcccaaggggggacagcaggggctgagggatgttcacagccggctcgggtccagcccctcaggccgggctcctgggatgctgtacctgtcatggatggaaatggaaccaagaagggagggaaggggggtgccagcggtccccctcagcccgcagccccagcctgccctagagatgacaaatgtggttagtgcaaagaacgaaccagacacagctgcccagtctctgggtgggggaagggggtttggcaccaagaaggcggccagcactgggtggcgggtgagcggcccgggctccacgtggcccctgctgtccacggagggctggggcctccagcagggcaggtgctgagggagagagtgaagctggggcaacggagagaggccctgctggagggggcctctggcagccggcaggaggggtgagcctgtgggtgggcgggctgcacaggcgaggagggcactgcagagagatgggcacgtggagggaccacggggtgacctcagggcagagatgagcaggtggcacgtgtccctgtccctcagtggccagcaggcgccagcacagagcggccccagccgtgcctgtgaactaagaaggggtccacagaagtgccgggcgggaggaaggagagctgtggagggaagggccgggcggcaacaacacaggttgggtgcggccagggcttgtaggtgcggcgaccatctgcagagggagcgtgccgggatagtgggtggcgtgcagggctggggcatcggctggcagcagcgttcaggtgtgacccgagttggcggtacgggcccagagcccctgcgtctccactgtgcccctgcggggaggggacaggagggcaagcggcctgcagacgcgtctggggcaggcctggcacggcgtgcgagggtccggtgggtggcccaggtggaagcggcagtgctggcacggggaggggaagttggcacgtggggtgggtggctgccgggcgcggtctagtggctgccgctggagtcagggcgaggctggctcgtggcgaggtatttggctctcatgctggaggtgtactggagggagacaagggggaggcatcagcagggcccctgcatggcgcacgcagccaggggcgccttccgcgtggtcctcacttggctgagccaacagccctgggggcagaatgggacagtacagggtgccctgacagagcctatagggaggggctaaggaggggccgctggctgggggcccctgcgctctaggtctggctgaggctgagggaggggcagcccccgaactctccaggctcaggacaggggatgtctcctctgaggaggggcgtacacacagcctcccatgcccacaccagcggcatttgggcattgggccaggcagagttctgccacccccaggagccacagctccaaggccctacctgcaccttacgcacccaggacctgaaggacacaaaccagccaccctccagggccgggccaaggcctcctccgggctcagggccgggtccacctacagccaggccacagcatgcaggagtacggaggccccagcctgaggacatcccccgggctactctgccccttcacgccatggaaggagggccccttaagccacacaggaggctggagcaatgcagccccccctcccgtgggggacccaactgtgggctcctgggggtcttggacttaggaacagaggcggctgcagggggcgctgtcctgtgcctggctctgcagctggcctgcacctcgtgggtgccctcgtccaggcaggagtgtgaaggtcttgagtgcacgtgtgtgtgcaagagaatgcatgtgtgtgctcacagagaaacccacatgtgcgaggcatgtgctgaggccaaaggacccacaggcctggcacgtgtcaggggccggcggcagtgaggagacctggcaggctggctcccatcccaggagggcttcagaaccccagggccccaggcccatccccatagtccccagactcagaggcacagagctccccgggtccccgagggccctcctgggacaccaagaaggtttcgagcagcctgtggggacgccacggagggggtggggggaggagccacggcccggagcct

SEQ ID NO: 12588 - DNA, 893 bp, Artificial sequence
  DNA replication origin
aggcctcagttcctggatgttaaatcacactggggtgggggaggtcagatgcccaggccgggggggtaaaccaggaggctgagtcttaaggagattatatatatatatattatatataacaaatatgaagtggttcagtacacaaccattatggttaaacacaaaacaaagatcccacaggagaggccctggtcccccgcctgcccccttgtctggggttctggggtccagggggctgcctcaccacccctctcagggctggggcagagctggccccagggcaggagcaaatgttgcttggaactcgaattgcatagtgagatgggtgggtgggcaatgggccaggggctgctcccaaccaggcccattcactaccaaccttgccatgacatgtggggggccctggggtagtggatgcctgctggggagcactctcagtgaggtaagcccctgggctcctccctcttgtccccagggccaccctgtcctcccaacgaggctgtgggcctgggggctgcaagaccccctgtgcagggtgagagtgggggctggccatggcagcaggcaccagccagatgccccagtaggtgtggcgaggtcatgggatggagtagttaggaacacggcaccgaaaactcagaacaaaaatacaaccaatggcaggcgctcccctccacctactgaggtggggtttgaaccccttttgattttccccgtttcctttcttcaaccttggtgagtagaaagtcacagacgggcacacacgcacaccacggtcaggagtcccgagacagcacgaggctggaagccctggcctcaccgcctctcacgctatgtccattcacctggcaggcagcctcacggccatggacagcatttgtgcttctgagcgg

SEQ ID NO: 12589 - DNA, 829 bp, Artificial sequence
  DNA replication origin
cgccggggaaggctttccagggttggggtgggcagggcttctggaatgagtggacgaaggccttgcaaaatgggtggccgaggccgggcgcggtggctcacgcctttaatcccagcactttgggaggccgaggtgggcggatcacgaggtcaggagatcgagaccatcctggctaacacagtgaaaccccatctctactaaaaatacaaaaaattagctgggcgtggtggcgggcgcctgtagtcccagctactcgggaggctgaggcaggagaatggcgtgaacccgggaggcggagcttgcagtgagctgagatcacgccgctgcactccagcctgggcgacagagcgagacgccatctcaaaaaaaaacaaaaaaatgggtgggcgaggcgccgggaacgagatctcggggcatggagtaggaggagcctctcggagcgagtgggcggggccacgctcgctgggtgggcggcttctggcgggctcagggcgtcgctcagggcgtcggtgtgcaaagcagcgatggacccgagggtctggagctgggagtgctgatccgatcgacgtagtgaaagcctcactttgctgtctggacaagtactgccaggggcccgcggggaccgggatcgctgtgcagaggccccactggccctcaggagaggtgagggtgcctggccaggagcagggatgatggaggcgtcgagtggccgggttggagcaatgatgggttccgggccgagctcttcctgagcccccagtggccatcactccccgtccttccagaagcagcatggaggcgggttcccgtgctccccggcctgggggtc

SEQ ID NO: 12590 - DNA, 998 bp, Artificial sequence
  DNA replication origin
atggagtctcactgcgatgcccaggctggcgtgcaatagtacgatctcactgcaacctttgcctcccgggttcaagccattctcctgcctcagcctcccaagaagctgggattacaggcacccgccaccacacctgactaatttttgtattttcattagagacgggctttcaccatattggccaggctggtctcaaactcctgacctcaagtgatccgcccgcctcggtctcccaaagtgctgggattacaggcatgcgccactacacccggcccctaacattcattttaataggattgccctggctgctgcactgggaaggggacagagcaaaagtgggtgaccaattagcagactgctgcaggggggcaggcgagagctgacggtggccgggctgggtgcagggagtgataagagattgggttctggagggtaacaccagcagcatttcctggcagactgggcatgggtgtgggactttgatcgagcaactggctagggggaggggggtagggtattgtcataaactgagatggggagggcacatgattgggtcaggggaggtcagaggtccagtttggggcaccttgagcatattagccatcaaggggtgtgggacggtggtgggatgtacagtctctggggtttggggggagcactggactggagatgctttggcaattggggtctttggcatggatacagtgtttaaagccaccagcctgggtgagattgccaagtgggtgggtgtcaaagaggagacagaggaccaaagactggatctgggcaccccccctgcccacctggtgttcagagtctgggaaaagagggagctgcaaaggaagaggggaaggggtgagctggaaggaagcccaggagagtgggtgtcctggaagacacatgaagacagcatgtcatggagggatggaggaccacgtcaaacgctgctgacggtcaagctcagcgaggactagaatgtagcctgcacgtctggtgac

SEQ ID NO: 12591 - DNA, 1064 bp, Artificial sequence
  DNA replication origin
ggacatgtgggtgggtctcggagggtctcgtgaaatagcaaggcagtcaggtgggcaagagcgggtgggagctgaggagagaggaggaagggtgagccccaggagaggaacagtgggatccctgaggccccctgaggtctgggactccaagtgagactcaacagagggtgaagtggcttttctccagcggtgttcggctgcccaggtgcaggcagtgggctgggtgcagccacgggacaggtcctgccaagagatgatgatgaaggcaacatcgagcccaagaggctcggccctgagtttgccgccaggtgagggtacgcttgggtgggagggcggagatggggagggtggaaagatcatgagggatcatcaggaccggcaggtggaggcagagtgggaggcggggatggctgagggcaaggccacgggcagggccaggcctggagagtgaccatgagtgggggcctgggggagagggtgtttggagggaggggacaccaaggtcaccgagaacagacccctgagcagtgcagaagagggggcgctgcagctgggcacggggctcacacctgttaatcccagcaccttgggaggctgaagcagatggatcacctgaggtcaggaattcgagaccagcgtgaccaatatgatgaaatcccgtttctactaaaaatacaaaaattagccgggcgtggtggcaggcgtctgtagtcccagctgcttgggaggctgaggcaggagaatcccttgaacccgggaggcagaggttgcggtgagccaagatcgtgccaccacactccagcctgggtgacagagtgagagtccatctcaaggaggaggaggaaagaagaaagaaagaaaaaagaagaaagaagaaataagagtgtctgggagtgtgagccaaaatctcctcggaaagagggagcccgtggattcccgcaggaggccaggtgggcagcaggtgacagctcccgtcccagaagccagagagttcaggatgagggtgggaggacgagaagggtccgggatggcagtgagagctgctgtgtggaccgcaagtgccc

SEQ ID NO: 12592 - DNA, 1856 bp, Artificial sequence
  DNA replication origin
cagtggctcacgcctgtaatcccagcattttgagaggccgaggcgggtggatcacttgaggtcaggagttcaggaccagcctggccaacatggtgagaccttgtctactaaaaatacaaaaattagctgggcatggtggcgggtgcctgtcatcccagctactcaggaggctgaggtaggagaatcgcttgaacccgggaggcagaggttgcagtgagccaagattgtgccactgcactccagcctgggtgacagaatgagactctgtctcaaaaaacaaacaaacaaaaaagagactataaactcacaccaatcattacctcgtaagtgcagttagcttaggaagtacaatatttccaaaaaggtgaccacagggagaaaaacatgaagataaccaccagctcagacccagccggggcttgtggccatgcccacctgctcctgtgtgtcctgggcctcgggcaagccactcatcctctccccactgtttccagtctgtaagctgggattagtgacgctgccttctcagttgtgggaacctagaaggcagcaatgggcctctctccctaggttgcaacccggggctggcacgtagtaggtctgtttccagctgccacacacgctaccttaccaggggtccccaggagacaggacagggtgatgggcccatttcacagggggaaaaaccgaggcaaagaaaggcagtggagactcgtgcttctgcttcagtagctcctgccatggacttgacttgggaaccccctcccacaagctctgtccctggcaccctctggcactgttagccagcggaatccagctgtcaccatggcctggttcttagcacccctgggaacttttagagcctctggcctgtgctaactgaggttgggcagctgctggccagggccctagagagaggggtatcaggtagctagtgctgagtaacaaatagctccaaacacatgacttcacatgtccttagtattaaagggcctggtggtactgctgctcattgctaggcctggcaagtcctagctgggctcactcacacatctgtgggcagctgggagctagctagtccaggatggcctcagctagggtgacccaggctccatggccctcttgccttccagcaaagcagcccagcccgttctcgtgctatagcaggagtcggggagagcaggcagaggcacgcatgtccctggaggcttaagctcagaactgggaatgtcattgctgtcacgttttattggccacagcaagtcataagacaggctcagattgaaggatggggaagtagacgccacctctagacaggagttggggcaaagtcacacggcaaagggcgtggtgattcaggggaggagtggggcatcggggacacgtttgtaactgatctaccacagaggggagcccccctttgagaaagtgctcggtgggccttggtgcttacgcagccacggaccaacctgctagatggggccttcagtagggtggcgggacgtcagtttagcctcaggattcgactccgagcctcttgcgagaccacgtcttgggcagcatcgtagacccggctgtgagcacagagtggctcttccagaaagtttgttgaatgactgactaagtcagcccctgtgccaggcagcccagagggaccagcccagagcctccttctcggggtgcaagcctggcttgggactggggggtgtctgcactcgtggagccccccatgcctgccgggagcctgaagacgcagagacctcctgcctcgcctcgcccctccgtggggaccctcttccccacactccttggttcctgtcggagccaagatgtgtcaccatggaaaccgcttggca

SEQ ID NO: 12593 - DNA, 1116 bp, Artificial sequence
  DNA replication origin
acgctggcaggcagaggcggccaacagcagctctcccgatcgagctccgggcgccggctggagcaacgtcgcgggacggcgtgagcgagcacacccggccgtgtgtgacacgcgtggggacagaggccggggcggctgcgggagggcgtgcggggaggtcagggcgccccggcgtgtgtgcgcccacgtgtgcgctcgtgcgtgtgggtgtgtgcgcgcctgtgcgtgtgccaacagtgcagccacatcggagcgcgtgtgctccgagtgtgatggccgcgtgggccggtgcagggtgtgtgtggggatgggggtgtctgattggtgctgtgacctgcggcagcacagccgcctgcgttgagcgcccacggtgggctggactttgcactaggtgctgacaggaccggcagaggtggccactgccctcgtccccagcctgcactcctgggcgaaggctgacgctgaacaggtacttgtaagagtcaccgaagtgcgtgccgggagggttctgggaagaggcagctgtggggcctgaagcctaaatgtggggtgggaggcatccaggctgctgctccaggcagagggcacagcctgggcaaaggccaggagaccagggaagaaaggacagagtctggagcccgggagaggtggcgaggggccatagccctgaaggagcttcatcctggggcttcatccgagttgaggaggcccagctgggggtgaagggtgcctcgtaggcagagggaccccggaggtaggaactagggatgtgaggctggggcagacagagctgagggacgcagctcacagctggcggtagtgagacgtggtctttgaaaggcttcctgttggggcaagtggcttggcagggggtgtgtggaagctggggagtctatagccggcctgggtggggcgggcagttgagagagattttggaggttgactagatgctccttggtgacagtggcacttgaagaaggagggcagggctgggatgatgtggtttcctgggatgggaggcgctgagaaggtctgggtgctggtggcggtctcaccagggggctgcttctggagcccccattaacaggcactcggctctctggggacctgcctggg

SEQ ID NO: 12594 - DNA, 877 bp, Artificial sequence
  DNA replication origin
tgcaaagcaaagctaaggaccctcgcatcggcctgaggcctcctgggcagccattcttcaagggactgtgtgctgggggcccacccggtgtcatctcatgctggacacgagaccctgactcctggagctgcagttcccaccccccaccctgtcctggggtagctggggaccctctcaggcctgaggggaggacaggagctccccagcacgaagagcggggggaggccaagcagggcgagctcccagacaggctcagctggccctggccccggcccagcctccctgtgcccagcctgtgaggccgccctttgagcttctggattagtattcacgtcgggtccccagctctgaaagcccttgttccctccagagagcagccagagcggctggagctgggggcgcgctcagtgcaaagtgacagccccagcacataaactggggcccttagcccgctcccccaggacccctcctccgctgtttgggctcccatgggctcagcaaggctgggggactgggagggaggggccgcctgtccatctctctgtctgtctgtctgtctctctgagtttctatctctgtctgtctgtctctgtctcttggggttcttggtctctctctctgtcaccatctccctcctccctccatccctgtctcctaccctctcatgctgtgtgtagtcaggggccccaggagtaaccccacatgtagtttctccagcaggaaaagacacacggaccaggcacgtggggacgaatctccaatgacatctccctgcaccacctgtccctgtcggggtctgtcttgactctgagctgtctgcagacttccccacagcccccacagttggaccccaacaacaagaataacaaaggcttgg

SEQ ID NO: 12595 - DNA, 1100 bp, Artificial sequence
  DNA replication origin
tgaagacacagagacacagaggagaagacggagatgggagtggtgcagccacaagccaaggacacctggagcccccagaagcaggaagaggcaggaaggaccttcccctggagccctctgcagaagttcggccctgccccagccttgacttcagaccactgccctccagaattgacagtgaatgtgtgctgtttgaagccgcacagctgtggtcatttgtcacggcagccgcaggaaactcatccacattggaaaacaggaaaatgcttcacacgggttttataaggaagaggaaaactctcccggggcattggcacaaggagtcctgggaagcagcagctgctcacccagcaaactcgagccacagaacaggggcttggcctctctgcagctcagccctgctccaaggccagcaggcgagggtgcaggcagacagtgctgtggggacagaggaggacggctctgaggctggcttcaccgcacagcaagatgagcccgggtcaacggcagagatgggggtgtgccaggtggaaggaaccgtgcgagcacaggcctccctgtacagaatgcctgcagggatctgggcaaagatgggtgcaggaagtggggcagggtcagaaaagctggagaagagatgaggccgcatctggggaggggggttgctgagggccaggggctggggggtgaaggggctcggaacacaagcaggggagccgtgtatggcccaagcaggggtttccatggcccgacactgaggtctcctgggtgcagtaggtgacgtccaggaaggaggcaaaggggtctgaatcctggtccaggcaggatgcacggggcctgaccccagcactgcctgcgggacttggggtgtcctagcacagagtacagtcaagccctcttccctgccatgggctccgtgcccgtgcctccgtttccccaggcctccctggagctgtcgctggagcactgtaggaatgcaaagcaaagctaaggaccctcgcatcggcctgaggcctcctgggcagccattcttcaagggactgtgtgctgggggcccacccggtgtcatctcatgctggacacgagaccctgactcctggagc

SEQ ID NO: 12596 - DNA, 1511 bp, Artificial sequence
  DNA replication origin
gcaggtcgccctggcctgggagaggatggcggggagggggcgcgtggcccttccctggcccggccttccctctgcaggacctgccggggctgtgcggaccccggcgcggcgctgcaccaaaccctcgccaagtgcgcccttcgcgtctccgcggtccccgcgcgcccgtagccgccgccgcccgggcgccctcgggacttggtgcgcgggccgggctggacccggagctgcccctacccacccgccccggcacggaggtccctctcggtccctgcgcccccgagtcttccccgcgcgcccccctacctcgcagtcccgcgcccgccggagccggcagaggccgcgccgggcaccgagccccgggcagcagcgtgggcagctcggcctgggccgggaggatcgggaggtcccggtgacgtcggcgcgcggggcagggaccgaggcgggcgggactggggccggtgtggggccgcgggcaggacaggagggccacacccctcccggcgctcagcgtcctgccccactccctccagctgcccgcggtggagctcacgtgggaccctccagcctcccagaaacacccgggcaggggggccccagagcctaaagccaaacaggtgagggaggtcagtcagcccgggccagttcgtgcctccccaggtgagaggagtaaacccggctactctgcaaggcgccaggtgaagaggtgaaccaggccaccagttaaggccccaggtgagaggggtgaaccagcgccacgaggtgaggaaggggaaccaggccaccaggagaggccccaggtgagaggggtgaaccaggctatcaggcaaggcgccaggtgagggggtgaacgaggccaccaggtgaggaggtgaaccaggcttatcagcgaagccccaggtgagaggggtgaaccaggcccctaggttagccctacagtcagtggccctgaggacgggcgccctgccctaccctggccagctgtgagtgcagccctggccctgtgccagccaccaggagatggaaaggactctaagtgcggaaggatgccgtgaaggccggcatgacggctccagacagagcccagaggccttttccataaactgcccttttcctctctgcaaaccctcccagcaccagcttccctcgggcagcctcccaccagctctgcttcaccgtgcagaaatgccccccacgccctcagcagcgccccacagatggctgagggattcgtcaccatcgtcccacaccagtgcaaagaatttttttttttttttagatggagtctcgctctgtcgcccaggctggagtgtaatggtgcaatctgggctcactgcaacctccacctccggggttcaagtcattcttctgcctcagccgcctgagtagtggggattataggtacccatcattgtgtccagctaatttttgtatttttaatagagatggggtttcaccttcttggccaggctggtatcaaactcttgacctcatgatacacccgcctcagc

SEQ ID NO: 12597 - DNA, 1455 bp, Artificial sequence
  DNA replication origin
gggacctcccgatcctcccggcccaggccgagctgcccacgctgctgcccggggctcggtgcccggcgcggcctctgccggctccggcgggcgcgggactgcgaggtaggggggcgcgcggggaagactcgggggcgcagggaccgagagggacctccgtgccggggcgggtgggtaggggcagctccgggtccagcccggcccgcgcaccaagtcccgagggcgcccgggcggcggcggctacgggcgcgcggggaccgcggagacgcgaagggcgcacttggcgagggtttggtgcagcgccgcgccggggtccgcacagccccggcaggtcctgcagagggaaggccgggccagggaagggccacgcgccccctccccgccatcctctcccaggccagggcgacctgcgcgcttcccgatgggagcaaactggggacgggtcgggaatccagggccaagcgcccgaaagaaggcgtttccgggctggggcgagccaggtgggtgcgggacgtccccggggaacctccagggcgccgagaatctcgtcgtgcccagggctccccgcagcctgtgtatgagccggggagggagaaggcttcctcccccaggagactgagggagaaggctgtggatatgatccctgcagggatgtaagacaggtctcaaaaccagaaaagcaagggaggggtgacagagaaatggcaaactttacaaaggacaggggagggcagggacctgggtcctttctgcccccatcacgggagggaaacacttggcagaggagtttggggttcgcaggtgaggagagagaacaggaagccaagagtctggcccggaggccactacccctgcggtctaagcccccggttttccctcctagcgaatggaaactgagaggtgagaaacccccaaaaccatccgtccgtctggttctgcctgaaggtctccgctgtcagctaatgaatagctcgatgcagctgctgggaggttttgcaaagcgcattcagaatagcgagaatcagagcatggtttcttgcccaaaggccaggcatctgcgtggtcagatgggggagcatgagtgcccggagctgtgcggtttagggcagcctgaccttggatacctggttactgggccagtctggcggcccttgttgcttagagcggcagaacctccctgggggggggatgcggacgtgctcttttccagtctttggacaaaaaaaggcaaggggaggaggaaggagaagcgtctgagtttacccatggtattaatagcagcagggctggaactcgggtgctctgggagaggagacgtcctaccccctgtccccgtcagaacatccctgctccaggagcagctggggttccagtgtgaagcgtggctttgaaaccaggccccgctggcccccagctgtgtcgccagggccaagtcacttaacgtctgagcctcag

SEQ ID NO: 12598 - DNA, 1566 bp, Artificial sequence
  DNA replication origin
ggtttcttgcccaaaggccaggcatctgcgtggtcagatgggggagcatgagtgcccggagctgtgcggtttagggcagcctgaccttggatacctggttactgggccagtctggcggcccttgttgcttagagcggcagaacctccctgggggggggatgcggacgtgctcttttccagtctttggacaaaaaaaggcaaggggaggaggaaggagaagcgtctgagtttacccatggtattaatagcagcagggctggaactcgggtgctctgggagaggagacgtcctaccccctgtccccgtcagaacatccctgctccaggagcagctggggttccagtgtgaagcgtggctttgaaaccaggccccgctggcccccagctgtgtcgccagggccaagtcacttaacgtctgagcctcagtttccccacctgaaacaccgcagtggcacctgcggctccgtgtgtggcttggaggacgcaggcatgagacctgttggctgctgtcatgactgcagttagcagaggagggggacacactgtgacagggtccaaaggacagcgagaaacctccatctgggggtctcctttttggagcatggatgggttggtgagtgccagagggtgctgcgaagctgacccccactaaggcggctccctccccgtgggtacccccagggctcacatgcagctctggctctatgtgaggagtggtcttgtgcagaaatgacctggcaggatggaaggactcagctggcagctgacagtggggaccggggttttcctgaatgacccacgaagacgaatgtggccacaaggcttcttgagaggaaatagtatgtgggcagacgtcatgccctggatgcccgagagctgtacccgtgttaagggatggagggagctaagcgttctcattcctagcttggagcctgtcacaccattctccagtctgcactaggaggtggctgtgtttttgtgtgtgtgtgagagagagagagagacagacagacagacagacagggtcttgctctgtcttccaggctggaatgcagtgatgcaatcatagctcaccacagcctcgacctccagggcgaaagcaatcctcccatctcagcctccctagtagctgggaccacaggcatgcacaaccatgcccagctaatttttaaaatgttttgtagagacggggttttgccatatttccccaggctggtctcaaactcctggactcaagcgattgtcccgggaggtggctatttttagagcttgcctctcacatcctgttgatcttccagccgggctagtctggagctggcgtggccactccttcccgggcggctcaggttggctgaaggtggtgttgtgtctctggctgggtttccgatgtagatgctcttgagttacccacgtgcccgccactgcttgcgggtgtgcaaacggcctctgtggtcgtggctcctctgtgcgtgtgctctggtcccctgcaaaacttgtcgctgtggcccttcctgttgctcccattcggtcctccctgaataacttagatgggcctgaggttggcagt

SEQ ID NO: 12599 - DNA, 1428 bp, Artificial sequence
  DNA replication origin
ggtgggagagcagcaccgtcagccctgcgacgcccctgcccgcctgggaccctctccccgggaatcactcgcagacaccggcctgctgggtgaacaaggccaatgtggacctaccctgacagcaagcagagcgtcaggcttagaaaagggatggaaagcatgactttttcaaaagggcaaacaccgagggacacagaggaaagattcatgcacagatgaaaggacagcagtgacaatcgcatatgagctcagggagagagcaggcagggactcaccagggacagggacttctagggttagcgccaggcactgcagctgagcaggcagcacacagagccgagccacctcgctgcaaaatgccagcctgactggggcagacagcaggacacagagccaggctgcatggctgcaaaatgccagcctggctggggcagacagcaggacacagagccaggctgcatggctgcaaaatgccagcctggctggggcagagtagcacacaagggtgcaggtcgaggctggagaggcagcagggagctcccagggcagcccctgaagggatgcacacaccagatcacaggtcaggaggacagatggacaaggaccaagggtagaggccaggagaccagtgagaaatcagctgccaggactccaggccagcagcatcagcctcacccaggaaaggagggaaatgcagagcctggcccagtccccacctcctgacccggcccctgtgtttcaacaacatgcccatgtgtcagtgcgtcagagcttgggacaccaggctctgagccattagcagggaggtggagggaagcgggtagctcccaagctgttggattggctgctgtggggtggtggatgctgagaccaacggacacccgcaggatttgggtcctgaggggcaggaaaggggctgcgtggaccaccagggctggtgacaagcctgcgtggggcaaggccaggcgaggtcagccctgttctggcttgctgtcgagatgccgaaaggcgtggtgcgctggtcagaagcggacaccagccctttcctcctctccgagcccaagggcccccgtcccgtgtgctgtctctgccaggctgctcttggcatgtgagaggcacagagctggccctgcccctcgcgctccccgcacctgcctgggccgttcccttctgagcacggatgcctgttgtctcggccccccattcaccctgggtcccccagactctgccagacacagagctctgaggacagtgaccactctgggccctcaagcccccaccctgctcagcccagcccctcccactatagcatcaggatgagcaccccagccccagggtcaaatagaactgcgttccagtcccgtccctaccagtgaccagctctgccagtcacacaggtcaagggacctctccctgcttccatctcct

SEQ ID NO: 12600 - DNA, 1845 bp, Artificial sequence
  DNA replication origin
cgccggcgggagcgtccatggcccccgggcgccggcggggcgcggccgcggcctgaggggccatgtccggggtggtgcggaccctcagccgctgcctgctgccggccgaggccggcggggcccgcgagcgcagggcgggcagcggcgcgcgcgacgcggagcgcgaggcccggaggcgtagccgcgacatcgacgcgctgctggcccgcgagcggcgcgcggtccggcgcctggtgaagatcctgctgctgggcgcgggcgagagcggcaagtccacgttcctcaagcagatgcgcatcatccacggccgcgagttcgaccagaaggcgctgctggagttccgcgacaccatcttcgacaacatcctcaaggtgacgcgcgccccccgcccagcacctgcacccaggtgggccggggcgctaacccccgccccgggcccctccgtggtccgccgccgcgggcggggacccctggggcgaggatgctggatccagccccgcctgcaccccactcccccccgacccattccccgaggcctgctggcgtcgtctctgccccaccccgtctcgccctttttgagatggggtctcgctgtgtttcccaggcttgagtgcagtggcgccctcacagctcactgcagcctcgacctcccaggctcaagccctactccctccttagcctcccgaagtagtgggattacaggcgcgcaccaccagcccagctaatttttaagtttttttttgtagagatggggtcttgctgtgttgcccaggctggtctcagtctcctggcctcaagtgatcctcctgccttggtctccctcaagtgctgggattataggcatgagtcatggcgcccggtctgcctctgccctctctagggtgcctggggaccgtgggagtgggaactcgggccagcttctggggatggggagtgggggcttggcacttagccccctcctggatgtgccctagcagaatggtatctgtccatttcccactggaagatttgtgggataggagcccaaccggccgtgccctccggctgagcttagaagaagagcagtggagactggacgggaaccagccatgagtctctttttacttttctgtttttttagaaaggctctcactctcttgcccaggctggtctcaagccatcctcccacctgggcctcccaaagtgctgagattacaggtgtgagccacactttctaatacgaaaacttcaaatgtatacaaaagtagagaaaatagtagattgactgtaaagtacctacagcccaactaaagcagtcatcaattctgtgccaatcctattcacctgtgccctccccatggtctccaagcaaatccaactttgtgtagttggattaggaaacgttttaggatgtatatgagtggctaaaagatgaggcctccatgtaaaaacacaaccgcagtaccattagcaaacctaaacattagtaatagctcattatcaccagatatccagtgttcagaattcctccattgtggcataattgttttgtgtgactcgacatgcattgcaatgaatctccagattctcctgtctcttgcttccttttttctcttcgccatatttgtgaaagaagctgtagaagtcggccaggtgtgatggctcgtgcctgtaatccctgcactttgggaagctgaggcaggaggatcacttgaggccagaagtttgagaccaacctgggcaacacagcaagacctcagtgccacaaaaatgaacacattagttgggcatggtggaatgcacctgtagtcccagttgcttgagcggctgaggtaggagaattggttgagcctgggaggttgaggc

SEQ ID NO: 12601 - DNA, 1605 bp, Artificial sequence
  DNA replication origin
gccgtggatgatgcgcatctgcttgaggaacgtggacttgccgctctcgcccgcgcccagcagcaggatcttcaccaggcgccggaccgcgcgccgctcgcgggccagcagcgcgtcgatgtcgcggctacgcctccgggcctcgcgctccgcgtcgcgcgcgccgctgcccgccctgcgctcgcgggccccgccggcctcggccggcagcaggcagcggctgagggtccgcaccaccccggacatggcccctcaggccgcggccgcgccccgccggcgcccgggggccatggacgctcccgccggcgagggcgagcccgggccgaggcaccgccccacgccccgccgctcgcctcaggccgcgtccgccgccgccgctgcagtcgctccgaggcccgcactcgtcgcccggccgccactcgggcccggcggaggggcgggcggcgccgcgtgaggcccggcggattgggccggctgccgtccatctggccgtgagagcccttcgattggctcatctcgccaagggaggcgggcatcccttccggcctcggggcggggtcgacgccgaaagaggcgggatctttgaggtgaaggcgcttctcattggacgcccaggctgaggttctttctttcagaatgaaagggaggcggggtcgcccgggaggcggagcgatcgtccgccatggccaattataattgctctgagtggacatcagacgtgcccaacgggctttggattgggtgttcgggggacggggcgtgacgagaagtgccaggtgtacagaaagattctcccttggttcccagattgggtccgcctgtgagaccaggacctcgcggagtagcccaaaggctgggaaatgctgataagaggttcagctgctcgtcgtattccctccgatgatcttgtttctacactattttccttccagaaacactggagggggatgggccataaatttcaaacacatgcaccctttgagagtggcatgggcttctaggaggctttgcgaaaagctgactaatcactaaaatcaccagaagctcccccaaaagtcttatgtctcacagtgattgagagagtggggtctggagttgctgggcctgagttggaatctccagtcgaccagttactaggtgtactagttgcataactttttttagcagctttccccaccccccccaacaaacccttttggatgttcttagcttccgtttcctcatctgtaaaacgggggtgtcattgacgacattggttatggcttgacattgctcaaatcgtcatgaagatataaactgagaacatgaacttaccaaacacttagcacgtgagctagcccaaaatcagctcttgatagagatcagctgattacagattcttgactctcccagatctactgaatcagaacctcctagaaggagctcaggtatcccttaagattaaaggcgtgagccgccgcgcctggcccagtgtgtagtcttttatctctcgccaccccccaccttttaccctgagtccccaaagtccaatctctgtgcggtgtctgttaactctgctgattatttcttttgcagtgccgaagctttttagtttaattaagtccc

SEQ ID NO: 12602 - DNA, 1314 bp, Artificial sequence
  DNA replication origin
agaggctgaggagtgaggggcggagggtgagggacggagagtgagaggctgaggggtgaggggcagcgggtccaggccatgcagggccacgggaggctgcgacatcttgttctgggtgcatctggaggccactgaaggtggcatggtccactttagggtataaacgcacctctcacctctggacacgggcagggtggcggtgtgggccgggcttctgtctgagaggcgatgagaggcagtctgactccgaatccgtgttcagggtcgagcctgcaggattcgggaaagggttcactctggggttccagagaaccagaggctgggcgcggtggctcacgcctataatccccacactttgggaggccaaggtgggcacatcagctgaagttggtagtttgagaccagcttggccaacatggtgaaaccccatctctactaaaaatacaaaaaaaattagctgggcgtggtggcgggcacctgtagtcccagctactcaggaggcagaagcaggagaatcgcttgaacgtgggaggggcaggttgcagtgagctgagatcgagccactgcactccagcctgggcgacagagtgagactccatctcagaaaaaaaaaaacaaaaaaaaaaaaacgaaaggacggcgctgaggtttggggcctgggtgatgaggacagactggcccttaagtggcttcatctcggatccccgcccctcctcgcacgcacctgcaaaataaatgtcctgccaccattttgcagagggaatcacagactgagagtttaggcccattcattccttttcaccagatactcactgagccattgtgaagggttaggctctggggaacgcagcagtgagcaaaagagacgggcatccccctcgatacctcacacccgttaggctggccaggaccaaaaggacagaaactgacaagtgttgacgaggagggtagacgtcggaacccggtgcacagctgctggaaatgcaaaagagagcggccactgtggaggacagcatggcgatgcccccaaaaattaaaaatagaatactatataatccagcaaccccacctgcgggcatatccccaagagaattgagagcagggtctgtaagagacatatacacgcccgtgttcacagcagcgttactcccaatagccaaaacgtagacgtcacctaagggtcggtctgtggggagtgaatacacacaatagggcccatccatacaggctaggaaggtggcaagagctgaaaaccttgcaaactgttaacaaaaaaagagttgaaacaaagaaacaataatacatttaatgcat

SEQ ID NO: 12603 - DNA, 1277 bp, Artificial sequence
  DNA replication origin
ccatgaacatcactgtggtcagcagagtcctggagtgtccagactcatgtgggggtctcatctcctggatcagcggcaggtggctttcagggctcccgccccgctatagaccccaaccctgcatccaggccccgctgcaggcaccttcacaggagcgggaggtgggtgggctgctgctgaccaaagccgctgtgcccgcagaacaagcactgcctgctggaggctgggatcggctgcacaagagacttgatcaagtccaacatctaccccatcgtgctcttcatccgggtgtgtgagaagaacatcaagaggttcaggtagggctcccagacccctaagggctgtcccctcctgtccctagcaccccaccaagcctccatggatcgcaggaggcctgtgtgcccccacctcatgcaccccttttgtaaaccctcaccaagtacgggactgaccttgcagagctgatgccaaggacagcggccgagatggtgactcacatatggggcgcatcccaggggacaagagctgggagggacggggcggagtgcccatcacccagggtggtccgggaaggcctggggtatccatcagcgagacccatggcagtgaggggggcctaggagatgagaaagaagacgcaatctgggcagcaggggaacagctggtgctcagaccctgagacagatgtttgggcggaatggtgagggacggaggggtgaggggcggagtggtgagggacagaggggtgagaggctgaggagtgaggggcggagggtgagggacggagagtgagaggctgaggggtgaggggcgcaggggtgagaggcagagggtgaggggtggaggggtgaggggcgcaggggtgaggggcggaggggtgagaggctggggagtgaggggcagagggtgagggacagaggggtgagaggctgaggagtgaggggcggagggtgagggacggagagtgagaggctgaggggtgaggggcagcgggtccaggccatgcagggccacgggaggctgcgacatcttgttctgggtgcatctggaggccactgaaggtggcatggtccactttagggtataaacgcacctctcacctctggacacgggcagggtggcggtgtgggccgggcttctgtctgagaggcgatgagaggcagtctgactccgaatccgtgttcagggtcgagcctgcaggattcgggaaagggttcactctggggttccagagaaccagaggctgggcgcggtggctcacgcctataatccccaca

SEQ ID NO: 12604 - DNA, 1400 bp, Artificial sequence
  DNA replication origin
ttctcactcctcccctccccctcctcacttccctcctcccctttcctcccctccttttcttcttcctcatcctcccctccctcctccctcttcttccctcctcctcctccccatcacccctcctccccctggataggtggatggatggatggaaggatggctgaatggatgatgggtgactgggtgggtggacagattgatagataaatgggtgggtggatggatggatggaaggatgggtgggtggatgggtgagtgggtggatggattggtggatggatggatggatggatggatggatggatggatggatggataggtgggtggatggatggatgagtggatggatggatggatggatggatggatggatggatggataaggggatgggtggatgggtggataggtaggtggacagatgggtgggtgggtgaggggtcggtagatgggtgggtggatggatgggtaggtgggtgggtgggtggaacaggagatttatttagactggtgatcagccttgcaccacggtgcctgagctgctttgtccagtgaaaggtattgctgaggtgccaagcacctgctctatgggctgccatggggagtatggagaaggttaaccttagccctgccctcaaggagcttcacagtctagtcgaggggagacgagattcatttaaacatggctggaaggggatcggacatcgagttctgtagagcccagaaggtggcaggcagggcctgagtgggatggtcaacccaaggccacctcgtgctgccctcaggactggcccctctctctgcagatatcgtcacaagagatgagttcctcagaaggcagaagacggagaccatcatctactcccgagagaagaaccccaacgcgttcgaatgcatcgcccctgccaacattgaagctgtggccgccaaggtgaggcggggactgggaggttggatggggccaggaccctccgtgatgatcctcatgaggccacctgggccagggacaagggtgggatgaagagttgttttcacctccccgtggccagacctctccttttccccttgtcccagcagctgccccgtgttaactccctctctgcacccttgttccctgggctctgaagtgagtttttattttggagctttctatttgtgttggcttcctggagctggtgtgtgttcgcattatttaggagtgtgtgtgtctggttgtgataacaagggccagagatagagaacgagctcatcagggcgagagacaggatgaacatgaaggtgacaggtattgcattcaccaaacgaggggaaaacggggcatcacaagggttattggcaacgatgcaaaaaggttgtctgtgtgcaatgtggagtctttggagccagacaatgtgacctaagc

SEQ ID NO: 12605 - DNA, 890 bp, Artificial sequence
  DNA replication origin
gaggggaggagtgagaagttggaggagggagaagagaagagggagaagggaggaggaaggaaaggaaagagggaagaggaggaaagagggaagagaagaggggaggagggaagagaagaggggaggagggaagagaagaggggaagtcgtcctggttcatggctcccgcggggctccccaggtggccgtggctcgccgctcacctgacttgcagatggtgaactccatggcacctcccgagttgagcagcctctgcaccagcgtcttggccagcacggtgggtgtgaagagcacgggccggcggcgctcgcagtagaaggcgcgtaccaggctgtaggggatgaggctgaggttcttgcccagctcgctctcagggtccagctctggcaggggcaggagagggtggcggtcagacccctggggctccgaagaccttccacggaggacggggcccctgggctgggtcctggaagccaccgtcagtgtgaaggcctggctgctgccccgggcatccagtgtctgaggtcacctcgggctggcactgcttggggcttgtgtgccagggaggggaggtgtggtggggggcaggcagagtgtgtgacaaatgcaggaaccttggctgagctctggagggaaagtttgccttgtcagacgatcaaggagggcttcttggaggaagggtagggactgggtacagcccagcggaggggagggcgagggcaaggaaagcaagtgccggcaggcacccacgagacaccaggaccagcggccaaggccttgggtgtctcccaggagcactgggagggacgacttggcctcagttctgctttctcagtccctctgtggctggagtggcagagccacacagaagcccggggttctgatgaagc

SEQ ID NO: 12606 - DNA, 1304 bp, Artificial sequence
  DNA replication origin
ccccgggctgcacctgctgtgggcacctgctctaaacatggtgaacagtgtgggcctggggcgtggggagggcagtggtgccccggacggcacagctgctggagggcaacctttgaaaccaggcctgctggctcctggccagagccgctcttaataagagcctgggattctgccacccagggcagccatcagacaggaatcattcattatcaaatatctgcctcccccagggcctgattttggaagctgagctgacaagcttcccagggcttccccttggggttagaatctctaatcttgggccttctgctgcctgtcagggggtgggcagtgctggatgcagtggctgggaccctgcccggctctgcccgggtaggggttctgggctggggatggggccccaagcctcagctctgcggcggctccagctgctcacagctccctgccctgcctgccgcccgttccccaggctgcgggagttgccaggggctgagaagttgcggcagaattttcacggcctgtgccatgcgcgacagcccctgggaggcccagctcctcctcccaccaagtgttaaattgggaaaggaggcggcaagaaggtgtaaatacattgcgaggctgtggaaacctctctaaataaacataagggaggctggggctgcagcccagagcaggcagcagcgctgctcagaggctgggtcttggggaggaaggcgaggtgggtcagggctggtggggtggatgaggctggggccccgggacggtgctctgcagcaggagagggtgttgggggatgagctggtgccccggatggcactctggagggagagagggtggtggggataagctgggtccctggatggcattctgcagggggagagggtggtggggatgagctctggagggagagtgggtggtgggcatgaactggggtcccagacactcttctgcagggggagacaatggaggggacctgcagatcgggcagaggctgcagctcaccatcttggtgaaggagttggtgatgggcagagatccgcaggagctagggctggcgtccgtgccttcttcctcgtgccccttggctgtcctcacgggagacgagatgggagagacagagaaaggagaagggggccggggagggtttgaggtggaagagagagaggggaggaagagaaaaggtggggaaagggaagtcagagcctcatggcccataggcacatggggctctctggcatcatccccaacctccttctaacgaggtgggtctggggcctcttctctcccttgagggctcactccac

SEQ ID NO: 12607 - DNA, 766 bp, Artificial sequence
  DNA replication origin
cacatgagatggtaaagaattaggaggagtgggaagggcagcagggagtgagcttgggtgatggtaggactcagaaggtccagggattcctggaaggttccaggccgagatggtgctgaaaatctcagggaggaagggcatccccaccaaaagggggtgtggagctgggagatgggacaggacagccacctgtggacactgtactaggaaggggttggcagggtcacaagagggcgcccaggttctaggagtccaggggttcgagaccagcctgggcaacatggcgggaccttgtctctacaaaaaataccaaaaaattagccagacatggtggtgtgcagctgtagtcccagctacttgggaggctgaggcaggaggatcatttgagcctgggatgcggaagttgccgtgagctaagatggcgccactgcagtccagcttgggctacagagcaaggccctgtatcaaaaaaaaaaaaaaaaaaaaaaagaggggcagtgtctggacttctttatcctatgcagtgattctggacccttccgataaaaggcttgcttcctgggactgaggggctgtgtgactgtggcttggtggtggctggcagaggccgtggagttgaagacgcacttgtgattgtagctcctcatagcatgtcgggcatgaaaggccaaatagggtcccgattttcagatgatgatgatgaaaaggcgtgtcaaatgctgaaaaatggagcctcttcgaatccattttaaaaaccgcctttagg

SEQ ID NO: 12608 - DNA, 1063 bp, Artificial sequence
  DNA replication origin
cccacccccggccctgtccccactcccacccccacctccttgccgccctcctcccgaagcaccgactccgccccctccctctcttccttatctttttctaacctttcgcattttttagtctcatttcctgtcgggttttgcatttccctcccccgcccctcccagcctatgacatactttctctccttttttctctcctgcctcctctggccttcggactcctgcccgcgccgcccgcagccccctcccggccctgcagcccctgggcgggcggcgcccctcggaggacggctccgggcccggggggacggagggcctggtcgcctggaggaagccggaggcctgcgtggaggaggcgccccgcgcagctggctggcggagcatgagcgccccaggtaggcgcagcggggatgggggagctggcggagggggagcacgaggcggggagttgggggaagagaagagggcacggggaggagatggggggcatcagtgagatgacacggtggcggggggggcgtcgggggatgggagtggctcccgctggtcccgcgatgctgggggtatccttccctctccatctctgtccccctgccccccttctctctctcactctcctctcccctttttcccttccaaccctttttctccctcactttccacctcgtgtgcctctcctccgtgtctctttgagcgtctctgagtatcaccgcccagcaaagcccccacctcctcctactggacaggaaaaaatcgggggtcaggaggctgcagccccttggtgcacctgccccagagggaggaagagaaacttttctgacacctgaaaggcccggaagtttgcagaccacagcccagcctgactcagaggctcctgggaaggtggggcctggctcagggaggaagggcagccgcaccaaaagtgggtgtggagctgggagatgggagaggacagccccccgcggggactgtactagaaagggggtggcgggggcacaggagagggcccaggttcccgactgaaacccggagcaggtcctagcggcctcaggcctgaaagcca

SEQ ID NO: 12609 - DNA, 1015 bp, Artificial sequence
  DNA replication origin
ctgatgccccccatctcctccccgtgccctcttctcttcccccaactccccgcctcgtgctccccctccgccagctcccccatccccgctgcgcctacctggggcgctcatgctccgccagccagctgcgcggggcgcctcctccacgcaggcctccggcttcctccaggcgaccaggccctccgtccccccgggcccggagccgtcctccgaggggcgccgcccgcccaggggctgcagggccgggagggggctgcgggcggcgcgggcaggagtccgaaggccagaggaggcaggagagaaaaaaggagagaaagtatgtcataggctgggaggggcgggggagggaaatgcaaaacccgacaggaaatgagactaaaaaatgcgaaaggttagaaaaagataaggaagagagggagggggcggagtcggtgcttcgggaggagggcggcaaggaggtgggggtgggagtggggacagggccgggggtgggggtgcttggggacagatcagggagccggagatggggagaccaaggcgagtctcagggcccagcccacctgcatcagtcggggtgaggctggaccagtctgggcatcagtccccacccagccgtgacccccggcagagtccaggtggggccttgggaggggctctctcccttctaggttctccagggcactggctcccgagatctagctgaatttctgaagaaattccagagcctgtcactgcaatgggaggggaacggggtgccccacatcaaatcctgcagcctcctacaccccaagcctctttcctccctcagcccctgttctggaagcttcctgggcatgccgggtggtcagcaccccttcaaaggccttcctcaccccgacagctttggggtccaagacacccaccatcagcttgtgccctcgatgttccggtgaagtatacttgtaagagaaactgtgatttggatgtcatcattttactttatttttattttttgagatggagtctcgctctgtca

SEQ ID NO: 12610 - DNA, 1659 bp, Artificial sequence
  DNA replication origin
ctagctccgaggggtccgccgggcgcggaggagccgccgccgccgccgcccccgcccggcgctgagaagaaagtgcgcccgcccgcacgtcgcggtcgcgctcgccctcagctgccgcggccgccgctccccattcacagcccggccgcacgcgccgcccgcgcccgccgcccgccgcccgccgttgattggccgagggaggcggcgcccgctcccagggcccgccccccaggccctcgcttgttttcaaagtcgcggcgcccgcccgcctgcaattttgtgccggccgcggcgcctggctcgggcggcttcccgcgccggctgcgccccctagggacccgtagtggggactgcaggcggcgtcgattcggcacgcgctcccgtggcgggctcgcgggcgggggtggtgcatcctcgcccggccccgcagcggtgcgggcgcccgagtgggaagggctcaggtgcagcaggacgcgcagatcgtgcggcagcccagggccgagggcggaatagggcgcgccccgagaggcgcccggctaccaccagctagctcagtgcttgggggtgacgcgccaagttaccgtaattgcaaacacgcgcaatcgggtttttaatttctagcaaccaaaggcaccactgggtgcaaactcgcctcctgttcagaggagtggatatggcattgtagaagcgtccaaggtcacttttggccggcgctggaggagggcggggtagggagggacacattgcaggtttcccaccgtggagtgggcgagtcttggggcagggtcggccagtgggagggtctcccagggcgggacccgggagcctgtggggctgggggtggggacgggcgccgacgctcagcatgtggtaagcattagcagagtttatggggtgaactaagcgcactggaggctgaaaggccagcatttttgtgggaggagagctggaggtgacacgcactgcctctggagttggcccgggaggagcctggggacgtgtgatgatggtcgcatgagatcatgtaagagatgaacgcagaggggctgggtgtgagcccagcacggggctgactccccaggaatcacctgatgcagtaggtttattgtcccagccaagaaagaccccgggcgagtggagagcaggtcacagggctggggtctgggataggagccagctcctgctcacagagcgcctatggtatttgtcaaataactgattggtggctcaatattagcctctgtacacgtcccctaagacttaacaatgaccacgtgaacaaaacagggaaactgaggtccaagtacagccgccgaacaggaggtggtttcagaaagaggcctcccatctgccccctttccacaccatgctaggaggggcaaaaaagttaaaggagccacggagtgccctgttctgaggatatagtgagggcgcatagatgggacgagccggaagaggacagctccccaaggacatggggatgagactggaggcagagaggcatgtctgtttttatcttctgttggtagcaaggctgggtttcttcaaacttgcaagattataatgagaacctgctgggcggggggaagcaatacctcctgtgcagtgagcactcactgtaggccagcccagggcagcagcagcagcagcttcactacc

SEQ ID NO: 12611 - DNA, 1163 bp, Artificial sequence
  DNA replication origin
gcctcccgcggagtggccgcgcccgctcggagccgtcccgcctgtcctgcccgcccgtccgtccggcgcggcgctcggggtggcggctgctcggcatggcccggggcgcccggccctcggcggccggtggcggcggcggcggcgcggagccccctgagcgcgcgggccccgggcggccgcggggatccccgcccggccgcgcccgcccctcgctggcgccgcgccccggcccggagccctcgcgaccccgggcggcgcccgagacctccggcggggacacggcgggcgcggggcggtgcggcgggcggcgggcggcaaagttggggccgggccgccgcggctggtgggcgctgctggcgctgcagctgcacttgctccgggcgctggcgcaaggtaggtgcgcgcggggtcgcgggccgggggcgtcgcctcggggcgcggaggcgcgaacttgagcagcgagagtgtgtccggggtccccccgcttcccggcccgggtcgggatgcgccttgctgggggctctagggagcccaggggctcctccacgccagactcggaggagagggaaacggagccccgtagagcctgcaccccgtctgctactttgcgttttattttttttataccgcagtagcacaaacaaaaatttttaagttgaggacccatttctcagctccttaaaaggatgcccgagtccccttcccattgcatggatgaaaaaggggctggtctgtacctgagtcttcgcaccgcagggtctggtttccggtgagtgacatccagaagacttggaaatatcaagtgccagtcgctgtgaaaagccttttccagcccctccccagggcctcgtcctctccccagcccccgcctgctcctgactcccccaagtcccaaagcccgaccccaagtgggtgctgcgcggccggtggagcaaaactttcagtgcccacagcttttgcacttggctttgtttttctccctctattggcttctgtttagaatacagtggtgagctctgaaatagggaaagaggatctgctgaatggaaatgaccttttgaaacgagagatgggatctcttgtgaaacgagctttccttcccaaatctgggcttccctccaccccctccccgcccccgacaaaacccgtaacgtacccctgcc

SEQ ID NO: 12612 - DNA, 2102 bp, Artificial sequence
  DNA replication origin
taagttctattattaatgatgcatttctggtttggtctgctcttgatagtgctagtggtcaccagccctgctattttggcatttatagtgagcacatatcttctgataattatatttctcttttataaaatgttttatatacacatttcttttaatgtgtcagcatagcaaatattttccaaatgtccacaacgtctgaggcattgttgtaagcaatgggaatgctatggtaaataagatgccatatacaaattacattctagtgtgggagagagacagcaagtaagaaagacacttgatagagctgcagagtgttgagtactgtgaagaacacgaagcgcgatgtgaacgtggagatgaaggcatgtgctgtggtcatggaaggccttttgggggaagtgactttcaagcagagacctgattgatatgatgccatgaagggcagtttagggaagggagcagcaagtcaagaggccctgaggctggagtgtctcagggccagcaagaaggtcagagtgcctggatgatagttggctagtgggtgagtggtaggagttgaggctggatcatagccagttagagggtgagtggtaggagatgaggttggatgatagtcagctagggggtgagtggtgggaggtgaggttggagggatagccggttagcaggtgagtggtgggaggtgaggctggatgatagccaactagggggtgagtggtaggaggtaaggttggatgatagctagggggtgagtagtggtaggtgaggttggatcatagccagctagagggtgaatgttaggaggtaaggttggatgatagtcagctagggggtgagtggtgggaggtgaggctggatgatagtcagctagagagtgaatggtaggaggtaaggttggatcatggccagctagggggtgaatggtaggaggtaaagttggatgatagctagcgggtgagtggtgggaggtgaggctgggtgtcagttagctaggggttgagtggtgggaagtaatgttggatgatagtcagctaggggttgagtggtgggaggtgaggttggatcatagccagctagggggtgaagggtaggaggtaaggttggatcatagccagctacggggtgaatggtaggaggtaaggttggatgacagtcagctagggggtgagtggtgggaggtgaggctgggtgtcagttagctagggggtgggtggtgggaggtaatgttggatgatattcagctagggggtgagtggtaggaggtgaggttggatcatagccagctagggggtgaatggtaggaggtaaggttggatgatcgtcagctgggggttgagtggtgggaggtgaggctgggtgtcagctagggggtgagtggtgggaggtgagcctggaaaggtagcagaagtgatccaggatcctaaggtgtgagaaagtgcttagattttattgattttcttttaggcataagagaaggccatggaggattttgagtagggttgggctgtaagcgtgtttgcatttatttacaaaaagattactctccttgctgtctggagaatcaaccataggattgcaagagagatcacgtaggagattctcataacaatctttgtaagtgatgaaggcagcttggattgtaggatcaccctgaaaatggtgagaagtggcagggcttgggttttattttgaaggcgtaatacacaggacttgataatggattagatctgcagaatgagggaaagaggtgaacctacattttgccctgagcaatggggtgaattgtgctatttatgaaaaagtggaagactcagagagagaggtaggtttggggctgaaaatgagccccatttgggctttttatgggctcttcctgatctccttctctccccttgcttttgaggtattaccagctacaggggctgaagaaggagcaatcaggccagggtttaaaggggcactgggactgagccagggaggtagctagcatgagtggtaagttgtttacatgcaggggattgaacaaataagtaaatatattgagggtaaagggaactaggtttatcatcaacagataagggatttataaatgtggaaagggg

SEQ ID NO: 12613 - DNA, 1022 bp, Artificial sequence
  DNA replication origin
gtcgcccctctcagggagcagcatgtcccacgcatgccctcggctggcctgcactgcacgctagtccaccgaggtggacagaacggctcccggaggtgtccacacccacacctctggaatctatgaatatgctgtctcacttggcaagagggactctgcaggtgggattaggtatcccaccttaaaatagggagactctcttggattcgctgggtgggcccaatttaatcatgtgagcccctaaaaggagaggactttctgcagctggaggcacaggggacagcagagagcttccatgtgtgacaagaactcagccgcagctgctggctctggagatgagccagggatgcaggggactctggaacctgaggggacccctggccaggagccagcccccaagccacaagcactgaattccatgaacaacttgaaggggctggcagcagatgccccaccaggtaaagagtccatcccagtgaaaactcgccgtccgagtttccgagccatcgtgctcagcaggagcagggcacatgtgggagcagctggcttcgtgtgtgatgaggagaccgtggagaaggcgtggctcggagggaagatgcatctcacaggcactaaggtgctgcagtcagaggtaaggggcatccttgtcttaccccaaggaaaaaaaaaatggtttcataggtggtgaggcacatcctgattccagagacactaaacatgaaaaatgtgtgtcacataactgattattggtaaatagcgagtgcaatgggacatataggataatagagttatgccaacagcaactaaagccactatttcagagcctctgtgacagacatttttgcatttaaccttcacaatatgagctggtaccatctacatccatctccattttatggatgtggaaactgaggccaacactcattcaagcccatgaatggtgcagtgtagagggtgtagaagggaggtgggacggaagcggagggtgtagaggggaggccagaggggaaggtgtagagggg

SEQ ID NO: 12614 - DNA, 1304 bp, Artificial sequence
  DNA replication origin
ggaggcagaggttgtagtgagccgagatcatgccactgcactccagcctgggcgacagagcaagactccatctcaaaataaacaaacaaaaaacaaaaggtgaaatcgggctggcgtgctggagagcttctttgtggaggtaatggattatctatcatgaagggtgacaatctagctctatgggtttccaggggaaggaacatgccatgagatgagatatttggcccattcagggagtcaacataaaatccgtgttgagtttcatgtgtcccgtgtggctgaccggtgtggagaaagagcacagtagcccagggtgacccgaggctgcacagggagcgaggcatttggcttctatattgcacgcagcaggaacccctgcaggacgtggacaggggagtggcctggtctgggtatatctcaggaagatcagtgttgctgctggcaggtgaatggtttggatgaggaaacagggccggctggaaggctgctgcagtggtcctggcgagaggtaccagtggtctgaggcagagaggaaagggatcagaatcctagttaacagactgataggactgctgatgcagggggtgtggaggtgggggctggggtccagggaaaggaattggggaccattcctagggttctggcagaggaatatagaaatgcggggtgctgggagcagagatttgggtggctgcaggagtgaggtaaaaaaaaaaaaaaaaaaaaaaaaacattaaaaagatggatgcagtgggaagaagttaagctggagaggccgtgagacaacccgatacagatgtcaagttgctgggccccataagtgatcctggaatcctgggtgaaggatacaaatgttcgagtcatcaaggaaaatatgccacttaaaatcacaggagtgcatgcgatttcccaggaagagattccagggagagcggagaggcgtgagtgggtgcacacggcggggcacacgtcacccagccagctgggaagagaagggaaggagggcttggcggctggaggagagccaaggctgtgagtggcccacggaaggagcatgtttcatgtagaagagttccaaggatggcggtaaatgggcagaggggtcctggaaggtgagtcaggaagagggtgctgaacacttgacaccacgtctacaccggagaaaacctcccacagacatgagcagtggcggcgacggtgaactctcaagtcacccaggtggcaggcattgttaacccatttccagctcgccctgggagtgacactgtgcggggcagccctgtgtgcacagccctcccatgggg

SEQ ID NO: 12615 - DNA, 995 bp, Artificial sequence
  DNA replication origin
ctctctcgtcactttctcgctggggacccatcttggagcttcacagcctcgtcctcatccttgtcttgtatgcttcctgacaggcctgcggcgagggtctggcatgggaagcgttgcagggatgcagcagggtccctggatgtgcctagcagtgtagccgctgtggtcacgctctcctcaccgtcagagtgcggggcggccaggagccccgaagcctcagactgagcttccattgtgtgtgcacggctgactccctactctcactgtgcaagggtcggggaaacgggaggcctgtgggaagagctggccctctccctactctcactacacaggggtgtgggggaaggggaggcgtgggggaaggggaggccgggggaaagagctggccgccgtctctaggctgccctcggtcagtcagtgactgggaaggaacaggagtctagcagggacacccttgccagagacctgaggccagcagggccacatccaggaagtctcagaactcccggtccccattgtggggaagacagcccgtccactggaggcagggcagcggctgcgacagccactctgggggcctaagttcagggtcctgcagacacctgcgcctagaggtggctgcgtcatggacagggcagggcgtgtgtccctgtctgtgtggcggtgatgacggtgctgatggtgagcggtgatgcctggggcctgatgtgaggatgcccttgaggtctgatctccgtgtaattgtcctcccacctcccagatggcgggctggggaggggtttgttaaatgcgtggatgagtgacaaggcgcaggagctgggaggatgcctgtgagctcggtcgttcatgaaccagagacctgagagcaggaagagctgagagagggaggggttcacccggaacagaggctgagggcagggggcaagcagcgtggggtcgcccggcagctcctccccacagagggtgagccaccagtgcagaggccactccacgaa

SEQ ID NO: 12616 - DNA, 1075 bp, Artificial sequence
  DNA replication origin
aaagcagggttcccagggacctcacatctgggaccttgtgaggaatgagactggcgggccccaccctggaccgaccgaatcaagggactcactcagtgtccaactgtgaccaaggggggagctgggatggggagcctggtctcttccaggcgccccatgttcttttatagtcagccaatgtactgggggctccagaatgggcccaggaaacggaagggttccccagccaggccatgcgtccagagtggggagaagccagtggacaaacaagggcccccaacctgggttgttttgtggtgggcacagccaggtgtgcagtgagcctggcccctgtgctgcctcccacccacaagcagctgtgaccacagttaacaggccaggtctagccaagctccgacgcttgggccccagctctccaggtggagcgcctgcggggtctgctgctggcaatgcagtaggcaggaccacgtgaacgaggggtgcccaagcgagccaggggaggcaaccgcacgggagggccttgccttgtagccttggatgttcccattctggctctccgggggtggtgggtcccacgtgacctccagctggctggccgtgagtggggtcacctgcacgttctgcggggccatggccggggctgaggaaagagcaatgcggagagaagctgagacgttcattcagagccggcccggaccctcgcccacatgcccatggggctcgagcatgccctaattccgctgggaaccatgtgagagattcttccctgggccgtcgccctggcttaggaggccttagacagttatgtcctgggatccgtggctctgtgtccccctaagagctctcagcccttttatgccagggaagaccacaaatccttcccatacgatgttcttaaatgcatacaataaaatatatagaattgcacagaaaaataattataccgagatacagttagcagagtatttgaaaccaaaggtatgagatcgtaatccacgtgcttcttggttaatacctgaccaggcttaggggctggtctgatggttgctgtgagatcaaagcattggtgggtgag

SEQ ID NO: 12617 - DNA, 1655 bp, Artificial sequence
  DNA replication origin
tctcagaacagtctgaagaaatccttcactttcttagtcccttaatttcaatggctttaagcaacacccagtttataagagtctgtatttggtctttagtgtctattacaacataaaattgtctatctttttagaggaaaaatacaattcattcaatatataaagcccttaaaatagagacttgctcacagtaagcagtaaataaaatagtggtggttattatttattgaaagcctgctgtactaggccctgagaaagcccatgggatacaaagaggaatgcaggggttgggggtgggacagatgggtggatgggtggaaggaagaatggatggataatggatggatggatggatggaaggagggggacccagaaggaaggaaggaaggaaggaaggaaggaaggaaggaaggaagggtgggcaggcagatggatgggaggtggatgagtgggtggctggtgggtgagtggatggatagatgaatggaaggaaggaaggaagggtgggtgggtgggtggattgatgggtaggtagatgagtagatgtgtggatggatggacgaatggatagatggataggtggatgggtgagtgggtggatgaatggatgaatggatgggtggatggatgaatgaattgatgaaggaaggatgaatggatggatggatgaatgaatggatggatgcctggatggatagatggatggatggctagagggaagggaagggagggcaggggagggaaggggaggaaagggaagggaagggagggcacaggaggagagggaaggggagtggagggcagggggaaggaaggagggagggaaggaaggaaagaaggttggttacatggatgaatggaaggaaggaaggaaaaatggatggatggatagaaggaaggatgaatggatggataatgaatggatggatggatgattacttaggaagatggatcatggaaagatggacagaaggatggatggatagatgatagctggagggaaggaaggaagaatggaatggatggatggttacatggatggatgggtggatggatgatgctaagcctgatggtgtgaacagccaggtaaatgtgctgatgtgatttagaagcccattggtggaagcagtcatcccttcctggaacgtggggtggggtcaaggttgacctcaaaaagatgagtctgagggggcaaaaggactcttgattttcctccatcccctgtccacaggctgtgcgtaagtcattagaacagcaatctcatctgattccctgatggatggcacagggtctgatcaaagagtagaccgcatttgtggatgaataagggagtgaggcaggggaggagggggcaacagttctccaggtccagaggaggcctgaacagagtaaatgcacaagccttccctgaccattcttaagccaaactcacatacgacaatataaaccacatacaaccagcataaactacatacagccagcaatctgtgtgtgaacctcagcatcctaggagaaagaaggtaggcttaggctctggcttgccattctgacattattagtggtgatgagtgtcttggtgagaaatggctgtaaatgagaatatttagaaataatggccaggcatagtggctcatgcctataattccagcactttg

SEQ ID NO: 12618 - DNA, 1180 bp, Artificial sequence
  DNA replication origin
atgagtaagaggaggaggaggaaagttaggaggaggaggagagggaagatgaaaaggaggaggagaaggaggaagaggaaaattaggaggaggaggaggagacaaaggagaaggaggagaaggaggaaaattagaagggggagaagagggaagatgaggaggaggaggagaaggaggaaaattaggagggggaggagaagaggggagatgaggagaagaggggagaaggagaagaaggaaaattaggaggaggaggaggagaaaaaggagaaggaggagaaggaaaattaggaggagaagggggagaagagggaagatgaggaggaggaggagaaggaggaaaattaggaggagaagggggagaagagggaagatgaggagaaggaggagaaggaggaaaattaggagggggaggagaagaggggagatgaggagaagaggggagatgaggagaagaggggagatgagaagaggggagaaggaggaaaattaggaggaggaggaggaggaaggaggaagaatagtctagataaatgcattgcattggcattgaagtcatttgcagccattgattttcagaataaagtctggggaaaggccccccaggaaagttgattctgcagtgtttctgtaaatattcactctcctgtccctttccgtctctcaagattcccagatcctctgccactaagttgaattatccttgcatgtagacctgaaatctggttgagaagcatctttactccctgtttgcctaactgagaggcttcacggaaactggatgctattttgatcaaagatcaaattcccccatccctttccaggatggttcacctgacagcaaccaagacccaggttctaagtttacgtgggaaaattgcctcattgactatatgaacccaatgactcacttcagagaacaaagaccttttaagtgtacctaaatcctcaaagcaaggcagaatgcaccacgtaatctttggtgtgtgaatttcccaaacagagcttcaatcacagaagcacagtcttcaagaaaccctgcatatttcacacacactccagcttctgggagggtccattgctcagtgctatcagcccaagccctcggtgtgaaatgaaaaacacactcaacatgtgaaactcaagtcggaccacatgctaaagcagggacagtgaactt

SEQ ID NO: 12619 - DNA, 1029 bp, Artificial sequence
  DNA replication origin
ttaatcgggtgcagcagctgagatgggagctcagtctcaaatccatcttcttgacccactaaaggcctttctttagcagggaagaaatgtaactatgtgtaagaaaacaggaactcagataaaacaaagccaagtttcaagctttaagaacttgatcagatgggtcaacttctatgtttatccaaaaaacaaaaaaacttgtctatgggactactaggttggtttcagagacagaagtagagggagagagagaagagggagagaaggcagggagagagaatgggaagggggagagagaaaagggggaggtaggagaggagagagagaaaggggggagacaggaggggagagagacaagagagagaaagagagcagggagaaataagaaaaagagcagggaatgataagagagagagaggaaagggagagaggagggggagagagaaagggggagggggagagggaaagggggaggaagagagaagggggaaagaggaggggaaaagaggaagaagagagtggagagggaaagggggagaggagggagagaaagggagaggaggaagagagaggagagagagaagagggagagaggaggaaaagagaggtgagagaggggagggagaaagaggatggagagagaaggggagagaggagggagagagagaaagagggagagggagaaaacgaggagagaggaggaagagtgaggagggagaggaggaagagaaaggagggagagggggagaggagggagagagagaggaggaagagagaggaaggagagagaaaggggagtgagaagggagagagaaagagggagagggagaaagattggggatagacaggagagagggggaaggtgagggaagggagagaagagagagaaagaggaggggagagaaaaagaggtgagaggagtgagagagagaggaggtggggagagagaaaaagggcagagagagaagagagagggatgtctgcacatctgatctccaggttcagagagtcaggagttggctgacaaca

SEQ ID NO: 12620 - DNA, 1048 bp, Artificial sequence
  DNA replication origin
tttccccacctttcccccctttctattccacaaaaccgccattgtcatcatggcccgttctcaatgagctgttgggtacacctcccagacggggtggtggctgggcagaggggctcctcacttcccagtaggggcggccgggcagaggtgcccctcacctcccggacggggctgctggccgggcggggggctgacccccccacctccctcccagacggggcggctggccgggtggggggctgacgcccccacctccctcccagatggggcggctggcctggcgggaggctgacaccccccacctccctcccggacggggtggctgccgggcggagaggctcctcacttctcagacggggcggctgctgggcggagggtctcctcacttctcagacgaggcggccgggcagagatgctcctcacctcccagacggggtggcggccgggcagaggcactcctcacatcccagacggggcggcggggcagaggcgctccccacatcccagacaatgggcggccgggcagagacgctcctcacttcctagatgtgatggcggccgggaagaggcgctcctcacttcccagatgggatggtggctgggcagagacgctcctcactttccagactgggcagccaggcagaggggctcctcacatcccagacgatgggcggccaggcagagacactcctcacttcccagacggggtggcggccgggcggaggctgcaatctcggcacttcgggaggccaaggcaggcggctgggaggtggaggttgtagcgagccgagatcacgccactgcactccagcctgggcaccattgagcactgagtaaaccagactccgtctgcaatcccagcacctcgggaggccgaggctggcggatcactcgcggttaggagctggagaccagcccggccaacacagggaaaccccgtctccaccaaaaaaatacgaaaaccagtcaggcgtggcggcgcacgcctgcaattgcaggcactctgcaggctgaggcaggagaatcaggcagggaggttgcagtgagc

SEQ ID NO: 12621 - DNA, 919 bp, Artificial sequence
  DNA replication origin
accatcccatctgggaagtgaggagcgcctcttcccggccgccatcacatctaggaagtgaggagcgtctctgcccggccgcccattgtctgggatgtggggagcgcctctgccccgccgccccgtctgggatgtgaggagtgcctctgcccggccgccaccccgtctgggaggtgaggagcatctctgcccggccgcctcgtctgagaagtgaggagaccctccgcccagcagccgccccgtctgagaagtgaggagcctctccgcccggcagccaccccgtccgggagggaggtggggggtgtcagcctcccgccaggccagccgccccatctgggagggaggtgggggcgtcagccccccacccggccagccgccccgtctgggagggaggtgggggggtcagccccccgcccggccagcagccccgtccgggaggtgaggggcacctctgcccggccgcccctactgggaagtgaggagcccctctgcccagccaccaccccgtctgggaggtgtacccaacagctcattgagaacgggccatgatgacaatggcggttttgtggaatagaaaggggggaaaggtggggaaaagattgagaaatcggatggttgccctgtctgtgtagaaagaagtagacatgggagacttttcattttgttctgtactaagaaaaattcttctgccttgggatcctgttgatctgtgaccttacccccaaccctgtgctctctgaaacatgtgctgtgtccactcagagttaaatggattaagggcggtgcaagatgtgctttgttaaacagatgcttgaaggcagcatgctcattaagagtcaccaccactccctaatctcaagtacccagggacacaaacgctgcggaaggccgcagggtcctctgcctaggaaaaccagag

SEQ ID NO: 12622 - DNA, 1216 bp, Artificial sequence
  DNA replication origin
cagccccggtgcgcagtagggcggtccggctggccacgctgcgcagccagcagtccccgagggtggcggggccggtctcacagccggcgaccccgcgcccgctgacctctgacctccgaccccactccccttagggttacccctcgccggcagccgcgccgtgtgtttataaacagagctcccggcgggccccaaagcccggatcggcggattcacgcgaggggaacggagccttccgcaagtctgcgccggccgcgcatgcgccttaaggttgcgccacgctgctcctcctgcgcttgcgcagtggcggcgcagggcgggccgcgagcagggcccggggcggggccgggctctgtggccgggcaggggaggggcgcggagaggcgccctcgcccttcccagccctgctcctcgccttgcggagggttcacctgctgcgtgtccttgcgcaggccggccactggcctctgagcccgggctctcgcctgcaaagtggggcctctgtgggtggtcgtggaggtgcagtggtgacctggatggagggcggcatcgggccccgcagtgcccccttgggcagctgcacccagcagctaagaggccccctcgagacacatcagtcctagggaggagcataccatgcagtacgatttagccttaaaatgggtggagtgcagtttatgttgtgtatatctatatatctctaatttaaaatttttacttttatttttcagacagggtcttgttctgttgcccaggctggagtgcaatggtggcattacagctcactgcagtctccacctcccggactcaggcgttcctcctacctcagcctcccaaatagctgagaccacaggcaggcatcaccacacccagctaattttttttttcttttttgagacgcagtcttgctttgttgcccaggctggagtgcagtggtacgatctcggctgactgcagcctctgcctcacgggttcaagcgattctcctgcctcagcctcctgaggagctaggattacaggcgtgcactaacacgcccagctaatttttttgtatttttagtagagacggggtttcaccatgttggccaggctaatctcgaacttctgacctcaggtgatctgcctgcctcggcctcccaaagtgctgggattataggcgtaagccaccgtgcctggctatgtttttttctatttttggcagagattaggtcttgct

SEQ ID NO: 12623 - DNA, 1177 bp, Artificial sequence
  DNA replication origin
gactagtctgaccaacacggagaaaccccatctctactaaaaaaatacaaaatgagccgggcctggtggtacatgactgtaatcccagctacttgggaggctgaggcaggagaattgcttgaatccagggggtggaggttgcgttgagtcgagattgcgccattgcactacagcctgggcaacaagagcgaaactccgtctcaaaaaaaaaaaaaaagaaggaaggaaggaagggaagaaagaaaggaaggaaggaaggaaaggaggaaggaaggaaggaaggaaaggaaggaaggaaatggagggaggaagggagggagggaaggaaggaaaggaaggaaggaaggaaaggaaaggaaggaagggaaggaaaggaaggaagggaagggaaggaaggagaggaagggaagggagggaggaagggaaggaaggaaggaaagaagggagggagggaaggaaggaaggaaaggaaggaaggaaaggaaaggaaggaaggaaagggagggaggaaggaagagagggagggaaggaaggaaggaaaggaaggaagggaagggaaagaaggagaggaagggaagggagggaggaagggaaggaaggaaggaaggaaagaagggagggaaggaaggaatgaagggaagggaaggaatgaagggaaggaagggaaggaaggaaggaaggaaagaaggaaggaaggatggatcagggattcagggatggatctcaagtggtcttcagttacagtagagtatgatgacctttaatctgagggcttaagaatgatcaggcctggcactgtggctcacacgggtaatcccagtgctttgggaggtcgagatagatagatcacttgagaccaggagtttgagaccagcctggccaacatagcaagaccctgtctctataagaagtaaaaaaattagctgggcgtggtggcacttgtgaggcagaggcaggagggtgacttgggcacaggaggtggaagctgcagtgagctatgattttgccaccgcactgcagcctgggcgacagagcgaggttagaatataaacatatgtattgtatataatacacatatattttatcttctgtctatcttacactttagggttgggggcctggagtgtctggggcggggagactgctgaggtcatccgtccctttctccaatgaccca

SEQ ID NO: 12624 - DNA, 1186 bp, Artificial sequence
  DNA replication origin
ctccagaggaaatgagtaattaaacaggctttctcctgatcaacagaccttgaggtccggggcagagcagagggtgcggagggcagtggagctggaaaggagggaaccggaatgggcgggaggtgaccacgggatgctaccaaaggcaccgacaggcctgggcagccgtccaggcccagctgggtctctctgccctggtgacctcgggcccgggggaatctaatttgatcttggggtcccgctactccatccaaggagcactagttggggatgtaaactgaggcacaggcttcctgtcctcgcccctccccgccaggcctctgctccttcagcacagcccacactcctagggacctcgcacttcccggagcaacaccctcccactgtcctgggtgagtgtgttggggtcccccaggacccagactggatggggtgggggtggcccaagggtccagaccagacagggtcaggggtagccactggggtccaggacggcaggcatcaggcactggggtgacttgaggccctggctggtgggggtcgggggtggtcctgagaaccaggtcaggctggggtgaccctggagtccaagctggtgggggtccagggtgacctggaagggttgagggtgatccccaggcccaggcagcagggactggggtcaaggtgacctcagtaacccagctgggtggagctggggtgggagtggccctgcgagcccaggcttgtggggttagcggtcaggggtgactccgggggggcctaggaagtgggggtcgcggttaaccttgcgtgtttaggcagggtagggacgtagatgaccccagggatccaggccagtgggagttcagaatgaccccggagtccaggccgatgggagctggggagcagcagggatctgggtcaggggtctaagaggcccagccagatgggcttggggtatgggtggctccaggagcccaggccggtgggagatgaggtcaggggtgaccccaggagccgcaaggtgtgggtcagggctgaccccagagtccaggccggtgggggtcgggggcgacggggtatccagaccggggaaagtggaggagatcctcaggctggagcctccaggatcggggtcggggtgatcctagggagccaggaggcgggggtcggggttgaccccggagtccaggccggtcggggg

SEQ ID NO: 12625 - DNA, 1457 bp, Artificial sequence
  DNA replication origin
gtggaggttcacttgaagccaggagttcaagaccagcctgggtaacatagcaagaccctgtttctacaaaaaaaaattttgttgtggtcagctggatgtggtggcatgcacccatagccccaactacttgggaggctaaggcaggaggatcacttgagcctgggagttcagggctgccgtaagctatgatggcaccactgctctctagcctgcgtgacacagcaaggccctgtgtcccaaaaaaaaagagaaaagaaatacaaaccagcagaatgggccacctccaaaaagccagtacagtgggaggggccccagacatgtcactgtggcctgctgtggccacgggcagggccagagcctgagcctgggtccttctcaagacccagtgctgctcttggaagcgggtgagtacagaggccagtgagggcacagcaggttccgggtggaggtgctccttggaagctgtgtgagaggggctgtgggtgtctccattttactggtttggagctggcttacataggcgtcacaaaacagatgtctacaagttttcattttatgaactattttaagctgattgcttgatttttctttatcttaatagagattaaaattggttggtttgtgtctggcttgtatgtgcagcacatccccaggtgaagggcaagttgtacgtggtgggaggcgcatggctgggaggcgtgtggctgggaggtggtggctgggaggcgcgtggctggaaggtagtggtgggaggcgtgtggctgggaggcacgtggctgggaggtggctgggaggcgtgtggctggaatgtggtggcgggaggcacgtggttgagaggtgcgtggctgggaaggcatatggctggaaggtggtagcgggaggcgtgtggatggaaggtgatggtgggaggtgcatgactgggaggtgtgtggctgggaggcatgtggctggaaggtggtggcgagaggcatgtggctggaaggtggtggcgggaggcatatggctggaaggtggtagcaggaggcgtgtggatggaaggtggtggcgggaggtgcgtgactggggaggtgtgtggctgggaggcatgtggctggaagatggtggcgggaggcatatggctggaaggtggtagcgggaggtgtgtggatggaaggtggtggtgggaggtgcatgactgggaggtgtgtggctgggaggcatgtggctgggaggcatgtggctgggaggcgtatggctgggaggtgcctggctgggaggcacgtggctgggaggcagtggcaggacgtgcatggctgggaagcaagtgtctgggctgcgtagctgtaaggcaagtgtctgtgaagcgcatgacgggaggtactccaccctagccccagaggcagggcccttccctgcacctgacctcactgcccgcctggtcctggtggcctccttgtctctctgagcattgcagcttc

SEQ ID NO: 12626 - DNA, 1729 bp, Artificial sequence
  DNA replication origin
atttcattccaagtaatacgttttctttctcagactaaatttgggttggttaaagctaaggtatttaaaatactgttctaggccgggcgcggtggctcacgcctgtaatcccagcactttgggaggctgaggcaggcagatcacttgaggtcagaagttcaagaccagcctggccaacatggtgaaaccccatctctactgaaaatacaaaaattagccgggtgtggtggcaggcgcctgtagtcccagctactcaggaggctgaggcaggagaatcgcttgaacccgggaggcggaggttgcagtgagccgagatggcacccctgcactccagcctgggcgacagagcaacaaaattctgtctcaaaaaataaataagtaagtaaaatattgttctaaaaccctagtaattttcttcccaaacctatttcacccatgggattttcctctagcaaacctattttttcccagtgccgacctcactttccccacttgtccgacctgctgcccaggcgtcgaggaaatcgattgtctcgttggccgagtgtggtgctgacttggttcctgtcccgcaggcctggaggagaaacccaccattgcgtttgccacaatccccgcggctggtggagtcatccagacggtggccagccagatggcccccggggtccccggacacacggtcaccatcctgcagcccgccacacccgtgaccctcgggcagcaccaccttccagtccgggccgtgacccagaacggaaagcatgcggttcccacgaacagtttagccggcaacgcttacggtgaggccctggccctgttctccatgccacatcccaagctctgtggctcccagtagtcagtgcggcatgagaatgttctcccagtatctcccgatcctccactcagttcaatttattgagcacctgctatactccaggcactggggtaatgcaaagaaaaagagggtggaaggggccacctatcatcccagcaccttgggaggccaaggcaggcagatcgcttgagctcaggagttcgagaccagcccgggcaacatagcaagaccccatctctacataagattcaaaaacttagccaggtgtggtgttgcacgctcatggtcccagctgcttgggagagtgaggctgtagtcagctgtgattgctccgctacctgccagcctgggtgactgagcgagaccctgtccctttaaaaaaaaagtggggggaaagaaaacagggtggaaggaaaacccagatctgcccactctctggagctcacactccatggggtgaggcaagaggtcaaaggaaggaggagagttggggtgctggggtgcaagggtgctgggcgggggtgcagggtaccagggcaccgggcgcattgtcagtggggtggctcagggcagtgcatctgtgtaaaggagtgaggcaagccgtcgatgtccagcaggatctagacagcaatgagaggggcctccacccaacaggctggagccagcagagacagggcagatgaggtggggaggggacggcagggcccgcagggagcagagcaagggtagccgtcctgcctggcaggggtgcactgacctccggttccggcttggtggcttagcccctgtataggggacttgaaaaaagcagctgggtcctaaccagaccccagagtaaccctcttcttcctccactccagccctcaccagccctttgcagctccttgcgaccca

SEQ ID NO: 12627 - DNA, 1024 bp, Artificial sequence
  DNA replication origin
cctctcccaaagccccaggcgcccaatttccgccgaaatgctttccggggtcgaagggcgccggggctccagagtgccgaggttccggggtcgcgcgattccgcagctcccaggcgccgacccggacccccggccgcggcacctacgccccgccccagtcgctccacgccaaagcccattggtcggcaacctgtccctcctgctcatgtgatgcggcacgtgacgcagccacgtaaggccgctgcgctcacgtgacgcggtcccggaagttgaccggggtgcggagctcctgggctgcagctcctggagtttccgaggttcgtgcgcgtctggtggcggcggcgtgatgttctcggcaggagcggagagtttgctccaccaggccaggtacgggggagctgcggccccggccctccttcctgcatctctccctaggggcacacgggggtgggtctcacagggcaggggcttgggcgccagccttgcaggaacccgactggactcgccctcgagacttggggatcgggtaaggcaacacggcggccaggcttggggtgaggaggtcggggagggtcatggtgggtccccggaggaggtgacacttgagcagagtcttggtgagtgaaagcaagtggggtgggacccagtcgacagtttagtcaaaggcttggcggtgagaactccgcgtctggcaggaaatcgggcagccgggagatttcagtgcctcacagtcaagaacgcaaagtcacagtgtccggaggcctgctaaggaataaggctgtgtgccaggctggggagctggaggccatccgagggctttgcggaaccgtgggagggttttgtgacttaaaaagatctctcttgcgcggatgtattagctaggctgagaaatcaccctccaggctggtttcaggctgtgtctggactcccagtaacgagtgagtagctccttcctcaccaactaaccagtcatgggggaaaacagtgtaagccaggactgaacagactcacggtccaccaaaca

SEQ ID NO: 12628 - DNA, 901 bp, Artificial sequence
  DNA replication origin
tagctccttcctcaccaactaaccagtcatgggggaaaacagtgtaagccaggactgaacagactcacggtccaccaaacaggcaaagacttcatactacatgtttaaaagaagaaaatgctgaccgggcgtggtggctcacgcctgtaatcccaccactttgggaggccaaggcaggcggatcacctgaggtcaggagttcgagaccagcgtgcccaacatgaggaaaccacgtctctactgaaaatacaaaaaaaaaaaaaaaaaaaaaaattagccgggcgtggtggtgggtgactgtaatcccagctactcgggaggctgaggcaggaggattgcttgaacctgtgaggtggaggttacagtgagctgagatggcgccactgcactccaggctgggggacagagcgaaactccgtctcaaaagaaaaaagaaaaaaagtaaagaaaatacagccagcactacagccccttggtaaacgtaaacaaacttggtgaggtgagaggccgaagcaggagaagtgcatgaacccaggaggccgagggtgcagtgagccaagatcgcaccactggactccagtctgggtgacagaacgagactccatgtcaaaacaaacaagcaaacctggactcagagctagaccaattggtgggaaagattcgggtggttgaaattgctgtgattatagtgagtgaggtcttgaaggcaggttaagttctaaagcccgaacaggacaaaaatctctgatcaaaataacccttaagagtccactcattaggaagaggcttggtgaatatgcagcaccatctcccagcagctcaacataggcaaccttcccttcaatcctggacagatatgtcattcatgtgaatgtggggactatatgaaaatgaaaaatac

SEQ ID NO: 12629 - DNA, 897 bp, Artificial sequence
  DNA replication origin
tgccagagaccagctcccccatttcggaagtctgtgtgacactcctgagaagcgtcggtcgctgagaccccggcctagcaggtggcagggaggatgtcccgcgcaggcccaccccgggccacaaggtgcctgctccgcctccagcctctctccctgggagctgcatcgctgaggctggagggggcctgggtgagggcacggctgattcaatgctaaaaacacactggcggccaccatggccctggccgcagacacaggacaccccgtcctgcggggcctccagtgtggatcccagtctttaaaccacccacctcactctgcacacccaggtgctgaaacatctgagcagcaccagagacacccagcacaggggcagggccgtcagggcagggaggagggcggctgggtggctgggaggccacgtgccgggcggggggtgcaccgctggcgcctggcagcagttctgcaagatcatcttccactgaaaaaaatgagttgcttgaggagaagggcgggtgaaacaaacaagaagagccggagtcatcttgttccaaaggccaggagctaccacagcattaccggggtcatctcggaggcctggaggtggcctgcaggaggtctgtgaggtgagggggctgggcaccaaccaggatgaccccagtgatgaagtacaacgccctgagtacgccggggcccacaagctctcgcccacacagaactaaagcaaccgcaggctgcaccccagcacaggaggcaactcatgacgctgcaggctgggaacggagggaaaagcccagctccatcgcaaccttcctgcagactctgcacccctgggcaacccatgagcagagatagcagcttctctcacacaaaggcagcctgtgaacccctggatcc

SEQ ID NO: 12630 - DNA, 2064 bp, Artificial sequence
  DNA replication origin
cacacccgggacagtaaagccatcgggacaaaggctggcgtgggctgagggcaggaggcctgtggccggtcccaggcctcctgcttcctgggctcaggctcggtttgtccatctgcaaaatggagcacccacagggccaacctccaagcttatgagggttgatgtgggcagcagagagagctgagaccaggccccgcccccggcagacccgtggtgcagaagcagggcctctataatggtgatgacggggacgcagccttgtgtgggacacaaagcaccctggcctcagcctagggctgagcagtgagccccaccccagtggctgtggccgggctctctgagccactggtggccccctggccctagggccccgtacctctcagtggcgccactggccttggggcgcagcaggtattggaaaagaccctggaactgcgggtcccggaaggcctccaggcagctgggggccctgagagaggtgtcccagagtggcctctcggatgcagccggtgctgacctgcgtggacagacgcccaaggccaggctgggatgcggcccctgcactcaagggcacccccgtcagggagacacacggcaggtgtccctaatatcacagcacctcgggtgccaggaagggcttggcatgggaggctccaggcctgggcgtgaagacgggtgaggcactccagggtgcaggggctgcccttggcaagtggccaagggtgacagacacaccctgtcctagaggtggctttgcaggggaggactggtcaggtgttggggggggaagaaggagggtccccggtgtaggggtcaggagcagcgaggagggggcccagtgtgtggaaccagctggctgggagacgcagcgctggcagagggtgaggggcccacctgagctgcaggtccagcaccgccgtcaagcagggcaggtccagcagcgcgtgcagcatctccagggctgtgccagcgtccaccagggccgggaggagcgccacaaactcggaggtgaggggtgggctgttccaggccaggaactgtgggcacagcacagcggttcggacacggctcggagctgtggagcaggcggcagagggaggagccagctagggccccacagctgtcccagacctgcagtccccaggagggcttctacctttgcctcctcccgctttttatttttttgagacagggtcttgctctgtcgcccaggctggagtgcagtggtgcaatcatagctcactgcaacctcaacctcccaggctcaagtgatcctcccacctcagcctcctgagcagctgagactacaggcacacaccaccatgtgaggctgtttactttttgtagacaagaggtctccctgtgttgcccaggctggtcttgaactcctggcctcaagatcctcctgccttggcctcccgaggtgctgggattacaggtgtgagccactgcccccagcctgtatctactttcgtaccaacaggtcaataattttccactgtcctggtttttctccagaaagaggattccccacctcagttgaaaagaccttacagcgaggcgaggctgcaaaagacacttcaaaagcaaatggcaccaggccgggtgcggtggctcatgcctgtaatcccagcactttgggaggtcaaggcaggaggatcatctgaggtcaggagttcgagaccagcctggccaacatgtcgaaaccccatctctactaaaaataccaaaaattagctggacatggtggtgggtgcctgtaatctcaactactcaggtggctgacgcaggagaatcgcttgaacccaggaggcgggggttgcagtgagctgagattgcgccactgcactccagcctaggtgacaggaatgagactccatctcaaaagaaaaaaaaaaggcaaatggcacccaagtgcccaaggcaccaggcagggctcccgggggagggatcctaccaggcagcagccctgccccagtgctgtgagaacaaactcaccgtcttgtgtcacagccccctctccaaaacacccacaagggagttcttggacagcaccgtcaatca

SEQ ID NO: 12631 - DNA, 1392 bp, Artificial sequence
  DNA replication origin
tgctgcaccctccgatagaggaacacagaagactgccagcctcagagaaactgttctcactggggagaaggctggcaccagcgctggcctcaggcccaggctcagagtggaaccaggatgggcctgcatgcatcaggcctttggagagaaggaccccaggggacaagacggggaagagggacctgagctaaccctgaagaggacaggctcggcagaaagaaggacgggaatgttcttgagaagcagagagaagtgcctggggctgggtgtggggctgtgggtgggggtggcagggtctgaggctgctgagggcccagctaggggtggtgccgaagccactgaaggggaggggggaggggagagggggaggagtccaggaggcacccgcccagggctgtggcaggagcgcaggagggacctacctgtgcacaccggcagcgtaccctggggccgggtagagcgagtcgctcctgcccaggagcagcagcgccagctggttgatcagggacccgtcagccacctgggggtcaggagtgggaaacaggctcagccccacccccactgcaggccctaaggttgggggtgaagccatggtgagggctggggggcaggtgaggggctggagactcctcgtccactgccttccccaacacccagggacacagagactcagctggcagcatccgggcacagggagggaagccctgggctggcccaagtgcccccggcagaggtgtcgcttctgttccacggctcctctgccaactcccgctctgcaaggccaggcacacgtcttgtttggccaagggtgcgcccaagcaacgcccagccccctgccggcctccccacctcccaggctctcctgcactggcttgtagagctccccgaggtgggaagcagcaatgggggagatggggggcaccagcctgtgggagcctttattttggcctcagatggggatgctgaattatcaggggcagcagggggacaaactgctccggccccagctgtgtggccagagcccaggccactcacttgccctgtcctggggacggaagacagggcctgctggggcagttggatggagcctgctgggatgggagacaggacctgccgggatgaaggggatgggacggggattgggggacgtggcctgccgggatgaaggggatgggacggggactggggaacggggcctgctggaataaaggggatgggacaagggacggggcctgccggggctgtggcatgtgcctccctgaccctcacagggaccgtggatggtgggtgtggcgggagcagccttctgcagagctcaagagggccccccagtgctggctctggcctgcccctcagttgtgaggcctgtgggaatggggggccccaggcagc

SEQ ID NO: 12632 - DNA, 1806 bp, Artificial sequence
  DNA replication origin
atccctggtcctctccccagggtgcagggcaggtaacggaactgatcgcgcactcttcatacagacgcttattaaaggagatttacttttactgcagctcttcttgcccatcaactgtccaaaaacaaaagactaggaaacagacccagcagcctccacccgacccagccacagggcctcaagcctccaatcagagccgctccatggcacccctcagctcagctcagtgttgcctgggagcaaaaggctcggagacaaagcccagagggtgagcaggggggccagccccgcgtgtctgtgagggtgccaagcccaccgtgggccttgcctcctctcccaggactcccgcgccctcctgagctcctatcagcctggcctcagtagcaagctggctgcccaggctcttaatctgcaccgaagtccctggccactgtcccttcaccctggcatgaggccggcctccctctccaccagccggctgaccgtgcgcagggccaggggcagggccgtgttggcatcgcggtgatagcgggggctgcacacctccgtgctgggtgtgagcacaaactgggccacgctaggcatcttcagcagggtcagcagctctgtggcccgggtacggatggcttccgcgccctcctcgctgtgcgtggagctggtggctggactgtgagccagggtcctcatctttgacagcaataaagaggccctggggaaagaaggtccctccgtcagctgcagatgctcccctcccaggacaggggtctgtgtggaggggccaggcctgaagcgcccagcagagtggctttagctcagcagggcccacccaggacctgcgctgctgcgaccatttcacaacacctggatgggaagacctcagaagccacctctcttccccaggagccagaaggcttcgctccctccctgaccaggcacctggggatcagatcttggctccgggaggccagcttcgtcagcgtggtcatcagcacggtgaccacctgggggggacacctgggcagggcagcagaggggcggcactgggtgacctcgaatagcagagcctccagggcttcgaagaacttgttgatctgctccacggtgcacctccgatcgtaggtcaccgacaggtactcgccgatggcccacacctaggcccggggacagagattcagcccccacccaggcctcctgggtcaggagcggctgtgggaggccagcgcccgccttaccacgctggtgacgaggctcgccctgctgcagagaccattcacgctgcccaggaactccagcaggtctcttgccagctccaccaccagggagggtttcagcgtacacagggccaggaactgagaactcagcacactgcccagaaagccgggtctacgcctgctctgtgcagacctatgaccccatccccatccaggccaagggcctggagaaacccgggaagcgtctgagtggtaggtgtatgctgcaccctccgatagaggaacacagaagactgccagcctcagagaaactgttctcactggggagaaggctggcaccagcgctggcctcaggcccaggctcagagtggaaccaggatgggcctgcatgcatcaggcctttggagagaaggaccccaggggacaagacggggaagagggacctgagctaaccctgaagaggacaggctcggcagaaagaaggacgggaatgttcttgagaagcagagagaagtgcctggggctgggtgtggggctgtgggtgggggtggcagggtctgaggctgctgagggcccagctaggggtggtgccgaa

SEQ ID NO: 12633 - DNA, 1327 bp, Artificial sequence
  DNA replication origin
ggtcagggagggagcgaagccttctggctcctggggaagagaggtggcttctgaggtcttcccatccaggtgttgtgaaatggtcgcagcagcgcaggtcctgggtgggccctgctgagctaaagccactctgctgggcgcttcaggcctggcccctccacacagacccctgtcctgggaggggagcatctgcagctgacggagggaccttctttccccagggcctctttattgctgtcaaagatgaggaccctggctcacagtccagccaccagctccacgcacagcgaggagggcgcggaagccatccgtacccgggccacagagctgctgaccctgctgaagatgcctagcgtggcccagtttgtgctcacacccagcacggaggtgtgcagcccccgctatcaccgcgatgccaacacggccctgcccctggccctgcgcacggtcagccggctggtggagagggaggccggcctcatgccagggtgaagggacagtggccagggacttcggtgcagattaagagcctgggcagccagcttgctactgaggccaggctgataggagctcaggagggcgcgggagtcctgggagaggaggcaaggcccacggtgggcttggcaccctcacagacacgcggggctggcccccctgctcaccctctgggctttgtctccgagccttttgctcccaggcaacactgagctgagctgaggggtgccatggagcggctctgattggaggcttgaggccctgtggctgggtcgggtggaggctgctgggtctgtttcctagtcttttgtttttggacagttgatgggcaagaagagctgcagtaaaagtaaatctcctttaataagcgtctgtatgaagagtgcgcgatcagttccgttacctgccctgcaccctggggagaggaccagggatgggaacccctggcagctgctgccagtcctggaggctcagcccggcgtgccactgctgctacagaaaccaggtcatttgtgcacagcccggaaggcagcggcgcgagttcccgggtgtggtcaccgctctgggtggtgcgcttgtcaatgccccttttgatgcccttgaatagcctgaagatgaaggggaccgggggagggttgcaagcgccatggcctatgcaggctgcggcctctggccattcggagggaaggccccagggagccacctgagtggagctcagaacactggattcgcgcgaaggggaggtgtctgggcgtgcggccccagccccgccaccttcctgggccctgtggtcccaccctccggactaccaaggcacagctgtgtcgcacgt

SEQ ID NO: 12634 - DNA, 946 bp, Artificial sequence
  DNA replication origin
ggctcccagggaccctggcccagcagcccgggaagtggccccggagcgtactcttcccttgaggggggctccctgggcacaggccccccctggaaggcaacccagccgtgggggctcccaggctggccccccgcacacggactcgtcctgcttgctcacgcctcccagcactccacttggccctgagcctggggaccccgactggccagagtccggcggcccctgtggaaaagcgctcccagagaggcagaggaacggactcagcggcctccggggtgcagctccggaaggtgagccctgcctggtgctcaggcgggaacccaccccagaccccgcacagcaccctgatggccggtcccctgggatcgttccccccttgggtcctaggtttccttacctgccccacagacacctgcaacctgagacggggccagatggagagggctcagggctgctcagcccccagcagctgggccacacggtcgctcagtcgctgacacgtcttgggcagatactcactgtgatctgggagggagagagtctagaaagtggctcagagtcactcctgcactgggcagaggaagggatggctgagccagtggagaggatgtgctgagggggaacccaggggtcttcagggagaaggtggagctggagtcctccagggcagggcctgtgtgtgcctgtgtgcttgtgcgtgtggatatgtgtgctcacaggtgcatgggtgtgctggtgcgtgtgtgcatgggtgtgtgcatctgcatgggtgtgtctgcatggtgtgcattgtgtgtgcatctctgcatgggtgtgtctgcatggtgtgcattgtgtgtgcatctgtgcatgggtgtaagtgcacgtgtgcatgggcatgcttgcacatgtgtgcatggctgtgagtatatgtgtgcatgagtgtgtgtgcgcagctggcctaggc

SEQ ID NO: 12635 - DNA, 846 bp, Artificial sequence
  DNA replication origin
cagcgactgagcgaccgtgtggcccagctgctgggggctgagcagccctgagccctctccatctggccccgtctcaggttgcaggtgtctgtggggcaggtaaggaaacctaggacccaaggggggaacgatcccaggggaccggccatcagggtgctgtgcggggtctggggtgggttcccgcctgagcaccaggcagggctcaccttccggagctgcaccccggaggccgctgagtccgttcctctgcctctctgggagcgcttttccacaggggccgccggactctggccagtcggggtccccaggctcagggccaagtggagtgctgggaggcgtgagcaagcaggacgagtccgtgtgcggggggccagcctgggagcccccacggctgggttgccttccagggggggcctgtgcccagggagcccccctcaagggaagagtacgctccggggccacttcccgggctgctgggccagggtccctgggagccagggggcagctcggggcctccaggtgcccgtcaaggaccacgtggtgcataccctagggagaggaagggtgacagctcaggtagaggagtggccaggtggacacagcactcgggcaactgggcagcctgcagcagaagggccgccaggccgcggggcagaggtcagcaaaggactcccgcagcctgtgcagcttgagacgcgcaagaggcaaaggggcttccccgccatccggagcacagcctgcgctgggccaggactcccggggttcccagagctcccgcctgctgcccccagcccagcttccaacccttctcctgtcctcccgggcacctcggggcacgctggctgg

SEQ ID NO: 12636 - DNA, 932 bp, Artificial sequence
  DNA replication origin
ccgggtacctcggggcacactggctgggccccctccccgggcacctcagggcacgctggctggggggccccctccccgggcacctcggggcacgctggctgggtggccccctccccgggcacctcagggcacgctggctgggtcccctccccgggcacctcggggcacgctggctgggtggccccctccccgggcacctcggggcacactggctgggccccctccccgggcacctcggggcacgctggctgggtggccccctccccgggcacctcggggcacgctggctgggtcccctccccgggcacctcggggcacgctggctggggggccccctccccgggtacctcggggcacactggctgggaggccccactgccaggcctgccagggctgccggggctggctctgctccgcagaccccacagaaagtggcggacgtagagcaggtgctggtagatgctgtcgtccaggcagttggcttccaagtccacctggaagccgtcgctgggcaggacgatgggtggggggttttcgtaggactccagaacatcctctgcaggggagagaggatgcccgtaatggccacaggagaagctgcctccctcgccaggccgccccgcccaacggtgtgggaacccaggggccagcagattgagccctgagtcccctgccctgtggacacaggaggctgggatcctggccacagtgactggccccaccctaggactcatcccttctgaattcccgccgaccacccggtgtgacatccgagcagttcaggactgagaacaaggccttgtagccaggaaccctccagccccactgagccgctctgcactgggcctgtctctgccccactggtctctgatggtgtctccgggtaactggagctcccccagcccggcagagctggacgcaagctcctccca

SEQ ID NO: 12637 - DNA, 979 bp, Artificial sequence
  DNA replication origin
aggtgctggtagatgctgtcgtccaggcagttggcttccaagtccacctggaagccgtcgctgggcaggacgatgggtggggggttttcgtaggactccagaacatcctctgcaggggagagaggatgcccgtaatggccacaggagaagctgcctccctcgccaggccgccccgcccaacggtgtgggaacccaggggccagcagattgagccctgagtcccctgccctgtggacacaggaggctgggatcctggccacagtgactggccccaccctaggactcatcccttctgaattcccgccgaccacccggtgtgacatccgagcagttcaggactgagaacaaggccttgtagccaggaaccctccagccccactgagccgctctgcactgggcctgtctctgccccactggtctctgatggtgtctccgggtaactggagctcccccagcccggcagagctggacgcaagctcctcccagggctggagccgactgcctccctgcaggaatcacgggacccaaacggcctgtgtgcgggctgctctctgcccccaggaacaggagcacctttcaggcggcggaagagtgcgtgcatactgagctcctagctcccagcacagaattcaggccacagaaatgaatcaatgcggaggaaggacttagaaggtgtcaggtggagccagggttcctgttcagagatgttctccacggtgacccggggctgcgggggggcatccaaggccccatcgcctctgcgcctcccgccatcccgtactctgttttgttgaggtgttaacacataatgcagatgaagggagatgtgtgtataatctacacattataatgcacccctggccgggggtggcggctcacgcctgtaatcccagcactttgggaggcaggagcaggcagatcgcctgaggtcaggaattcgagagcagcctggccaacatggtgaaaccccgtctctacc

SEQ ID NO: 12638 - DNA, 3538 bp, Artificial sequence
  DNA replication origin
aataaataaataaaataagatgtaaaatactcctgaaagggcaggttgagctgaaggagtcgagttcaaggagcgtgtctgcagggctggaagtggggcgggacctgccgtggtgcctgggcgggcctgggggctcccgagcagccgccgcccacgttcttgttcttgttttgggggctggacacacaagcgtgttcctcgggggaaattcgttggcttgtgcgtgtcagatgtgtggtttcctgtgtgcacggaaaggaggcagcagcgacactcaggatctccgcctccccccgctcagccgggcggggatatttctagaacgttgaaaacaggacttctcctggctagggaaactaggccgagccgagggcaggaacctcgtgatggaaggggggccccggcctctcgcccagcttggcggccaggcccgagcgcccctgcgggagatgggcaggcccgagtcggcagtgacagcccggggaggcgggggacagcgccaggggtcttccagaagcggccgggccaccccacgctgaggccaggaagcgcctgtcctgcgccccgcatcctgagcagagcgtctacaggagacgcggaggggcagtggcattggaacgggggggcagtggcgtcggaaggggacaagggggggcagtggcgtcggaaggggacgcgggggggcagtggcgttggaacgggggcagtggcgtcggaaggagacgtggaggggcagtggcgttggaaggagacgtgggggggcagtggcgtcggaacggggggcagtggcgttggaaggagacgcggaggggcagtggcgttggaaggagacgcggaggggcagtggcgtcggaaggagacacggaggggcagtggtgttggaatggagggcagtggcgtcggaacggggggcagtggcgttggaaggagacgcggaggggcagtggcgttggaaggagaaacggaggggcagtggcgttggaacgggggcagtggcgtcggaaggggacgcggaggggcagtggcgttggaaggagagaccagggccgcggggctgcttcttgtaaagggccaagctgtgaggacttcgggctttgcggccgcttttgtctatgtcccatctccttctttgttttgtttttctcaaaccctttaaaaacgtgaaaaccatttctagcttgggggccctataaaaataggcctcgctggccctagtttgatgacccctgaaacagacaattcaaggagaagcttagtgaaagagtcacttatagcttcataaaaataagagaagatatagtatccataaaataataataagattgtatccatgagagaacaagagcggtcttggaaaataaaactgtggaagcagaaataaaaagctgtgcagagcctgggagaaaagccctccagagaggagggtgaggagcggggagagagagggggcggagggatgccagggtagggaggagagtaagaaggcagaagaagatacagggagagaggggagagagagaaggacgggggagagaggaagaggggaaggagaggaggagaaggaagagaggaagaaggaggagggaggggagagagacagagggagggagggagagaaggagagggaggaaggagcggagaaagatggagggagaggagagggaggagggaggggagagagacagggagagagggaggagggagaggagagagacagggagggagaggagagggaggaggaagtggagagagggagggacagggagaagaagagggaagagggaggggagagagatgggggggagagagaggcagggaggggagagagagagggagagagaagaagaggggtaggaaggaggagagagggagggagaggagacggaggaggaaggggagagagacggagggggagaaagggaggagggagggcagagagacggagggggagaaggagagggaggagggaggggagagagatggagagaaggagagggaggagggaggggagacagagagagagaaggagcgggaggagggaggggagacggggggagagagaaggagagggaggagggaggggagacagggagagagagaaggagagggaggagggaggggagacagagggagagaggagggaggggagacggagagggaggagggagaggagacagacagagggagggggagaaggagagggaagaaggaggagagttctgttcccttgaagctgatctcttggccccgacctctggtcccggaccaagcacagaagtgagagtagagaaggttctaggaactcacaatcaaacagaaccacccccgggcaaaccagaggctttcttgaagggtgtgtaaggggtgagggtggtgggggccggtggtgttggaggacgtcgttctgtgccctcacccctcctgcacgacgcccgagacaccgattatccttcagcgtggacatctggtagccacagcccaggcccctggatatgggcagaaaaacacatgggagagaaacagagcgaggaggcaaaggtgagaacagaggggacccagcagcgaggccacatccaaacagtgggagtccagaaagagccagcagaggggtggagggcgcggggaaggcaggtgcaggcagtctccagagccacgcattgaggtggaggagctgctgccaagagtgggcttacagcaaaactcagcatcccagggctgcaggacgatgggtgcagagaacccacaggcttccagacaagaatcagtacaaggcagaccctgaagatttgcactcaggttgctttggacgagcagcacgggagtcacaggacaaaacagcacctgcagaatccgaagggtgacgccctcccgcctggagttctgtgccagccagatgaccagtccagggtggaggtgaagacagttccagcacgcagggcagtgggtttcctgcaatgcgccccttttgggaagctactagaagatctattccatagaaacaggacaaaccagagagctgaagaaatgaattgcagaaaataagaaccggctgggagccggggaaaggaaccccagaaggatgatgatggaggtcctggcgggccgcagaggctgtttaattttattggagggatccacccttccttacggtgtaggctttttgtcttgcctaaaacgttttcctgggccggagccagtggctcatacctgcaatcccaacactttgggaggctgaggcgggaggattgcttgaggccaggaatttgagaccagccgtggagtttgagaccaggagtttgagaccaacatagtgagaactccatctctacaaaaaaaaacaaaaacaaaaaactaatgagctggacataatggtgcaagcctgtggtcccagctactcaggaggctgaggtgggaggatcgcttgatcctgggaggtcgaggctgcggtgagctgtgattgagccactgcaccccaacctgcgtgacagcatgagactctgtctcaaaaaacaagcaaacaaacaaatgttttccctgc

SEQ ID NO: 12639 - DNA, 1324 bp, Artificial sequence
  DNA replication origin
ggagtgggagagggtcccagctaggggctgcactgtggagtcagcggcagtcacagcccaccctgccctgctacgttcacctcccaccgtacccccgctccagagaggggttcaaggctggtcagttgccttgaaaaccgagggaaggtgtcctgcctgtcatcgagctgtgatgtcctcagtggcccagagccgggaagggcaggctctggggacaggcccatgtctgtgtccccccaggagggcagcccaggcatcaccctcccttcttccctccacaggcccctccctgagctgcttccactggcccagaggtgtccaggcctgcgcccgcctgcagcagctcctggagtggatgcggagcgccggcttcggggcggctggagagcacttcttccagaagctctcctgcaccctcaacctgctggccacacccagggcccagctcatccaggtaggggtgcgcatgggaggcggcgagtgtggggaggggcggggccacatgctgtgggtccctggctcacaaaccaagcctgggggccgggacggggcttcttggctggaaacctcaaagctaccgtaggtaatcagaaaagttgcttccattccatggctgtgtccacctgcggtagacaggataatggcccaaagatgtctgagacccgtgaccgtcttaccctgtgaccgtattaccccacatggcaaagaagcctctgtacgtgtgactacgattaaggaccttgagattcggagatgacctgggtatccgggtggcccagtccactcagacaagtccagaaggtcagagagaaacagaagaagaggggatgtggctctgaggctggaggaggggccaggagcacaggagtgcagtggcctctagaagctggagtgaccccagctgacagccagtctggaaacgggaccccagtcctacaaccacaggaactgaattctgacagcaaccggaagagcagggagacagatcctcccccgggggcttcatcttgctgtcagctctgtgagacccggctgagctgtggagccgcggagctgtgagagtgcactgtgtggccgtgaccgccaggcgtgtgggcatttgtcacaacggcaatgggaaaccgacatgcccctccctgcttccctcgctgctcaccacccccctcccaacacagtcagccactcaccaccccccttcccaacacagtcatcacaggtaattaatggaaatagaccgatggtttcctctcctgcctggaaaacgctgaacatgctgtactgtgatggtgacagtggccacagggcgaatcgcttgaacccgcga

SEQ ID NO: 12640 - DNA, 1280 bp, Artificial sequence
  DNA replication origin
cagggagcaggaggccaaaaagggcagagccgcctccaggagctggcgagggaggcgccagcagccgtcatgtccaggaatgtgagcccccgacccctcaaccctgcacgaggccctcacccctgtcgaggagctggttgagaagcagtgtcccggagaagaagaagaggtaggcgagcatctgcgaggccacctcggggtgcacctgcagctgccgcaggaggtccagggctgcctggtacacagacaccacgcggcgcagctcctcgggcagttcgggggccgaggaccagctctcacggcgctccgtctggaatggcgggcactccaggagtgccgggaggcagatgtacagggactggcgggggcaagaggagaacagcaaccagcatttccaggagcgctggcggccgaacggggggcctgacccagcgagctccccacccacgcactgcttgcagggacccggcctcggtagcttcctgctggacaggccatggctttgcaaatgtccagtgtgggatgtggggacacaggagctgcctcctggggctgctgggagcagaggtggggtgcagggggctcagggggatctgctgtcggaggcacagatgaactcagaaggcgcacagaggtggcgcctggggggatgggctccaacaaaggggctccaacaaaatgacgggagagtcaccactcccccagaaagtggctcaccgcacccccgatgcaccccaagctggccagggccacagggggaccggcggcagcacctctggcacccgtgggtccagggtgacaacagggccatgtcccttgcgccccatgctggggcctcccccacctcatccctgaccctcgaaatactggcaggaagggggcgtttcaaggcgagggaaagggagctgggatggttctagggcttctgtgcgacctgaggaggagcgggtgtggggggtgcagctgggcctgtgcagaacctgcagccactgctccctgatgaagtggagcttgtcacggtcccctccctcagccccccagaaggctccttaggagagccacaggcacaagcttgagccccacttgatcccaggagctgcctgagtgcagaagcagagcccgtccgtgcaccttggagacatagtagacgcactgctggaaggcgtacagcaccacctcctccagcaccgccatggcctcctcgctggccgtcagcgtgcaggagaacagcgattccttcgagcctgccgggagacagccacgccaatggtcacaacggg

SEQ ID NO: 12641 - DNA, 1028 bp, Artificial sequence
  DNA replication origin
ctggggctcctgggctcccgggactacagcgcccgtcgcctctccctgcagacctgactctgccatcctccagggctggatttgcagccggcaggtggccctgggatggaggcaactccggagttgcggccggccaagggtgaccctcactgaccttgcagtgcacttggtccttccgtgtgacagggggacggggccagcttaggagccccttttgttccggcccccacaggaagagtcagctcagggacctgtgatttttcggctctgtgttcctggagagtccccggctgactttccacgtggcttcgtggctgcctgggtttggtggccgcaggcagctgggtcccatgtggtccccgtgctggctgctcttcatgggaaaaattgctctgggctgttggagctgctgcctttggtcttgggaggaagttatttttggtcaggggcctgagcagtgtttggcccggcgatgggagccagggcccagggatgcctgcaggctccgggtgtcgagggccaggcaggcaccagggaacagagtgggaaatagcccctagaaggggccggaggggcagagccccgtcagcctcccgaccctctgcaggaaatgtctgtgggaagaattcggagagcagggctgtcgcgtcccgagggtgggtcacgtggctgttgtcattccgcaaacactgttttgtacaaagctctgacccaggcccctcccgcgccgcctcacaccatcgtgtgcgcctcagattctcctcgtggctggagctcagcgccttcttctttagggatagggccagcttcctcaggggtcctggagtttcggggcagggcaggggcagccggctggtgtgtcctcttaatggctcgtgggcgtcggaaatcctcagaaatgcccaccagccctggtaccacagggagaggcgtctccgggggtttagaaatggagtctcagggctgggctcacacctgtcctccccgcactttgggaggccgaggcaggcagatcacatgaggtcagg

SEQ ID NO: 12642 - DNA, 1543 bp, Artificial sequence
  DNA replication origin
aagaaattaaacagcgtttggtttgcaagtaagtgcctggcgcagaggagactcgggaaatgacaatgatcgtgcgaaaacccatgacttctggccagcaggtaactctcggtcacagtggccacgatgtggacacacactacagggacatcacctggccctgtgtccatgactgcacggaggggacacgggcacgctgcagtggcactcccatcaaatcccaagccgggaacccgaggggaagaggcacggacacccagattacaacacccacggtgcacagagacggctcccactgacatctggacagggaagcctgagctggcttttactttttaaaagtctcagacatttaaaatgtggatttcgatatgagaaagtgataaggtttctacacagtcaagtggttcccccttcccctgtctgccggggataagcggggcccagactagcgaggatctgagggtctctgaacgaacttgaacaactacgagttgtccttcgggtccctgggagccaagtcactgtggggtggggcccagcggggggccatgactgtgtgatgcctgttccagcactcatgggcccagggcggtcctgctcactggcggccacactggattcctggggacattggcaatgcctgcagccatgggtgtattgcgtgtgtgtgtgtggcggggcggcagagggtgaccggcatctaggggtggaggccggggatgctgctgaatcctctgcaatgcacaggccagcctcacagcaaggagctctcctgccacagtgtccacagggccggggatgagagaggctggcctggaggaaagttcgtcaacgcacaaaaggtgacgggccctgcacctccaaactcggatcagggatggctccagcgggtatgtgctcaaccggcccctggcagcaagcacagggcgccggcacacacaggggcttctggggctcttgggcaggggcctgtgagagctatcaatgtcacctcggcctcgtggtgcccaggctcaggggcagctcactcctggcacgtgacagtgctgggcccagctggaccccagggagggtacaagcccagagctcaggaggtgacctaggaccccacgcaaaccccaccctcaggggcaaagggctgcagctgacaccttgggttctggggctgcttctggtggcctgtggggctggggggcagcgacaggcagggaaaggccgccctgcgctcagcagcacagcaccgtgggggtcagatagaggcgctcccgcctcccagccggggccagctccgggccccctcttcccccagaccggcacaggacccagaccgcccaccccagcacactgacccagacagtctcgcggatcagcctggctatcttgagcaggagctgcccgaatgtgcccggctggaagtgggtggccgagtgctggatgcagaggcacaggaggaaggcgggggtcagcttgtggtcgtcgccccccggctcgatcaacgtcatgatcctctgcagcagcgtgtcctccaggtggggctcaa

SEQ ID NO: 12643 - DNA, 1769 bp, Artificial sequence
  DNA replication origin
gcagcgacaggcagggaaaggccgccctgcgctcagcagcacagcaccgtgggggtcagatagaggcgctcccgcctcccagccggggccagctccgggccccctcttcccccagaccggcacaggacccagaccgcccaccccagcacactgacccagacagtctcgcggatcagcctggctatcttgagcaggagctgcccgaatgtgcccggctggaagtgggtggccgagtgctggatgcagaggcacaggaggaaggcgggggtcagcttgtggtcgtcgccccccggctcgatcaacgtcatgatcctctgcagcagcgtgtcctccaggtggggctcaaactccaggagcagctgctggcgccggggcagggcggcctgagtaggggaggcggctccccgggccccgagcgcggccccgcacagccggcagctctgcggcacagcccggaggcgcgccaaggcccgggcgggcaggggctgggcctgcgcggggtccttgaatagcagcaggtagtagagccccagggagagcaggtccccgtggtgcagcaccacggtcctgtgccccacctcggagaagttgacggagatgtgcgccccggggatgggctccaggaccagcctccccgcggcctggccgctgtccgggagcggttgccggcggatggtgcagtgtagaggcaggatgtcgggggctgagaggctgatgctgggcttgctggagggggtccgctggcccaccgtgtgccggtcccggttgagcacatacaccaggctgtcctgaaacagagactccgctcagggcaggcgtaacgcgagcagcacacgggaaaagcgtcccgtgtctagtcactggttgctgaagcagcgtggctgggatgctgtcgccacgggctctccatgtccctggccacccccacaccagaaccccgacggctctcaggaacccgcccctcgatgtccgggcccatcccagaggaggtcggtttcccggaggagcacacgagagacccaggagacacccagctttgagacagcgacaggccaggtcagggctggccgggaaacaggcactggttctacagaccgggccaaggactacataacttcccccaagtcatccccaaaactgtgtgggagcactgccgcctgtgtgggagcaccacccccagtgtgggagcactgccgcctgtgtgagagcactgccccgagggaagatgccacctaaaacctgggcacaggagccctatggctgtaaagtgctcatggaaatgagcagcaaaggagctggctgcacaggagggcgggggtagggtgagcagggggcggggaaaacagttgtctggcagggcaagtgtccggcaaggtgaggcgaggtggccctgcgcctggcatttgctcggggcgacagcctgcctgctctgatggaagtggtgagaaacggctctgggcagataggggtggcatgggcctttgctcggtgccccttcagagaatgtggccaccaattggtgactcagcagccccctcgccagaagcaggaagcagactggccctggccaactgcccatgcccttccccagagccaggcgggagaccaaggctgggaaggcgtgaggagttctccctgaaggcgcctggtgctgagggcacccactctgggattggggaagtgaggagcccccactgccgcccaccgtggcctggacagggaaaatgtggatgactccacatgtgcccccgccatcccactccacagcc

SEQ ID NO: 12644 - DNA, 1426 bp, Artificial sequence
  DNA replication origin
tgtgttatctctgaactgtgcgcatgtttgtgtgcatgtatgtgttaatgtgtgtgggtgcatgtgtgttggcgtgtgtgtatgtgtgtgcatgtgtgtttttgggtgcatgtgtgtgcatgtgtgtgtgcatttttgtgtgggtgcatgtgtatttgtgggcatgtgtatgcacacgtgtgtttgtgtgtgtgcctgctttggcttgggggtatcagagacagccttgggaaggaggcagcgatgctgttgcaggagcaggccatcggcagccccatgggctggggtgatgtggcacagtgacacctcctccttgtaaagtaggggcaggatgctgaccagtccgtctcgtctcgtcagagcaccacccccaggggagtttcgcctggtgcacagatggatggggcagggctctggaggcggcgtggtgaccctgcagaggcccaggctgccgtgggaaaacgtctgtggtttgaggcctgtgggccgtggtgctggctggtcgggcaggccgcggtgtgaccctgggctgctgcaggggaggcgtggtcccctcagcctgaggatttgacaggcaggctgcctgctctgagactgttctgtgggtgccacggtggtgccaaggcactgtctggtttttcgaggggcgtggctagagggcagagtccttgagtctccaccagacctgttttgacagaacagtaacggcattaggagacgtggcttagtgggatttgaactcagaaggacccgggacatgggcgctattagacttacctgttttttttggcgggggatggagtttcgctcttgtcacccaggctggagtgcagtggtgcaatctcagctcactgccacctccgcctcctgggtttaagccattctcgtgcctcagcctcctgagtagctgggattacagatgcgcaccaccacgcccaactcatttttgtatttttagtagaaatggggtttcactgtgttggccaggctggtctcgagctcctgacctcaggcgatccccccacctcggcctcccaaagtgctgggattacaggggtgagccaccgcgcccagtcctggtgctatgagacttctaactgttcaccttgtgttgcttctgttccagggataaacgcccaggcccggaggctgcagcggagtcgcgcgaagggaaccccgaccccggccctgggggatgcccggagctctcctccaccccggttgcgccgcacagtcagtgagaccagcctgagcccagtgaacgccctgcccgctgccgcccagggccccgaggagcccggccccgacgccatgcggtactcgctgtaccagtccccgcatctgctccttctgcagggctacagccagcagcacgtgagcctcccctcctgacacccactgcccggtgccactgcagggacagcag

SEQ ID NO: 12645 - DNA, 890 bp, Artificial sequence
  DNA replication origin
aaagttgagggccggagcatcatttggagctgtttttgttcttctttcggatctggccccatagttgtgcaatgaggctgagctgtggggctggtaacgcttgtgggagtggcgggtgggatgaggtaggggaactgggccccacctgctgggcacctgccgcctgccaggctgggccgggttctgcaggcggcaggagcacgggtggtgagcagcccagcccagcagcctcgcactgcggctgggcggcctccctcacgccctggccccctgcgggctgcagatgcacaggctgccggctgccttgggaaggacggcggggctgctggcgctggtaagggtcttcctcagccagctgacgcctccctccatccggcttttgtttggttttattgggaatggttggaggaaaggccgccacagatggggatggatcttaacctgaaaggctgcgtacagggaactcagcagagggctcagaaaagacagcgccgggtcagctggggactggtgagcggttttcatctatcgcagccggctggctttcccagagcatgcatttagagagcgtgtctgtatttatgagatattaagtcttctaagggtgtgtgttatctctgaactgtgcgcatgtttgtgtgcatgtatgtgttaatgtgtgtgggtgcatgtgtgttggcgtgtgtgtatgtgtgtgcatgtgtgtttttgggtgcatgtgtgtgcatgtgtgtgtgcatttttgtgtgggtgcatgtgtatttgtgggcatgtgtatgcacacgtgtgtttgtgtgtgtgcctgctttggcttgggggtatcagagacagccttgggaaggaggcagcgatgctgttgcaggagcaggccatcggcagccccatgggct

SEQ ID NO: 12646 - DNA, 924 bp, Artificial sequence
  DNA replication origin
tgtggcctcatttgctcttggtggtcacgatggttggcgctaacctctctcactttttcacccaggtcacggcctccccacatcctttggctgaagcccacagtcctcatccatgaagcctcacccaccatgttttatgggacgcacttcatcatgtccccgcccaccaagagcaaactgaagcggcagagccagctgttgtccagcatgctgtcccggacgctgagctacaagtaccgggacctggactccaccttctccagcctgggcgccagcgatgaccccgccgagctctccacccagctgtcggcccctggtgtcctgaaggtgtttggggacagtgtctgcacaggaacccactacaagagcgtcctggccaccggcacctccagcgcccgtgagctggtgaaggaggcgctggagcggtacgccctggaccccaggcaggccggccagtacgtgctgtgtgacgtggtgggccaagccggcgatgctgggcagcggtggcaggcccggtgctttcgggtgtttggggacagtgagaagcccctcttgatccaggaattatggaaaccccgagaaggtttatcccggaggtttgagctgaggaagaggtcggacgtggaggagctggcagccaaggaggtggacaccatcacggcaggtgaggggggccacaggttcaggaagagccgtgggtctgagcgctgagaaggccagccgaggtaggcggagaaggagtggtgcaggggacatgcgtggggcgggctcgctctgcaggaggcagtcggagcccgtgtcctggatgtttgaagccttcctcttttgttctctgagacagggtcttgctctgtcacccaggctggagtgcagtggtgcaaccacagctcactgcagcctcctgggctcaagcgatcctcccac

SEQ ID NO: 12647 - DNA, 1380 bp, Artificial sequence
  DNA replication origin
cgcgggaacgtggcggcgcggcgggttgtgccggaggtgagtgtggggtgcgcgaggagtgactgcggaaccgggggtggctcgtaaggggcgctgctcggccgctgccggggacctggggcgcggaggccgcggggcgcgctcggggacactcccggccgctggtcggggcgcggagggcaggtttgcccagttgccatgggaaccgactggctgtcgggccccggcctggaccggggggcggtacccggaggccggctagcgcgggcaagggcggcccagcctgcggggatccgggggtccgcgctgccgacccccgagagctcctgagcctggctgtccgcgtgggccccggacccccaactccaggggactctcggccctcagttttcccggctgtgccctggagggggagcttcgtccggggcgcgcagcgggggagcggggcgcagcgggggagcggggcgcagggttccgcgcgctctcccacctgggccggcgagacgtcccctgcacataccccgtcccggttgcagcccgatccccactcgtgcgccagctcaaagcattgtttcccggctatttatgtaccatttccagcccctcgacaaatactgcatccaagataacagatgctgagccgagctcctggggcctcgcaggaggagcctgttggtggggttggcagggccctggcggggctgcggaccatcctgccctgccctgtcgcctgtcaagtgtttggctaatctgaattgcacagaagaatctgattgctcgtgtcccgcggttaatataggccacctcttgtgcattccagacaggaaccagtcttgaaagtcccttttgctggggggcaagtcggtctcctctccagcagctagcaggtcagaattaaatctgattgaattatgtttgcatttgaaagcgtggctcgggctggggctgtaaagataggattcatggaaggaggggagagagctgagtgtgtaaagtctgcgcttcgttttccctcctgctggaaatgataatgggttccacattgtcctgttggagcagagaggtcgctccacccatgtcgtcagcgcagcactgacctcactccctgtactcgccgctgggacttgagcttgtttttcatcagaaactggacccttccttgagaacaagagaaaacattctctaagagcagcaccagccagcgccccacaccctcgctgtccgagccctgcgctttccccaagtatttgtgtcacagaggagcgaatggggcagaagaggccggtcgcacttccagaaaaacagatcttgttacccagggcgtgctccgcccggtcggattttcctgcactccccttggccttttaaaaaacgagtcca

SEQ ID NO: 12648 - DNA, 1420 bp, Artificial sequence
  DNA replication origin
cgcaggctgggccgcccttgcccgcgctagccggcctccgggtaccgccccccggtccaggccggggcccgacagccagtcggttcccatggcaactgggcaaacctgccctccgcgccccgaccagcggccgggagtgtccccgagcgcgccccgcggcctccgcgccccaggtccccggcagcggccgagcagcgccccttacgagccacccccggttccgcagtcactcctcgcgcaccccacactcacctccggcacaacccgccgcgccgccacgttcccgcgctgctcccacccgccgttggctggggccggcgcccagacccgcgcgtgccgcggcgcctcctgccggcggcgcaacgggcggggcggggcctcaaggggacggggccacaaagggtggggcgggggagaacaggtgggctggagctgggcctcggcgcccaataggcagaaagaaagcctcgaggaggcggggtctccaggagaggggcggggccaacctgctagaaaaggcgggctgtgctctggcgcctcctgccggccgcccaatggacggggatgcagcctcgagggggcggggcctcaccggagaggcggggttttgaagaaaggggtggggctggttgtggagaggcgggacttgcagcccacccacagactgcagcttaaggagggggggtccccggaggaagggtgggaccagttctaagtccctgagctgcttgtgggctctgggctcctgcggttgggtgggctatttcgagacagcaccttctagtagcccagtgagtgggtgtaggggagggtagagctgtgcccccaattaataaacatcttctaagacatcgaaaaggaacaagggaggaatttcctctcccctaccatctgtctcccacccagagttttaaaagacaaatcaggtcatggcattcctgcttacaattatgcaaaaaaatgaccaggtcagctctggggctctggccccaactgctctccctggggacttgtttaaaaagcagctcgtgacctcggcactttggctggggttttccctttgaggaatgtgggctagacctgggagattcaggtggttcggaatatcaatatgcagaatgtgggcctcgggagtgaacctttttgtggacagctatcgtggtatgatttccgtagtcatgaccccatattcgcgatggaggtcggagcagacattgatgagtgtgggaacagacatttattgaccacctgtgtgccaggccctaggcaactttacctaggtcacctcacttaatgctcacatcaattcttgtgagacagagatgtctgagacattccaggcctcccctttcctccacctatcacctgctaatcctaaagtccacctcctaaaccttttctaataaaaaatagtgcctca

SEQ ID NO: 12649 - DNA, 1912 bp, Artificial sequence
  DNA replication origin
cttcctgagtcttccccagaagcagaagccgccatgcttcctgtacagcctgcagaatcatgaaccaactaaaccgcttttctctttcttttttcttttgtttgagacggagtcttgctctgtcacccaggctggagtgcagtggcgccatctcagcttactgcaaactccacctcccgagttcaagcgattctcctgcctcagcctctggagtagctgagattacaagcatgcaccaccacaccaaggtaatttttgtattttcagtagagatggggtttcaccaagttggccacgttggtcttgaactcctgacctcaggtgatcggcccatctcggtctcccaaagtgctgggattacaggtatgagccaccacacccagcctaaactccttttctttatgaattacccagtctcaggtatttctttctagtagtgtggcacaagcctgtagtcccagctactggggaggatccgttgagcccaggaattcgaggctgcagtgagctatgattgcaccactgcactccagcttgggcaacagaaccagaccctgtctctaaaaataagaaggaagaaaggccaggaggattataggccatatggtgtacttcatcttactgggagatatctggtagacctgccacccgtggtgctaggttgatccatgagggctctaaggtaacccctgggatgagagatactgaggtccttttcagcatcctattactcagcagcctctcacctggtggtcttagcatccattggttatcattgtctgaatcctttgtttcactcgcggttgcaattttatgctttttcaagatcctcccttagtgaagactctgcacccccacttcccttcagcatcactggactcagctttttaaagtacttggattttcattattatcttagataaagccaaggtttcatttctttcagagaaaggccgcagagggaaacaaattgatccgtccatgtttggagcatggctattcttaggatgcggggatggtgtttcgactctgtgaagctcctgggattgtgtgcacggggtggggtgtgcgtgtgtgtgcgtgtatgtgtgcatgtgtgtgcatgcgtgtgtgtgggtgtgcgcgcgtgtgtgtgcatgtgtgcaggtgtgcgcgcgggtgtgggtgtgcgtgcgtgtgcaggtgtgtgcgtgcgtgtgcgcgtgtgcatgcgtgtgtgtgcgtgcgtgtgcgtgcgtgtgagtgtgtgcattttgccccagagaggtgtacgtctccagaggaatcttctctgagcaggcagctgcgttacataggaatgaatgctgaattctggtctttgggaaaggagttgggctggaaactggcttgtaccaatttcagagctctctgctttggaattttcactcctctgtcctggaggaaagaaggaaagaggccgggtgcggcggctcacgcctgtaatcccagcactctttgaggccaaggcgggaggatcacttgagctcaggagctcaagaccagcctgggcaacatgatgaatccccatctccactaaaaatacaaaaattagtcaggtgtgttggtgcacacctgtaatcccagctacttaggaggctgaggcaggagaatcgtttgaaccctggaggcagaggctgtagtgagccaagattgcgccactgcatgccagcctgggcggcagagtgagatctccaaaggaaaggaagggagaaaggggagggaagggctgggtgaggcggctcatgcctgtaatcccagcactttgagaggccaaggtaggtggatcacgaggtcaggagttcaataacagcctggccaacatggtgaaaccccgtcgctactaaaatatacaaattagctgggcatggtggcgggcacctgtagtcccagc

SEQ ID NO: 12650 - DNA, 1074 bp, Artificial sequence
  DNA replication origin
cgcgagcccgggagcccccccgtgcccccgcccgccccgcccccgccaccatctgctcgggatttggcgtcggcggctccgggcgcctccagctccggctcgggctccggctccggctccgggcgccgaccaggtccccttggcccccgccgcgcgccctccaacctgctgctgccgccgccgcgccccccaggctctgccagctacccgcgctctgagcccggggccagattcccatggaagcgccgcgatgttcgccccccggctgctggatttccagaagacgaaatacgcgaggtgagcggcggccgcggaggtccgcggggagggagggaggggcgcgcggcggcgggggccgcggaggccaccttggttctcgggccccgccgcccggagcgctagaggggatcggcggacccctgacccccgcccgagaaaaccaggacccaggcagcctcgtcttctcgctgggatggagtaaccggggcgcccgcgcctcctcgctgggtgccattgggcaagtcgcttcacttctctgaacctcatttccacgtttgcaaaacgggggttatgcgagtccccgtgtcctgggtcgccgtgaggattaagcgagctggtccttgcagagcactttgcgcagcgcctggagcccaggccagctacgctcgggcagttacgctcggtctctcttgggcactcttgttcatggtaaaaggcgttggtaccacctctgtccacccttccagcaagtcggaggaaagagtaagtgctcttttcagatggagaaactgaggctcggggtgcggtggggggaggcacctgtacatcctggtcttttcatagtgtgaactccgtggtcccctcagaacctccgtctcttttgtaaaatggtgattaacagacattgtgatatctgagtagaagttaggctcctgttgcttggaattccagtgaagaaggtgggcgtggggagggggtttctccttttacatatctttaagattttgttgggagatgtgcttgcctggaagctggcatgaaaaatcccctcctaaagttgctcctcggtcccca

SEQ ID NO: 12651 - DNA, 1013 bp, Artificial sequence
  DNA replication origin
tagtagagacggggtttctccaggttgaccaggctggtctcgaacgcctggtctcaagcgatccacctgcttcagccttctaaaatgctgggattacagacatgagccactgtgtccggcgtattttttatatttttaatagagacgagggtcttgctatgttgcccaggcccatctcaaactcctggcctcaagtgatcctcctgcttcggcctcccaatgtgctgggattcctcgcataagccaccactctcggccaccagttgggtttttgtctccatcctgaaggagtgggagacgcccttcagcaggtctctgtccagcagagccctcctgaggaaggtgtggctctgtgcagggtgggtgcccgtcctgagctgaggacggtcccctgccctcctctctgggaagctgacctcagctggaggtctctcctggtggtgcccctgagcagtaacctgatttctgttcccagctacctgaccaatgacatggaggaggacagcgagacccccaaacaaaacatcttctacttcctgtacgggaagaactgctctcagatagccttgtcccacaagctttggttccagttcttccattccgtgcgctgcagggcttgggttttcccggaggagttggaggaggtgggtggggcctggggagatggaggaggtggggaggaatcgggtgggctggaggctggatgaggggagggaggagtatcctggggagtccccatcttcttaaggggcatttgtttttccagatccagggttatgacccagagcactgggtgtggccatgagatcgggcccgcctttcctagagctccagggactgtggaggcctgaggtcatcggcctgagagaaggtacatctgtgtcctctggggtaaaggcagaatattggggtctatttcagaaatctgaggaacccaactgcttgatctggcttcaagcctgggcaacatggcaagatcccctctccacaaaaatacaaaaagtagccaggcg

SEQ ID NO: 12652 - DNA, 663 bp, Artificial sequence
  DNA replication origin
tccttttgctttattcttttttttttttttagaaaaagtcttgctctgtcgcccaggctggagtgcagtagctcaaccttagcttactgcaacttccacctcctgggttcaaggggttctcttgcctcagcttcccaagtagctgggattacaagtgcacaccaccaagcccagctaatttttctatttttactagagacggggtttggccatgttggccaggctggtctcgaactcctaacctcaggtgatccacttgccttggcctcccaaagtgctgggattacaggcatgagccactgtgcccagcctgagtttctttttagaaacagtttaagaacaagatagtataatcctgtcttttttgtacacagagtaaagaggacaaataggtgaaagaataaatgacaggctggaatctcaccttcctctgctgtcccagggcgttggatactgatggataggagtcagcaaaccactcacagagccaggaagaaatgaatgcgttggtattgccaggagaagaggctggccgggctagaatacgctatgaccatagccaggagatactgatggagcgaagggaacacagagagggagaggtcacatcttgggagaggaagatcatggagatagtggaatgggggtctggggaggggttgc

SEQ ID NO: 12653 - DNA, 955 bp, Artificial sequence
  DNA replication origin
gttcccaggctttggcctccagtggacgagaatcgcggagcctgcggggctggaggttgagcgcccgggccagcacctaggcgggcgcgggggtgtgcaggccagggttcgcgcgggccgggtggaggcttgagcggggacccccgagcttgagccccggagccggcggcgctggggccagaggggccggacgggaggtggcggaggtggcggcggaggcgaaggggcggcgggacgcgggcctggcccgtgtgtgtcctggcggcctggcccaggctgccgctgtacggtgagcccgagggaggcggatctgggtcccgggaaggacacccgcctggatttgccccttaggcccggcccgggcccctcgggagcagaacaaccttagtgaggtggacaggaggggacctcgcgagcagacgcgcgccagcgacagcagccccgccccggcctctcgggagccgtggggcagaggctgcggagccccagaagggtaggtcttgggttttcgggcccggagcgagaagggcctgagtgaagtcaccgtgtgttggggaccttagagtgtggggcagggggagggtctcgatcgcttgcaggagagacgtgtgtttgggtttgagggcagggtccggctgcaccgaacaggcgctgcatgggaaatctgggaggacgaggcttatgggggcctggagggtgtcaccagcctcagctgcggacgtcgtctccactccccgctaacccctaacagcccttcctcctcctttccgtgctccagatttcgacctcctctaaacgtccgtcagcgcctctgttctctcatttaagtgtctgctgattccccccttagatctgccctggagactggtagtaatgcaggaacagtctgcagggattctctcttgctgcctcagttgctaggggaagagactgggccttagcaggtgggtgactt

SEQ ID NO: 12654 - DNA, 1091 bp, Artificial sequence
  DNA replication origin
tccccctagcccgggtccgaccctggcctcaccccgactccgacccccgaccccggccttacgtgttgtcctggttgaagttggcgaagagcagctggccggcgccggcctccccgctctggctcgccaggttcatggctgggcgcgcggcgagtgggcccggccggggagggcgcgcgcgcgagggcgggtcaggctgcactcagggtcggcgccgggccccgctcgccgcctcggtcgccgccactcgccaccctgggatcaaccgccgcctcatcccgtccccgctcttgtttatgctccagagccggggcacccggtacgcctgcgcggccccgcccccgcgacgcacggcctcgagcggcgcagtcgcactgcggaggccccgccctctcaccgcctgcctgggcttgggttccggtggatcacgcaggcgtggggacgcgtcggggcgcgctgggcctggctgagggcgagcggcggccgctcatgcgcatggggcagagctggcgggagtctgttttctgcgtaccctcctcttaataacactcaatggccaggcacggtggcctgtaatcccagcattttgggaggccaaggcgggcggatcacctaagatcagaagttcgagaccagcctggccaacatggtgaaaccccgtctctactaaaaatacaagaaaaattagccgggcttggtggtgtacgcctgtaatcccagctactcgggaggctgaggcaagataatcgcttgaacccaggaggcggagattgcagtgagccgagatcatgccactgcaatccatccagcctgggccatagagcgagactctgtctcaaacaacaacaaaaacaaaaacaaaaacaccccaatgggccctccatgtgccaatcactgtgctgaatgcttctgcgcattaccttatcattttattattttgaaagacaaggtctcgctctgttgcctaggctggagtgcagaggctcaatcacagctcactgcagcctcaaactcaggctcaagcgatcctcccaccttagcctcccaagtagctgggaccacaaatgcatgccaccacaccctgctaactt

SEQ ID NO: 12655 - DNA, 912 bp, Artificial sequence
  DNA replication origin
ccgtgcgtcgcgggggcggggccgcgcaggcgtaccgggtgccccggctctggagcataaacaagagcggggacgggatgaggcggcggttgatcccagggtggcgagtggcggcgaccgaggcggcgagcggggcccggcgccgaccctgagtgcagcctgacccgccctcgcgcgcgcgccctccccggccgggcccactcgccgcgcgcccagccatgaacctggcgagccagagcggggaggccggcgccggccagctgctcttcgccaacttcaaccaggacaacacgtaaggccggggtcgggggtcggagtcggggtgaggccagggtcggacccgggctagggggagggcctcgctgccaagctcggcggcgtcgcaggctcggcctccccgcgggccaaggcgcgcagaggcgtccccaggggcgggcccggggcgtgcagggaggggcgccctccagggagaccctcgggtgctggcctggagctgcggtcccggagcgggagaggtggtggagagggggctgctttcaccctcttgcggggaggccccctggcttcagacttaactacttctcgcaaagttggggccgaactttggggcttgacttgtcttggccgcctgtggagcgctgggtgtgggtcgcttcctctcctctcgtctcctcttcccgctgcttgctcagcgtctcccactcactctcctttgaatcaggcccttctccttgtcttttcatcgtcttaagacccttctctctctcttgattttcttttcttcgtttctcactgtttttttgtttgtttttgttttttggggtttgttttgttttgagacagagtcttgctctgttgcccaggctggagtgcagtggtgccatctcagctcactgcaacctccgcctcctg

SEQ ID NO: 12656 - DNA, 987 bp, Artificial sequence
  DNA replication origin
cctctcgtctcctcttcccgctgcttgctcagcgtctcccactcactctcctttgaatcaggcccttctccttgtcttttcatcgtcttaagacccttctctctctcttgattttcttttcttcgtttctcactgtttttttgtttgtttttgttttttggggtttgttttgttttgagacagagtcttgctctgttgcccaggctggagtgcagtggtgccatctcagctcactgcaacctccgcctcctgggttcaagcgattctcctgcctcagcctcccgagtagctgagactacaggcacgcgccactgtgcccagctaacttttttgtatttgtagtagagacagggtttcaccatgttggtcaggctggtctcaaattcctgacctcaagtgatccgcccacctcagcctcccaaagtgctgggattacaggtgtgagccaccgtgcgcggccctccctgttctttttgggacatcaactttgatgtcttctccagcaagtaacaaacttagcaataaccttggcatctgacctagctagggagaaactgagccaagagaggcgttacggaccagtgccccaggagtctcagagctccagcgggtgggtcatcctcagggcaagagaaggccttaatgccagcccgtgcattcggaacgctgtttgtccccactgatacgggttggatgctgcctgggaggaggacttgtggggatggttaatagatgagcgagctttctggagagagaagggtgagttatggggttggcagggaggagagccatcttggaagtgagtaagaggaagtgaggaaagagaaggagtggggcatttggcatcttactaagtcattggttgagttgttactggctgagtggaattaacatagcagaaggtaagattctttaggaaattaaaagtgaattgtagaatggacaacactcagtgggtggtgtacagcaggcactcaatagcacctc

SEQ ID NO: 12657 - DNA, 1294 bp, Artificial sequence
  DNA replication origin
tatacctgggtcccctgggctctgctcagtctgtcctagagccaggctacaggtgagtagagggagaatagggcggggtcatgattccattcacctgggagaaaaacggaggctcccaggcaaagggagtcatgggaagcaacctagccagttctgatcccaagctgggaggagaaagggagcgggtcgaggtaggaaccaagtgagggcagggcatgactgagggtcggccacagcccccactcctggctggacttgctctccgccccttctccagcaggtgaactcctacccgtccttcgaaactttcaatctggtcacccagtggcctcgtgactgaacctacccacccactggcggcgttgctggcctcccaggcgagtggatctgttgagggggagcagcctgggcaccaaggctgaggggtgggcagcgggggtggtgggctgggtcagccgcaggtcacccggccctcccggggccaccatgccgcaccctggtgtgttggggatcctgatttcagcctcagcctgggcctggcgcctgcacagcccagctggatggaagggtggggggagggagaaaggaagaaaggagatgggagcagaggggaggagggggaagatgggggagaggggagggaagaggaaggggaaggagagggagggaggagggggagaaaagaggaggatggaggaggagtggggatggtagaagggaggagggagggaagacagagggaggactgagtaggagaatggggaaagcggaggagggagggagagggaggaggggagagacaggaagggaggaagagtgaggaggagaaagggaggagggtggaggggaggggagaagggaggagagcaggaggagggtaatggaggactttggaggaggggaggggtgggaggagggaaggggagggaagagaaagggggaggagtgggagggaggaggagagaaagggaaggggaagagaggaggagtggggagaatggagaggaaggggagaggagagagaagaggtgggaggtggaggaagagggaggggaagaggaggaatggggaggagggagagaggaggtagaaggggagggaggaggagggagagggggaagagaggaggaggaatggggaggaggaagaaggggagggagagggaggagaagagaggaatggagagggagggaaagagaggaggaatggggaggagggggagggaggagaggagggtgaagggaggagggaagagggtgaggaagggggaggggagggggagggaggagagagg

SEQ ID NO: 12658 - DNA, 1016 bp, Artificial sequence
  DNA replication origin
ggcttgtaacccacccccacaggagttggagcagcttagaccgctgggctgcggaaagggcagcagaggcatcgttagccccggttaacggggaccaggggtgtaccaggcatcaactaaccagggctggtgactgagccgggagtgcgagcccaggcccgctttccaagtggaattcggttcccctggtccttcctggctggccggaggagcgcggcccccgagtgaggccagactggctttggggtcccgacgcccagcgcttccagctgccctgggccactgtgcacttcaggcccagtggaaatgggaggagccggagggggtcactgggccaggctccagtctgagctgcacgacccccccccccacccccgacttggcctctctgtgcctcagtcgccctccctgcaaagtggtgaggggccttggccagaagcagtggctcactcctgtaatcttggttctgggaggccggggctgagggatcacctgaggccaggagttcaaggccagcttgggcaacagagcaagaccccacctctacaaaaatagaaattaaaaaaattaataaatgggggagagcggtgggagccctgccttgcccatagcagtgttaagtggcagcttgtgcaactgttgaatgcctactgtgtgcagctgagcctaccccaccagccacccacccagtccctgtttgtgacgtactctcaccctcttcttcctctactgagttgtgaggtggggaaactgaggcctgaggggtggcctcaaggccaaaaaaatgacctgtgtcttctcaagggccccctgggtcaggcatcaaggggtcacggcagcgcagagtggaggagcagggccaagccctgtaaacactggagttattaagccagtgtgcatgtcgttaaattttaactaaggggggacagggcaggaggccctgggttgccttccctggggcgcagtaggcttggatgtggggggccgggaaggacagagttggaggcctgtggccc

SEQ ID NO: 12659 - DNA, 920 bp, Artificial sequence
  DNA replication origin
atgtgcatgacatcacggccatggacggggcccacctcctaacacacgcgcacacgcagacttaccaaacacacacccagccacatgctcagagacataagcttccccgatcacaaaggatcacacaccccagaaacacagcacacacatgtgtgggcccacatgtccctcccatgtgggagtgcaccccttttctacccccagccaggccaggaaagatggtgatcactgtccctagctcagtctgcccagggattgtgagcctccctcccagaccggggagcatcatggggagtccctgggaagaagcttccagagcccagggcagcccagcaccccctccccggggggtctgcagatactcactctccccggtcatcaccccctgcgtgtaccgcttgggcagcatccccgtgtacccgtagaagctggattgctgcacttaagagagagagagaggaacaacccagaggcaccattatcacctgtcaacttgggagaaatgcactagagaactgtgttggtggacgagggtgcgtaaacagccgttaacaccactaatggcagagagatttgacacgcagcagtaggaacaccagccagtgtacccttggggtcagccagggtcattgacaagctctgacagatgaaacgtctgcagaaatgacacgtcactactgggcaaggcagtgaaaagtctgcatggactttcaacctttcttcttcccatgggcagggacaggagaggccatgtgttacggggtggggagaggactgtctgcctgaggccctgagagaccgtatggagcataacacccttcaccctccagagaagacaggcagcaaaagtgagaagtcaggcttgttctatggaaccactgagatttctgggctatttgttatacagcaataacccctct

SEQ ID NO: 12660 - DNA, 974 bp, Artificial sequence
  DNA replication origin
ggagggccttggggtgggcaggctgtgggttttttcttcgcgtgaccatgcgccactgcccagtgtgaggcagggtgggtcagggccatggtgggccatggtgggccaccccgtgagggtggacagggctctgagcatgtcttttctgcgcggcccttgactccataaaccacgcgacatcagtgtgccggcacaattctgcaccctctctcgctcggccacaccacaaaatctacctgccagcgacaggaaccaggacctcccacgtgggagtctggaagctctggggcatctggtggacctcagcaccaggcagagggttgcagaacgcccccaaggggagaaacgagccagggccaagtgggtcttgacctgggcttccgcttcctgcctgggcagcactgaccccgggccagtccaggcacagaaggaagattgggaaccctgagagggaggggcttccacgcacacagtgccggtacccggggccagtgctgcccctctgcaggggctggaggccaggggacagacctaggacttggagaagggccggatgtcatgtaaggttcaggcgtgagcaaaggggtgccatttgctgagaaggggtgggtgtgattggcagggtgggtggaggagacgtgagtttgagaagcccgtgagacacccacatggggtgctgaccagggggtggcttgtgtgtccgtggctgcaaggagagcgcggtgctgtaggcatggtgtgatgtgcatgacatcacggccatggacggggcccacctcctaacacacgcgcacacgcagacttaccaaacacacacccagccacatgctcagagacataagcttccccgatcacaaaggatcacacaccccagaaacacagcacacacatgtgtgggcccacatgtccctcccatgtgggagtgcaccccttttctacccccagccaggccaggaaagatggtgatcactgtc

SEQ ID NO: 12661 - DNA, 1229 bp, Artificial sequence
  DNA replication origin
ccgtgatgtcatgcacatcacaccatgcctacagcaccgcgctctccttgcagccacggacacacaagccaccccctggtcagcaccccatgtgggtgtctcacgggcttctcaaactcacgtctcctccacccaccctgccaatcacacccaccccttctcagcaaatggcacccctttgctcacgcctgaaccttacatgacatccggcccttctccaagtcctaggtctgtcccctggcctccagcccctgcagaggggcagcactggccccgggtaccggcactgtgtgcgtggaagcccctccctctcagggttcccaatcttccttctgtgcctggactggcccggggtcagtgctgcccaggcaggaagcggaagcccaggtcaagacccacttggccctggctcgtttctccccttgggggcgttctgcaaccctctgcctggtgctgaggtccaccagatgccccagagcttccagactcccacgtgggaggtcctggttcctgtcgctggcaggtagattttgtggtgtggccgagcgagagagggtgcagaattgtgccggcacactgatgtcgcgtggtttatggagtcaagggccgcgcagaaaagacatgctcagagccctgtccaccctcacggggtggcccaccatggcccaccatggccctgacccaccctgcctcacactgggcagtggcgcatggtcacgcgaagaaaaaacccacagcctgcccaccccaaggccctccctcccggcctcgtgaccctaatggcggcttccagcgcctcaaacatgagcactgagctcacagcagcccctggccaggaacacccgtccccaggctgcactcccggccctgtcctgcagacctccgcgtcaaaggtccccatcgggacaggggccctctaactgccccccacctctgcgcgccctctgttccattcctttctgccccctgcctgaatcacgcaccatcttgttgcatccatcctcttcccaccctgcgcccgtgtgtcatcgtggccctactgcgtcctcagagcaggagggtgcagcgacacggcaggcactgggtaaatgccccatggtgggggtgtgtgagcggcgtcggggtggggctgctgtgaggggcagctcctcttgtggctggggcggagctgggggcacccggagttggggcgggagagacgggactcaggacttagagggagcggcagg

SEQ ID NO: 12662 - DNA, 695 bp, Artificial sequence
  DNA replication origin
ctcaaacatgagcactgagctcacagcagcccctggccaggaacacccgtccccaggctgcactcccggccctgtcctgcagacctccgcgtcaaaggtccccatcgggacaggggccctctaactgccccccacctctgcgcgccctctgttccattcctttctgccccctgcctgaatcacgcaccatcttgttgcatccatcctcttcccaccctgcgcccgtgtgtcatcgtggccctactgcgtcctcagagcaggagggtgcagcgacacggcaggcactgggtaaatgccccatggtgggggtgtgtgagcggcgtcggggtggggctgctgtgaggggcagctcctcttgtggctggggcggagctgggggcacccggagttggggcgggagagacgggactcaggacttagagggagcggcagggggtggggctgggaagggaggtggggtggggagtgagggagcgggtgggacggggctgggtggggtcaagctgagtcggggggtggggtgggatgcagctgggcgtggctgagtgggggcggagctgagtgggggcgggaggcagctgggccactcattgtaggaattgctggaaggggctggtggagcaggtctggttgcgggagtggggtggtggcagtgggcggggccggcggtgatgggcggggcctgtgggtggggg

SEQ ID NO: 12663 - DNA, 1217 bp, Artificial sequence
  DNA replication origin
tggccctactgcgtcctcagagcaggagggtgcagcgacacggcaggcactgggtaaatgccccatggtgggggtgtgtgagcggcgtcggggtggggctgctgtgaggggcagctcctcttgtggctggggcggagctgggggcacccggagttggggcgggagagacgggactcaggacttagagggagcggcagggggtggggctgggaagggaggtggggtggggagtgagggagcgggtgggacggggctgggtggggtcaagctgagtcggggggtggggtgggatgcagctgggcgtggctgagtgggggcggagctgagtgggggcgggaggcagctgggccactcattgtaggaattgctggaaggggctggtggagcaggtctggttgcgggagtggggtggtggcagtgggcggggccggcggtgatgggcggggcctgtgggtgggggcagggcctgtggtggagggcggggcctgtgggtgggggcagggcctgtggtggagggcggggccggtggggaggggtctgtgtgtggacggggctggggcgggacggggcggtgcagggagctgggcggatcaggccccggcccactgtgcacgccccccaggcacggcgggcgtgatgatctctctgagccgcatcctcacgaagctgctgctgcccgacgagcgcgccagcacgctcatcttcttcctggtgtcggtggcgctggagctgctgtgtttcctgctgcacctgttagtgcggcgcagccgcttcgtgctcttctataccacacggccgcgtgacagccaccggggcaggccaggcctgggcaggggctatggctaccgcgtgcaccacgacgttgtcgccggggacgtccacttcgtaagtgcgcaccgcccacctctgttcccttctctgtccccttctctgtccccaccgcttcgtcgggaagtacctggggcccagcctctcacctgcatcccagactgtggtctcctcctgtggtggagactccttcctgccagcctcctttattctgtgtactcttactgatgtggcttcttactggcaccccacgtctcgtggcctaaggccccactccacccgcatctgtggtccggggatctgcccagctgctgtgccccacggcgtggggcgtgcatggcccctgtccttagtgacactccacatgatgtacactaaagtttccatcc

SEQ ID NO: 12664 - DNA, 981 bp, Artificial sequence
  DNA replication origin
cagaagtcgccagccaggaaagggagtggtctcccaggtggggataggcggagagggagggccaggggcttggttctgtggcccctggctctgctgggcttccctgtcatagcacagaggcactgcccctacggggtccccagcacagacagcccctgccaggaggtgccctatcccaccatccctgggcaggcagacgtccttggggggctggggtgccttctggtggcagcagcactgcacagccccccaggctcagggccggcagctgtacaggcttggggacacctgcagggtgaggtcaggagtgccaggccatgcagaggcggggcgagggagccattggtcctcgttcctgagggtcgggaaccagaatggtcatgcaggccttgatccagtgagtcacctgggcccttggctggggacgctgaagtgagccagaaacaccatccccaggggagcccccagacccagagaggggcccaggatggaaggggacaagccagggcaggggtgcgtccctctcatggtcagggaagttccctgaggggcttttgggctaagacctgacccacaggaagcgtgttggggcagagggaaaagcgtgtgcggtgggtcagaggctgggaggagctccgtgtgtttggaggaggggaaaagcagagaggtcataggggaccagatgctctggttggtttggtcagaggctggtagagggttcacaggaatgatgagatggaatttgctgcatcagaagtgtgagagagagccaggcgcagtggctcacacctgcaatcccagctatacaggaggccaaggtgggaggatcgcttgagcccaagagtttgagatcagcctgggcaacatagcaagaccctgtgtctacaaaaaagaaaacggcaaaaaagattggcctgggtgatggcgcatggctgtagtccctgttacttgggaggctgaggtgggaggattgcctgagcc

SEQ ID NO: 12665 - DNA, 1679 bp, Artificial sequence
  DNA replication origin
cccagccccggccctggcccccaacgagtccccaaaggacagcccagcccacgaggtgaccggcagcggcggggcctacatgcgctttgatgtgccgcggccaagggtccagcgcagctggcccaccttcagaggtgagtgcggggagtcctctgctgccctggctctggcacccaggcagggggtgggggaggcaggcaggggtccccgtgggcgctgcctctgacccccgcccgccaccctccagccctgttactgcaccgctacgtggtggcgcgggtgatctgggccgacatgctctccatcgccgtgacctacttcatcacgctgtgcctgttccccggcctcgagtctgagatccgccactgcatcctgggcgagtggctgcccatcctcatcatggctgtgttcaacctgtcagacttcgtgggcaaggtgggctgcctgccctgcccggtgtcgggggacgccatggggtgggggtgacaagggaggccctggcctatccgggaagggttctgagtgaaggatgcatgtggctcccaggtggaaagggcaagagctgtgcagtggcgccatcctggacagtgtcctctggagggcggccctggcctgatcccactggggcgctccggagtgtcagctgcatctgggaggacaggcgtggccctcaccctctcgcctcacgatcacaggtcccctggggatgagcacaggaggatgccccagaggggactcagagaaggcagggacactcagaaatggctcaaagaaatggccaggtgcagtggcttatgcctgtaatcctagcacttcaggaggccagagatgggtagatcacttgaggccaggagttctagaccaaccttgccaacatggtgaaaccccgtgtctactgaaaatacaaaaattaaatggacgtggtggagcgtgcctataatcgcagctacttgggaagctgaggcaggagaatcgcttgaacccaggaggtggagggtgtagtgagccgagatcgtgccactgcactccagcctgggtgacagcacgagactctgtctcaaaaaaacaagcaaacgaacaaaaaaatcactcagccagccgtggtggtgcgtgcctatggtcccagctagtcgggaggctgaggtgggaggatggcttgagcccgggagtttgaggctgcagtgagccaccatcgtgtcactgcactccagcttgggggatagaccgatacactgactctaagggaaaaaaatgtaagtggaatttggggggcttttagaggggtgatccggagaagggcaggggtgcaggctgagctggacaggcccaggagtgtttagggatggggatgtggctagaggctgtcgggggtgtgaggcgagtggggctgtggccgggacagggcgcccacttgcctggctctctgcagatcctggcagccctgcccgtggactggcggggcacccacctgctggcctgctcctgcctgcgtgtggtcttcatccccctcttcatcctgtgcgtctaccccagcggcatgcccgccctccgtcaccccgcctggccctgcatcttctcactgctcatgggcatcagcaacggctacttcggcagcgtgcccatgatcctggcggcaggcaaagtgagccccaagcagcgggagctggcaggtgaggccc

SEQ ID NO: 12666 - DNA, 1278 bp, Artificial sequence
  DNA replication origin
ttcattcactcatttattcgttcgttcatcccacaactacttggtgagcccctcctgtggaccaagtgcttttcaaggcaccggggacacagtggcgacaaaacggcgctccccgtgctgtgggactgactgtccagatgtggaggcagcccaggccgggcacagtggctcgtacctgcaatcccagcactttggaagggcaaagcgggtggatcacttgagcccaggagttaaagaccagcctgggcaacacagtgagagcctctcctctctacaaaaatgtttaaaaaattagctgggtatggtagcgtgcgcctatggtcccagctactcgggaggctgagatgggaggatcacttgagcccaggagttggaggttgcagctgtgatcacgccactgcactccagcctgggtgacagagcaagatcctgtctggggaaaaaaaaaaaaaaaatcccagatcggcgtgactggttgaatggcagtaagtcctatggggaaaaataaagcagagaaacaggagtgatgggatgggagagtcaggctcgggagccagcagtgtaaatggagcaatctgggaagacctcactgaggaggtgacttgtgagcaaagacctggaggaggtagcaagggagatagccatgtgaggatgcaagggaaaggcatccaggaagagggagcagcatgtgcaaagatcctgcggcactgaggccaggggatggagcagaagaggaacggggtttgatggttgataaagcatccctccagctgccgtgggcatggaggtgagtgaggagctacttcaccagtccaggcccttgagaatggggctcagacctggaggaggtcaacgtggcactgggaggtgccggattccaggtcttgtttggacggcagcccacaggaccggctgatgggttgagaggtagggtgtgggagagggaagggggctccaggtttggggtccactgctcaaggcaagaaggctggcactggcacagactgagatgggaagaggcctcgttgggaggggttggggttgggtttgggacttggtacgttccaggtgcccatgggacatcccaaattgttcctgatagggaggaagctgcaagtcggagagtggagatttttttttctttttagatggagtcttgctctgttccccaggctggagtgcagtggcacgatctcagctcactgcaacctctgcctcgcaggttcaagcaattctcatgcctcagcctcctgagtagctgggattatggatgccccc

SEQ ID NO: 12667 - DNA, 1149 bp, Artificial sequence
  DNA replication origin
tggtggaggctgggccaggcggtgccccgatcagtgccggtgggtgatgagggccggggtgcagtcactgggcgcgcacactctggcgggtgtctgctgtcctgggtggggacacggtgcgtgtgaccctgcagagtgctggctgggctggagccggggccgctggacacagatggaaggtagacgcaggtatgagaccaaacgcagaacacagtgctggccagagccccgggtcgcagaaacgtgttccggtcctcggaggactttgcagaacttcagtccagggtggggcatggctggaccctgagggagtggggctgctggcacagggggaggctcagggccccgcaggcactgaggtggggacaggggaggggccctcaggcctcggggcccctggtcaggccctcggcgtccctggcagtgggcggggctggctcagaggcctgcgaggatggaaccattggcggtggaggcgtgcaggcagctgccgtgagcgtcgcgggtgaggctgtaggtgcagtaggccacggcggaccccagcgtcagccctgacatgtaggacacggtcatggtgttccctgtggacaacaccagcctgaggggagcagggccagggcggccacctggtggccacggctgctcgggtgtgaggtgcggtgacacccgcctgaaccgtgccgcccctccaggacccgctgccccatcgctcctcctgggagcaccctctccggatcctgtccttcctcattccttcttcccgaggccatctgctatgcactccaggccttgcctgccttctctgagtcccccaagcccccatttttaaaatttaaagacaaggtcttgctctgttgcccagaccggagtgcagtggtacaaccatagcttcctgcagccttgacctcctgggctcacgcgatcctcccacttcagcctcccgagtacctgggaccacaggcatgcaccaccgtgcctggctaacctaaaaaaatttttttgtagagactccgtcttgctatactgcccaggctggtcccaagtgatagtcctaccttggcctcccaaaacaccgtcctgagccagtgagcctggccctaaccctccccattttaatctccagtctcagccaggtatggtggctgacac

SEQ ID NO: 12668 - DNA, 979 bp, Artificial sequence
  DNA replication origin
cggccataccctgatagctaagaggggcccctgtcctgggggcactgaggggttggaaggtggggctggaggcatgtgcacatgcgtgcacacacgtgcatgcacacacactcacccgggcatccacgtgcacacctggccccatgcacacgcctgcaggagcgctcgcatgcacacaacgcacgtggtctccgcgccatggcagtgatggagatgggtccctggccgccctcggggcacaggtggcccgcagggcccggcgggctcagcagagcacgggcacgccgtccgtggagaagatcatgcccgtggtgggctcgtaggtgcccgcgaggtagtacaggccctcgctgtcctggtacttcttggtcttcagcatctgctcatactgctccaggcccaccaccaggcacttgtgcgacaccgtctgcacgtcattttcgtccacatgcgaggactggtatagcgcgcgctgcgggcacgcggggatatcaggatggcaggtggggggcacagaggccgagggagccccagggagccacagggacagagacagaagcagagggagccccagggactgagacagagaccaagtcagagacagaggctgagtaagagacagaccaacaaaagagagacagagaccgagagatggagagcaaatgagagacaaggatagacagaccaagagatccaaagacgcagagagacagagaccgagatcgagagagacccagagagacacagagactgaaagatagaggttgggagagacccagagagagtcagagggcaagaatggccagagactcagagacagacactgggagagcagagaagacccagagacagacgcacagaccagagagacagagaacaggagccaggcactgagagtggcagggacaggaggtcagaggctgagggagaccatgggggacagagcagcagatgctgagccgggccctgtctgagctgc

SEQ ID NO: 12669 - DNA, 1136 bp, Artificial sequence
  DNA replication origin
ctcctcctcctcttcctcctcttcttcctccaccacagacgaggactcttcctgcagctcggacgatgaggcagcccccgcccccacggctggcccttccgcgcaggcggcgctccccaccaaggccaccaagcaggccggcaaggcgcggccctcggcccactccccaggcaagaagacgcccgcgccccagccccaggcgcctcctccgcagcccacacagcctctgcagcccaaggctcaggccggggccaagagccgacccaagaagagagagggcgtccacctccccaccaccaaggagctggccaagcggcagcgcctgccgtccgtggagaaccggcccaagatcgccgccttcctgccagcccggcagctctggaagtggttcggcaagcccacccaggtgagcaagctcgcgcccgggcacggccgaggggccgggggccttgtgtctctctgctgggcccacggcttcatgctgtgtctccgtgtgtggtaacctcccagaaccccagggtggagggctggcgtcccactttatggatgggtacactgagtctcagagtgtcctcaggcacctgggtctgtcggactccgatgcccgagtccttcagagcagagtggtcctgccctctggtcccgggacgcagagccaccctcgtggagcccagatgaaggaaacgtgcaaagatcagcacagacccacaggcgtcggcgccacgtggaaggggctttccaggcctctgggattttttcctttttctttttttgagactgagtctctctctgttgcccaggctggagtgtggtggtgtgatcttggcttactgcaccctctgcctcccgggttcaagcaattctcctgcgtcagcctcccaagtagctgggattacaggcgcacgccaccacgcctggctaatttttgtattttcagtagagatgggggtttccccatgtgggtcaggatgatctcaaactctcctggcctcaagtgatctgcctgcctcggactcccaaagtgctgggattacaggtgtgagccaccacgcctggctttttcttttctttctttctttttttttttttaagagacaggatcttgctccgtcacccaggctggagtgcagcggtgc

SEQ ID NO: 12670 - DNA, 2066 bp, Artificial sequence
  DNA replication origin
aggaagaggaggaggaggaggaggatgaggacgaggaagaggaggaggaggaagaggaggaagacgaagaggaagaggaggaggaggaagaggaggaggaggaagaggaggatgaggaggaggaggaggaggaggaggaggatgaggaggaggaggaggaggccggtgaggccgccctggagctggcagcgctgcagttacggcccccggtgccgcagcccccgtccccgttcttgtcgccttcctcctccccttctgtctccgagccgctgctgctgctgctgctgctgctgctactgctgccactactgctgctgctgctgctctcggactcttcggccccgtcctgctcagcctgggccttgtctgggctcttggggttcccagagtcctcgaacgtgagccccggcccgggctcctgggcgaggtccccgtcggtggccttgggccagggtgccttgggctcgctgctgccggccgcggggggatagctgcccaggctcaggaggctcttgggctcctgccagccccccgcccccggatcctcccggagcagcagggcctctttagccttcttgcttttgggtgacgtgacaccctcgtggtccagtttgacaagcagctcggcctcctcccccggcctccgagggcccttggcacccgactcctcggctgcccgcgccttcttgggcttggggcgtgtggcaggcatggtgatgaggggtgctggggccagggaggtggcaggagctggcagctctgcaaatggctcgggtgctgggcagctggtgaaggcgggtggtgcgggactgggctgcggcggtgccgggcgcgccttgggggccttggctcgcttgtccacaggctctggggggctcttcttggaacctggggtgctgctcggctccagggctaagggggtactggggacctcgtctgttgggttcccctcctccagggtagcggctctgtctgcaaaacaaaacagatgagaagctggggcgggggcttcctggcagagatgagctgtggcttttatcagaaaggcctgcttctgtgagttttgtttttgtttttgttttttttttgagatggggtctcagtcacccaagctggaatgcagtggcgtcatcagggctcattgcagccctaacctgcctgggctcatgtgagcctccagcctcagtctcccaagtaacctgaggccacaagcatgcgccactatgcctggggaattttttgtattattatttttttttttgtagagatacagttttgctccgttgcccaggctggtcttaaactcctgggctcaagcgatccctgtgcctgggcctcctagagtgctgagaataggcgtggaccactgcgcccagcagaaaggcctggtttcaatcctggccctgctacttcttgagcagaacctggctgcagccttcttaggcctccttcggcggttcccctataacaaccttaagttgtgttggccccaaagcgggtcctcctctgctttcagcctgcacgaagtattttctctggattctggaaagaaacacaggccagctgcagctcagctgtgcctctgacaaaccaacctgcctccctcagcctcagtttcctcatctgtcacctggtcagaacggccctgcagtgcaggtgcagagttctcttcttttttttttttttttttttttttttgagatggaatttcgctcttgtcgcccaggctggagtgtaatggtgcgatcttggctcactgcaacctccagctcccaggttgaagtgattctcctgcctcagcctcccacgtagttgggattacaggcactcaccaccatgcccagctaatttttgtatttttagtagagacggagtttcaccacattggccagactggtcttgaactcctgacatcagccgatctgctcgccttggcctcccaaagcgctgggattacaggtgtgaggcactgcacccggctcagagttcttacagacagcaggcaggcacttcggcaggttcccaagccctgagtttggatgcacgaaggagatccgcccaccgcc

SEQ ID NO: 12671 - DNA, 1796 bp, Artificial sequence
  DNA replication origin
ccgggtcgatgagaaggctggactggctgcagcttagtcaactgcagatgaggcaagagagcggccctgggaccagggaggaggcaggtcctgcggggcttgggaaggagttccgtgttggccctaaggaaaatgcgaagctttctgaggttagatgtggggatgtgatatggtcagattggctttaaaatgagctgtctgggccgagcgtggtggcccatgcctgtaatcccagcactttaggagaccgagttgggcagatcacctgaggtcaggagttccagaccagcctggccaacatggtgaaaccctgattctactgaaaatacaaaaattagctgggtgtggtggcgggcgcctgtaatcccagctacccgggaggctggggcaggagaatcacttgaaaccaggaggcggaggttgcggtgagccaagatcatgccattgcattgcactccagcctgggcaaagagcaaaactgtgtctcaaaaaaaaaaaaactgtctggtgctgcacagagaacgagtgggggccccagggaaggcagggagtccagttaggaggctgtgctgtccaggcgagagtgggttgtagcctggggctgccatgggggcagcagggaaggaggcggggcagggtgcacacattaggagggagtgtggatgggaggtggggtcgggggtgcaggcagaggagaggggaagggaagggtgaggacaggtgtgggggtggggggaagccctgtccctgagacccgggtcagggagagtcatgtgctgggctttgatgactcaatcgggaagtcacgcccaggctgggacccaggggtctgtagcccagaggcgaaatcgtgggtatggatgggggagcgagtgagaaggagtcggccgccccaaggctgcattggtcacctgccgctatgtgacaaccagccgccgcctgtgtgcgtctcaggggcatgtagggctgctgggtggccatgcagacccccagtggccttgctcctgcggtgatgggctggccaggggtcagctgctccaggtctgtggtcctctctgcgtgtgttgtttatcctgccagacccgtggcttaagaggaaaagttgggcttaagagctctctcgaggcctaggctcagcattgggccccggccacttctgagagccacatggccaagcccaacgtcagggtgtgggaagtcgactctgccagtgacaaggccacaggcaggcacagcagggatacggccgtcccacccatccctctcccagcgagccatctgggtaatgagaatgtcggggacagaccaggtgaaaggtcccactgaggaggaagggcaggcccaagtgtcttggcaggggcagggagagggagggagcagagggttggggcaatgagaggtgaccgccgtcggcaagtttgcccccgggcattcatttccgccagaaagaaaaagtggatggaaagtctcagaggtaggtggggtgtggtcacatgcacctgtaatcccagtgctttggggggccgaggtgggaggatcacttgagaccaggagttcgagatcagttgggcaacatagtggaccctgtctctacaaaaaataattagccaggcatggtggtgtgcacctatagtcccagctactcaggaggctaaggtgggaggatggcttgaacccaggagttccaggctgcagtgagctatgatcttgccactgcactgtaggctggatgacaaagcaagaccttgtctctgacatcatgatgatgatgatgatgatgatgattattgagacgg

SEQ ID NO: 12672 - DNA, 923 bp, Artificial sequence
  DNA replication origin
tgaggtatggtagtgagtactgagtgctgagtgctgatactgagcacagagtactgagtattgagcaccgagtactgagcatgggccagctgggttttgggcccatttcaccttccccctggcctctggggtgcccctaactgggatccctgccatgcacatgacagattccccctgcggcctgactgtggctccaggtttccagagagggtccccaacccggcaggacccctgttcaggtcctaagtcatttgtcggccatgttctgtccccagaaccgcggcaaggggggtgccgtgagcaagctgatggagagcatggcagccgaggaggactttgaacccaaccaagactcgagcttctctgaggacgagcacctgccgcgtggcggggctgtggagcggccgctgaccccgggtgagtggccgtgatgccacatgtgccgggcggggctgctggagcctcccttgggggaggcagatctgagcaaggcttgagactgaagggctgggctagctgggggcagggaaccacaggagcagagatcctgaggctgagttatccgggtcgatgagaaggctggactggctgcagcttagtcaactgcagatgaggcaagagagcggccctgggaccagggaggaggcaggtcctgcggggcttgggaaggagttccgtgttggccctaaggaaaatgcgaagctttctgaggttagatgtggggatgtgatatggtcagattggctttaaaatgagctgtctgggccgagcgtggtggcccatgcctgtaatcccagcactttaggagaccgagttgggcagatcacctgaggtcaggagttccagaccagcctggccaacatggtgaaaccctgattctactgaaaatacaaaaattagctgggtgtggtggcgggcgcctg

SEQ ID NO: 12673 - DNA, 1069 bp, Artificial sequence
  DNA replication origin
tggctgggtgggagggaaggggtccccacgaggctgtgaccagcacgccctcctcccgcgttcaggcacagagttcgagtacaccgactcagagagcgaggtcaaggtgcgcaagcggtcgcctgcggggctgctgcggcccaagaaggggctgggggagccgggaccctccctggccgcacccacgcctggcgcccgcggtcccgaccccagcagcccagacaaggccaagctggcggtggagaaggggcgcaaggcccggaagctgcggggccccaaggagcctggcttcgaggcggggcccgaggccagcgacgacgacctgtggacgcggcgccgcagcgagcgcatcttcctgcacgacgcctcggctgctgcacctgcgcccgtcagcaccgcgcccgccaccaagaccagccgctgcgccaagggcggccccctgagcccgcgcaaggacgccgggcgtgcaaaggacaggaaggaccccaggaaggtaggggccgcgctgggagggggtgccgcagaagggtccctggggttccgtgagggaggggccctctcccctcccagcctagggaagcggcttcactgttaataaccatgtactcggctccaggcccgcccggagcccctgctaggacttagccacagcaggagctgggcacctgttcctttgtttcttaagagtcaactcttgctctgtcaccaggctggagcgcagtggcctgatcatggctcactgcagcctttacctcctggcctctagcagtcctcctgcctcagcctcccaaatagctggatcttcagacacatgtcactgcacctggctaatttattgtttgtagagaggggatctcgctatgttgcccaggctgatcttgaactcctgacctttagtgattcttctgccccaacctcccaaaatgctgagattacaggcatgagccaccatgcttgaccacccgtatcttacagaggtccttactctcttttctcctgtctcagaagacgactttaaaaagtgaataagatacctgggaccccaaaggaagacagtgatagtgaccat

SEQ ID NO: 12674 - DNA, 1384 bp, Artificial sequence
  DNA replication origin
catgaacccgggaagcggagcttgcagtgagccgagatcacgccactgcactccagcctgggcgacaaagcgagactccgtctcaagaaaaaaaaaaaaaagttaattaataggattattacactttgctggtgactttttcccactgggcagcccccgccagcccctgttgctgtggcttcatctaccggggcagtgcagagcaagcctctcacggctgccccccggggtcagtaggcctgggattgggccttggcttttcggctcctgtgctggaggatttaaggcagaccactggctctccctgaggttgttaacgcaagggactgtcatagagattgcatccctgagtgaaggcaccttggagcccctgtcctggggagcagtgccatctacgcctcactcacactcttttcctggacaccagctctgacctggggcttgagctggagatcccagagaactcggatctgcttcccagggtcagggcaggctgggataagctgggacctgggcatggacagaaatgcgaaggtgtggcattgcctgtgacaacagaggtgcggccatagaggacttcccgggttgtggggtgggtctccttctgaaggacttagcgccgttccaaggagaggtcgggggagctggtgctttgtgcataggggatggcagagagcaaagcttgcagctgggaatgagtggggatggtgggtgctgggcgagtgctgggtggctgtgctcagaggctgtgcattcaagcagcccgggagctgggacccaggatccaggacagagggaagcagggccttggctgtgcaatgggtggggcctggggtgggaggagggctgctggggtggccatgtcgtgtagagagggcagtgggagtggacgattcctgggaccacccagttccgacaggcagcaccaagaacgggggagagaaggcgagcggggcttggggattctctgcgggtttccccgcctgcctgccttagagggctgctgccctgcaggtgtggggcccgtcctgcccagctgccctggcttctgggatttccacaagtcacatggggttttggaggagctcaaggggcccaggatcttcccatggggcaaggggctgggagcagcgtccgggcagccgaggcggcgtagggacaggcgtagggacaggcgtggtcccgatgagtctttctcctctgggcctcagtttcctctcctggaaacgggcagaagcgctgccattggcggggaggtcccgccggggaggaatggtgtccatgtggctgggtgggagggaaggggtccccacgaggctgtgaccagcacgccctcctcccgcgttcaggcacagagttcgagtacaccgactcagagagcgag

SEQ ID NO: 12675 - DNA, 1065 bp, Artificial sequence
  DNA replication origin
ccttgggcagtctgggtgaaatggatgtttggggtgtatgaatagcaagtgtaaatgtctgagagtactagcctggctggtgcatttaggggctgtggacaggataatgttgtccaagcaatcagagtctgatggtggtgggtcagacaggtagcactgatcagagggcagcgggaagccatttggaggttctgggcagaagagtggcctggccaagtgtgcactctgaagacaccctccagctgcttctgtatgaacaatacctaagaataggtagccttgtagggggccctggtgcctctttccaggactgccaggcctggagcccagcaaacaatggcagggcatgagagcgaggagggggaaggcagggtctggagcctggcgtgggtgccacaaatggggttccaagacactggaggtcaggggtggggctttgctccacgaacctgcagagggcatgaagccaggggcagctggggggccttcaggggcagcaatacctgttttcctgtcctagcccctgccaggagagcctcatacctacccctactgtggctcagaaaaggatgccgggggggtcagaaggaccctcccctgctggggccaggggaactcagagcctgaacacatgcatgaccatctccatctccggcactgaccccagctgcaggtgagctgcgtccgtgtgagggcactcagcccggtgagaacagggagggcccacgagagggtcccaagaaggcagggccctgatgcagggaaacagtcagagatggagagacaggaaagacatggaccggggtaagcgccagctgcctgcccaagtgtgagtgcctgctgccttggtttacctatctggattgtgggcaagtcaaagagagcttggtgcctgcccaccccacctgactcctccaggctcaagcccaggccacatgaggcctgtcccacccgttctcccatggcacagaccgcacccccaccatcccacaaagtctgaatgagatgcgctctctcttctttctaccgtgacgtggctgttccttcccctgcacctgtgtctcg

SEQ ID NO: 12676 - DNA, 798 bp, Artificial sequence
  DNA replication origin
ccacctgctgccacttacccagcaggctctgccgctcctctttcttccgggccttctgcttggcctccagctgtaccacagacagggatggacccaccgtggggctggggagggcgctggcggcgaagcgtgccagcaggcccagcccactctcctccaggcccggtgacagggcccgctcccgggcacccagcctgtagccaccaccgctggcctcgtcctcctcctcgagctcctcctcctcgtcctcctcctccgagctctcatctggcgtgcagaaaacagggaccgagtcagagccttggccttggcgagggccaccccccaccgccccctggcccagagtggcctctgggctccagcctagtccctcagtcctgagcagggggccgctgggggtggatgcagacccagcccacgggttccccccatccgatggcccaatgcccccggccagctgagcccaacgcgggcatcccagaaagcccggaggtgggcagcggccttgtgtgtcagggtgggcttctgtgaggggcaccaacatgcacctgtgctgtggcaggggccagacacacggacaaggactggagacagcgttctccacagtcacacgcgcacacgccccaacacacaacacagaggcaggaggagaaggaaagaggaagcggagggaggtgagcacggaagagggccctggggactcaggctaggggttctgggcacaggtgcctgtggcagcttcgccagctgagtcctgagggctggcggcaggagaaagtggagttcggactcttcctg

SEQ ID NO: 12677 - DNA, 971 bp, Artificial sequence
  DNA replication origin
actctgccctgagatgcaacatccaaagtgccacccatgagcaggtgacaggggtgcccatctgcctcacggaccagagtgctgggagcgggaaagtgactctaggggccgcagggctggaaggtggccccttccagcaagaagaggtggacaccagaccctttctctccagggcggggagcagtctaggctcggatagacagacggggaagacggacagccaactccacagtctcctgccaacgccccaagccgcctgcttgcttaagcaacttgtggccaaaagtggtggccccagaggtgccaatgagggcagaggttctgtctactcatgtattggagacagcccggatttctgctgggccacctcagagaggaaggcggtgaaggtgatgagtctgaggagtccgcagaggagtagagggagggagggagggagggaggcaggagccagagggagagggaggaggtttgttaagagggtgagaggggagactggcccccggagcaatggatgaagcaggctggagaggccagccaggcaggcgggggcaggcaggcaggcagtgcacacttgcgatcattcacattgcaggcgtcacatggctctgtctccgccccagtgggccacagcggcaaagcaggctaagtgtaggcagacttttcaacagcgcctgggtcccccacatcaggtctccctggggtgggccaatttgagcagggtggtgggcagggggctggttgtggggtgggggcagggggttggacgtgaggccagggatcttcccttctagccactcaggtgcgcagactccagaaatctttcccatccagaggaattctcaagcagctggggctgcggggggagggcgagctctgggtttctggatgcccgcaacgtccacgccagagcccagaaagccgagagcagcccaatgcccgcacctcggcatgggagaccctcccgcctc

SEQ ID NO: 12678 - DNA, 833 bp, Artificial sequence
  DNA replication origin
caggtgcgcagactccagaaatctttcccatccagaggaattctcaagcagctggggctgcggggggagggcgagctctgggtttctggatgcccgcaacgtccacgccagagcccagaaagccgagagcagcccaatgcccgcacctcggcatgggagaccctcccgcctccctgcgtgcttgacaaggccacacccgctgctcctgcggggtctggtgcacaccccgctagcgtccgcagcaggctggggagcagaggggctctgaggaccaagaaaacctttctggagttgtccacacctgaggcaatgcagcttgccgagggctggggacagggaggggggaaaaaagtcccatcaaagtaacccaaggaaatgcagaaaaactttttattattattattatttaaagaaaaaagcaacaacaaaaaaagatcttggctcaggacatggggttggcggtgacaggttggtggtaaatgtcagagcgatctgctgctgccagacccggtgggggcgaaccccgaggagggaggtgcacggaggacagaaagaaaagcgttttgcctacctacggagcaacgagccaggctcgcacccaagctcagtgacccgctgcgccgtctgccctactcccagccttcgctttgcgtccagagtgcagcgtgagagcaaatgcaagagaccaaaacagacattcaaagcgtcatggggaggggtcaagggtggagggatggtcgggctgctggaagaagcagacatactagaaaagccaagccagttacggagtttagtaccaggtcagcgaggccctattacccaaatatcccttt

SEQ ID NO: 12679 - DNA, 1988 bp, Artificial sequence
  DNA replication origin
cagtggccctcactgatggagcaggtgtcacacgcaagcactgtgcttcaggcatgacatctaattgagcactgccacagccccgcagagccagcacagggtcccttgcatacgatgaggccatggccacagtcaggaggtggcagcggtgggactcgagccccagctcccagtgcagtctccccttcctcaggggcacccctgggtgggcggtgggcgtcgttaggcagtggcatcctcaccccctcctcctctcccggttcttcccccagatgtatgccatgaagtcctccctggaggacatggacgccctggagctggacttccggatgcggctggccgaggtgcagcgccagtacaaggagaagcagcgtgagctggtgaagctgcagcgccgccgggactccgagtgagtgtgtcccccgcccgccccgtggggcccctgccccggcccaccaggcccccaggcgcgcagcagccgtcgaggtgtgcgtggacccggcgccgtgtgtgcatcgtgtgcccgttctccgcgccccgcccgccccccagcgtcacagccaagcgtgtgattctttttaagggacaggcgcgaggaaccccatagaagcttggcacgcagaggccctggcaggccgcggaaacggacccacgccccgagcgccctgtcgcccccccgcaagagagggaagagcggccacagtagcggaaagtaaggctggcccctcggtgggtcggggactggcacacagcttgaggggaggagcccgggccccacgcagggcctgcctcggggtgctgggggacctcgcgtccctcgggctctgacctacccgcagcagtggccctcggggagcacggcctgtgctgcccgggccaggagggagcgaggccggtgctgagcctggaggatggctcctgcgacagatttttcccgtgtcctaacccagcgcttcacctgtcttcctgccacgcctgcctcctcacgcctagggcctaattcctcctcttttccacgcgcctcctccctgcggaaggacccgctgggctgccagccttgcttgttgggacgggctatgacccggctgtcgctcggtctccgccgtgccggacctgctggcttgccccgagaccagggctggccccttctggcacttggggacaagcttctcctcctcgggcggcggtcgcagccttgtggggcacctgtgtgggtctttctgaacgccagctggaatgagagcttttcccgcagggcgaggcgtgcacagaaaagatgcttcgtccttccctcggtgtctgtagcacgatcggaaaggggcccgtcaaggaaaggggttggagtgttgggagcctggggcaggagggtggggtagacgctaggcggctcaagacctgccctgaggaagcagaaggagcgtggggggaccttcggagggcacaggagaggcagtgggaaggccacagttcttctcaggataaaacagccccaaggcccccatgtcttgcatttaacattcttggatgtttctgaccgaagagaggatggagagaggtagaaatctccctcaccagccgcagcaggggcagggagagcttcccggagaagagggcaggaggctgcggccaccagcagcgtggtggtcaggggtgtggcctgcactggttaaatttcctgttcttgagtcccagcaccaccccttagtgtgaccgacctcgggccaggtgttagcttttccgagcctgttttctcatctataaaaaaataagtacacaggttggccacggtggctcacgcctgtaatcccagcactttaggaggccgaggcaggcggatcacttgaggtcaggagtttgagaccagcctgggcaacatggagaaaccccttctttactaaaaatacaaaaattagccaggtgtggtggtgtgtgcctgtaatcccagctatttgggaggctgaggtgggagaattgcttgaacctgggag

SEQ ID NO: 12680 - DNA, 2837 bp, Artificial sequence
  DNA replication origin
atctgtcgcaggagccatcctccaggctcagcaccggcctcgctccctcctggcccgggcagcacaggccgtgctccccgagggccactgctgcgggtaggtcagagcccgagggacgcgaggtcccccagcaccccgaggcaggccctgcgtggggcccgggctcctcccctcaagctgtgtgccagtccccgacccaccgaggggccagccttactttccgctactgtggccgctcttccctctcttgcgggggggcgacagggcgctcggggcgtgggtccgtttccgcggcctgccagggcctctgcgtgccaagcttctatggggttcctcgcgcctgtcccttaaaaagaatcacacgcttggctgtgacgctggggggcgggcggggcgcggagaacgggcacacgatgcacacacggcgccgggtccacgcacacctcgacggctgctgcgcgcctgggggcctggtgggccggggcaggggccccacggggcgggcgggggacacactcactcggagtcccggcggcgctgcagcttcaccagctcacgctgcttctccttgtactggcgctgcacctcggccagccgcatccggaagtccagctccagggcgtccatgtcctccagggaggacttcatggcatacatctgggggaagaaccgggagaggaggagggggtgaggatgccactgcctaacgacgcccaccgcccacccaggggtgcccctgaggaaggggagactgcactgggagctggggctcgagtcccaccgctgccacctcctgactgtggccatggcctcatcgtatgcaagggaccctgtgctggctctgcggggctgtggcagtgctcaattagatgtcatgcctgaagcacagtgcttgcgtgtgacacctgctccatcagtgagggccactgtgtcatttataaacggaaggctcagcaaggggatgctgcagccccaggccccgtgggcacctaaggccagagctacatgtgaccctgggctactctgtttccagtggatcacaccgcgacctgtgtgatgagcctgacatgctagcagacaggtaaactgagtccccgagaagggcaaccacttgactgggaccacacagcacatcagcacaaggagctgaacgtagctcaggcctctctggcgccaaagccagccacgccccaggcagtagggcacctccacagaggggcctcccacccagcctcccccgcggaccccagggaggaagcagccagccgctcacccgctcctccttcttgcgcatccagctgtacttcttgttgggcttcagctcccgcgggagccgcaggttcttgagtgggtccaccacgggcccatccagcacctccctcagcatgtggctgccagctgccagcagactctccagggagggccgcgccaccagggcccgctccgcacctgtggacaggaggtaggtaacagggcgctgctgccaccccttccccaaccccaaacggggatgccgaggcccaaagcaagcgcaggccccaggccacacgtgcccatcccccaaggtgctgagtagacagaggcctttgtgacatgccggaagtcctgagcatctctaaacaagaacggggagaaggccaggcatggtggctcacgcctgtaatcccagcactttgggtggctgaggcgggcagatcaccttaggtcgggagttcaagaccagcctagccaacatggtgaaacagtgaaaccccacctctactaaaaataacaaaaactagccgggtgtagtggcacacgcctggaatcccagctactcgggagactaaggcgggagaaccacttgaacccgggaggcagaggttgcagtgagctgagtttgcaccaccgcatgccagcctgagcaacagagcaagactccatctcaaaaaaaataaataaataggccaggcgtggtggctcacgcctgtaatcccagcactttgggaggccgaggcgggcagatcatgaggtcaggagatggagaccatcctggctaacacggtgaaatcccatctctactaaaaaatacaaaaaaattagccgggtgtggtggcgggcgcctgtagccccagctactcgggaggctgaagcaggagaatggcgagaacctgggaggcggagcttgcagtaagccgagatggcgccactgcactccagcctgggtgacagagggagactccatctcaatcaatcaatcaatcaatcgaacaggagagaaggcagcacgcctggcacagggtcctgtgctctattcacagagtacaggctaggcacagcataagcctccagagggagggcctccaaagaccgaagggttctttccagcagtacggctctccttccacttatttgtacgtgcatttttccatagtgaatatgcatagctcttataatcagaaaaaagcccaggatgaaaaacacaaaccaagcagaaaggtgtaaaaaaaaaagacagcccgcttccttcctcctccaacacacaggtccctccctcgggaggctactgtgggtgcagtttccagtagacagttccagaaatgattatgcatattcaaatgcacacgacatccacgggcatcctttaaaatataaaaataagccgggtgcagtggctcacgcctgtaatcccaacactttgggttgccaaggcaggtggataatttgaggtgagcagttttgagaccagtctggccaacatggtgaaaccctgtctctactaaaaattcaaaaattagctgggcatggtaacaagcacctgtagtcccagctattcgggggttgaggcataagaactg

SEQ ID NO: 12681 - DNA, 1378 bp, Artificial sequence
  DNA replication origin
ctccaccggctcctccttggcctccaccagtgtctcgggtgtcagctgcacccccaggtccagggcggcggtgcagggttctgtccggcccggggaatccacccgtggttcaggcccctccacaaagtctggacactcagagggctctgcgcagctctgcccggtggcactcagcgcctgggcctccaacaggccacctccacaaccccctgcagggctgggggtagccatggcttccgcggcgggcagtggcagcggcgactccagaggcggcagctctgtggggccctcgtccatgtcctccacctctgccttcacctcccgctcagccagcggttcttcctccgggccctcccgcagcggctctgtgatcttggagggggacaagcggatgggcttgtcttcgggtgagagtgccaggcgctcgggcccatcagccgggagcggcacatcaggggccaagccgtccgcgtcggcggcggccgtgggctgcagcaggaaagggtagggcctcccgtagtgcggtggcagggcttggaacgggtacctgggcgggatatctgccaaggacacaggggtcagcatgggagccctaggatctgatatcccatgtccccactgacacccgcccaccaccccagacagagacccaggacgcagccgccccctgctcacccagctacagggtgggagctgttctaggtgggatctcagaaaccccagggccatgcagtggccccaaagtgaaaaaccagccaccttcttgtccccaaggtcttgtggtcttgaaggcaaagaaccacagtggtctctcttgttcctttcccactcagcacccagcacaaggctagaccagaagccaacacttcatgaggtctgcaaaggcctacagctgcctttacccaccttgtgtggtctggtctccactccccaggaacctactgctccaccccattaaagcagttgttcaaaatctaacagcagagccaggcgtggtgggccacgcctgtaatcccagcactttaggaggccaaagggggatgatcgcttaaattcagaagttcaagaccagcctgagcaacagagtgagaccccatttcctttttttttgagacagaacttcactcttgttgcccaggctggaacgcaacggcgccatctcagctcactgcaacctgcacctcttggattccaacgaatctcctgcctcagcctcgcgagcagctgggacaagaagcataagcatgacccaccgcgcctggctaatttttttttttttttgagacgcagtctcgctctgtcacccagactggagtgcagtggcgcgatcgcggctcactacaagctccacctcctgggttcacgcccttctcctacc

SEQ ID NO: 12682 - DNA, 1745 bp, Artificial sequence
  DNA replication origin
gcacccctgtaatccgagctacttcacaggcaaaggtggaaagatcacttgaacctgggagatcaaggctgcagtgagctatgatggcaccactgcacggcagcctgggtgacagagtgagactctatctcaaagcaaaacaaaatgtaacagcagggctagctgcagtggtctcaagcctacaatcccagcagttcgggaggccagggtgggaggactgcttgagcccaggagatcaagaccagccttggcaacaaagcaagacacatctgtacaaatataaaaaataaattggccagacatggtggctcacgcctgtaatcccagcactctgggaggctgaggtgggcagatcacctgaggttgggcgttcgagaccagcctgaccaacatggagaaaccccgtctctactaaaaattcaaaattagccgggcatggtggcacatgcctgtaatcccagctactagggagactgaggcaggagaatcgtttgaacctgggaagcggaggttgcagtgagccaagattgcccgactgcactccagcctgggcaacaagagcaaaactccgtctcaaaaataaataaataaatagccaagtccagtgatgcgtgcctatggtcccagctgcttgagaggctgaaacaggaggatcgctcgagtccaggtgttcaaggctgcagtgagctgtgattgtaccactgcagtacaagctggggcaacagagtgaggatcccatctcaaaaaaaagaaaaggaatagcaacccagttctgtcccccaagtgtaatctccctgagagcagggctgtgtgcccctgattctctgcaccactcccagcccagcagctggaggcacacaaaaggaaactgacaaaggagagacaggcgccgggccaagctcagtgattgccaccactggcccaagctcacccagccttggtgccagaatctgaagttgaaccaaagtcctcccaagcacacgctcacacacctgataccccccagggaggaagaacacagtcccagcccccaaagccacctgctgcaggtcccctctgatgcagaagacggcaagagcgggtgtgtgcatgggacccacagaacggggggaaagctgcccagaatgggtgtccctggaccatcatcagcaaggcagaacttagcgccgactgcatgctgagcgtgtgacaggtctggctcggtggaaaactcagaacaactcatcctgaagcagtttctaatattacacccatttccctgacactgccgctgaggaggggccggggagaggctggatttgactgtgagctcctgtgtttgtctcagtgtctggcggcaggcctgggacgcaggaggtgctccgtggaggtggaatgaacgaacgatcgaacgggtcaatgaaaagatggatgagcagttttaccgctccaggggcagagtgagaccctgagggtctcagctgcatcctacctgagaacagggcctggaaggggctgggggcttccttctccaactccaagtctttcttctcgaccacattctcgggagcctcctccttgcgggtgatacccggggtgggcggtggggaggcgggcggcgggctggtggggtgggagctgggggtggcggggtaggcgtaggcgggtggcttggacacgtcctccagcttctggatgaccttggccttcagggcagccacaggggatgcgcggggtgatggtggcgggctcacggccttgccgta

SEQ ID NO: 12683 - DNA, 2133 bp, Artificial sequence
  DNA replication origin
ggagaaggcgttccctaggtcctcacagtggtcctcgtacgtgtctgcgtgctgacctgctctggttgcgaggctgtgggaacatcccaccccgggtgtggacagggctgtgttccccgggcctggggtgcacacgtggcccatggaggacaggacaaacttcctggcccctggggagcagccgggggcccgcagagagcccagctccccactgtgtgggtgtggcccctctctggcttcagcttcccctcgtaatgggcatggtggtggagcatcaggccgcaggtgcagcgcactgtctctgtccctgcagcggagctgatggagcgggccaccgtaccgcccctctggcccgccctgtacccgccgggccgcagccccctgcaccacgcccagcagctgcagctcttctcacagcagcacttcctgcggcagcaggagttcctgtacctgcagcagcaggcggcccaggccttggaactgcagaggagcgcccagctcgtggtaagtcggggaggatgaggcgcagctccctctgggggcccccatgggtgacgaggcagacgagtcagccagcagaatctccagacagttacagggagggagaaaacagcagaggggcaggtggtcagggagggcttctggaggaggcagcagtggaaccgagacctggagccatctgtagaagagttctccaggcggagggagctgtgagcagaggcagatggagattggcagggcagggtgcaggagcgaggaggaaaccaaggcagagaggtggccttggggactggggaagggtgattggacactgaaggagtccagtgggctcccgctgttgcctgagcccagcctggcctcttctctccaggtggcctctcggagaggcacaaggaggcctggccagctgcctcctgacggcatggtcccataagataggggacacaaagggtctgctctggaggagtcggcccaggtagtgcatacagcaagaagctctcagagcctgagccctgggtctgaatcttagctctgccaggcctggctgtgtgctcgtgggcaagtgcctttacttctctgggcttcaggtttcctctcccagaaacagatgctagcgttgcctagtccttgggttgctaaatgtgactgtttagtaatcgggagagcggcctgtccttggagcgctttgttctggtgtttgtttgtttgtttgtttttgttgtttttttgaggtggagtcttgctctgtcgcccaggctggagtgcagtggtactatctcgggtcactgcaacctccgcctcctgggttcaaacgattctcctgcctcagcctcccgagtagctggaattacaggcacatgctgtcatgcacggctaatttttttctctatttttagtagagatggggtttcgccatgttggccaggctggtcttcctggcctcaggtgatccacccgccttggcctcccaaagtgctgggattccaggcgggagcactgtgcccggcccctagtgtgttttgtgtattgactgaccggcccaggtaggcattggtggtcgccgagctgactccctcccatttcctcataaaagacatgcctggcttcctcctgccctctttggggccttttgagaccctaaaatgatgacgcagtgaagcaggaaggtttagcaggtagtgagtgcgcccaatgccatcgaggtgtggggccttgtgccccccatctggccccccttgtcctgactgtgagggtccgtgcagggccggggtcctggtggaggtcccccatcagccctggttcgaaggggctcaccagagctcctcacccccagcgctgccttttggggttctgcgtggaacgctgtgcttatgacacatgggctgggatggaatgtctgtctctggcctgggacggggtgggcagcctggaccccaggccctgcatgaggttctcctcggactcggggacccttggggggacagggcaggtgcgggcgtcggggagggggaaactcgtgccgtgctgaccctgcctgccggccccttcccagcaggagcggttgaaggcgcaggagcaccgggcggagatggaagagaaggggagcaagcggggcctggaggctgcgggcaa

SEQ ID NO: 12684 - DNA, 1357 bp, Artificial sequence
  DNA replication origin
cctcagcatcgggccagccctgcccaggccaggtggccccactgcccctacagtgagtgtggaaggccccgggaggcccttcagttccgagcagtggttgtcctgactcatggcctggtggcaaacagttccttggggcaaccccgcttctccctctcgtcccctgggctgtccgagctgtcgctgacacctatgatcctccttccagagagagtaaggagctggctgacctggcccgcctgcaccctaccagctgtgctcctaacggcctgaaccccaacctcatggtgacggggggcccggcgctggcgggctcaggtcgctggtctgccgaccccgcagcccatctggccacgcacccctggttgccccgctcgggcaacgcatccatgtggctcgctggacacccctacggtgagtgtggggcacagggtctctccccttctctgagggaggggtgggagggggcgggtgcaggacaagagctcagggctggctcctgcctgccgtttcctggggggcctgggcctgcctcccgcattcgtcggaagaaggaatgataatggcctctgcctcgtggggcccctctgccatgcctgtttggggcagatgcccaatgcgggtggctctggggtgctctttgcagccagccagcacccctgtcccttggcttccccactggaggccccaggaggttcaggacttgggaggtggtgctgggctggggctgcccgaggacaaaccgcttgggggctcccagcactgactcaggcctgggcttctcctcctaggcttgggtcccccatctctgcaccagggcatggcccctgcgttcccacctggcctggggggctccctcccgtcagcctaccagtttgtcagggacccccaatcgggccagctggtggtcattcccagtgatcaccttcctcactttggtaagtggaccttctatgtggccaccatgggccagactggccatgcccagcgagatggtctctgatgccaagggcttcctgctgaggggtggcggccggcagatctggggctggggaggcggaccggggttcagagagaacatctgttgccagtgttgtaaagccttggggtccttgttgcaatgagctcctgcccaaaaactccataaagagaagcgagacaggcagccctgggtgggggctgggattccccttacctggcgccaccgcctccccaggaatccaccttgtagaccactgggaggggtgggagaaggcgttccctaggtcctcacagtggtcctcgtacgtgtctgcgtgctgacctgctctggttgcgaggctgtgggaacatcccaccccgggtgtggacagggctg

SEQ ID NO: 12685 - DNA, 1253 bp, Artificial sequence
  DNA replication origin
cagtctggcttcatgtggcccaggtccggctagtttttgggttgtgttttttttctccatttggactctgccctgtcctcaccaaatccccagctcagaatctgccttcccgtcattaaaatagcattagtggcggggctcggtgactcacgcctgtaatcccagcactctgggaggctgaggtgggtggatcacgaggtcaggagatcgagaccatcctggctaacacggtgaagccccgtctctactaaaaatacaaaaaactagcggggcgtggtggtgggcacctgtagtcccagctacttgggaggctgaggcaggagaatggcgggaacctgggaggtggagcttgcagtgagccgagatcgtgccactgcactccagcctgggcgacagagcgagactccatctcaaaaaaaaaaaataaataaataaaaataaaataaaataaaaatagcattagtaagtgcacccggcctcacgtttcattgttatgtgacaagttttatgacattttcttacaatatccctggctgttggcctaattatcgccacggttgtctgtctaggggacatagacaggccttttggatgggggatgacagagcggatggatgatttctggccctgaggaaccccagttggggtttgggggagcttgatgcgtcataaggaaagatgttggggtgaaggcactacacggatggctgtgcaggaccgtcggggctctggggggcccagggaggggtgagggcagtggggccaatgggtctgggatgggctcggtgctggctgggggctcacttccacctggccccctgcagggcacggccgagcagatgaggactgtgtggacgaccgggccagacaccgggaggaacggctgctcggggcacggctggaccgggatcaggagaagctgctcaggtgagggtgtcgggggatcctgagggtctagggggtatctaggagcccctgggggtgaggggcagctggatgaccccaggtgggcttggcccctcgaccatggatgctatggtactgagagcgggagtcactctggtcctcagcatcgggccagccctgcccaggccaggtggccccactgcccctacagtgagtgtggaaggccccgggaggcccttcagttccgagcagtggttgtcctgactcatggcctggtggcaaacagttccttggggcaaccccgcttctccctctcgtcccctgggctgtccgagctgtcgctgaca

SEQ ID NO: 12686 - DNA, 1308 bp, Artificial sequence
  DNA replication origin
ccgggcgccccccgcccaccggccctgagcataaatggaaacccttcgagctgggcaacttcgccgccacgcagatggccgtgctggccgcgcagcaccaccacagccgcgccgaagaggaggccgccgtggtcgctgcctcctcctccaagaaggcctacctggaccctggggctgtgctgccccgctcggcggccacctgcggccggccggtcgctgacatgcactctgcggcccacgggtctggagaggcctcggccatgcagagccttataaagtacagtggcagctttgcccgggacgccgtggccgtgcgccctggtggctgtggcaagaagagcccctttggaggtttgggcaccatgaaacccgagcctgcgcccacctctgcgggtgcctcccgagcccaggcccgtctcccacactccggaggccctgcagcgggcggcggccggcagctgaagcgggaccccgagaggcccgagagcgccaaagctttcgggcgcgagggctctggtgcccagggtgaggcagaagtgcgacacccgcctgtgggcattgcagtggctgtggcccggcagaaggacagtggcggcagtggccggctggggcctgggctggtagaccaggagcgctctctgtcgctgagtaacgtcaaaggtaggtcctgggcagagcccaggtgcgggtaggatcttgggtctctctgccgtttcccgtacattacagtgtgggccctttccctttgctattgctaagtctttataagtatcattttttaaaatggtcttgaatgttctgttgcgagcatgtaccatggttcagttttccactcccttgatgggcattttcgtttgttccttctccgatgttttgtgttcggaacgttgctttcagtctttgtgtgcatcgcaccttcgtgatactttcagtcatttcctgagaacagatggtcttgggaatagacaaatatcaaaccttcaatttgaagtcatcgagggacctaactgtgccttaccgattccagtgtccccggtacctagccagcctgggctctggcacgtagtaggtgtttgatggatgagtgaatgagtgaggaacagacagaaactggggttccaacatcctcacggtcttgatactcagtacttgagtgactttttaggtaggtagagagtttacgtgcctgtaagtggtttatgagtatctgttatattttggattctttagaattgttttatttatttatttatttttgaaacggagtttcactcttgttgcccaggctggagtccaatggcacgatct

SEQ ID NO: 12687 - DNA, 1975 bp, Artificial sequence
  DNA replication origin
gcggggggtgcaggaggccccttggggggcgcgggcggcgggggcagcggtgaggggcaggggcgcggcccagggagcagggtctccgtgcgccgcagcagccgcgcgccctcgtcctgccgggcagcctccttggcacccccgcgccccgcttcggccaccagcgcgggcagccccacgtccccggcgccgccgttgcacatggtcagtaccgacggctgcagcgccgcattcttggtcttggactcagccaggaagggcgacaggcgctcagccaggcgcgggggcccccggtcctggcggccctcggcgcgcgcctcctgggtcaggtccaccacgccccgtggccccgaggcctcctcgccccgggcgcgcgggtccttcttgccgaaaagcggaggcggctccccgccgcggcccgcccgctccttggctggaccgtcccgcgacgacgagcctttggccggggcgcccgaggagtggccgccgccaggggtccgggccgagggcgcgtgagagtgcagggagcccggagcccccgcggtgggcaggtagaaaccgtctgcggagaagggaacagcaggcagtgagcgagcgccacctcccctcccacccctgcctgggcggaggcggacccctgagagggggatggaccaacccatgcctcccccagtgttttggttttggttttttttttcagaaagagtctcgctctcctcacccaggctggagtacagtggcgcaaccttggctcactgcaacctccacctcctgggttcaagcgattctcctgcctcagcctctccggtagctgggattacaggcgcaccccaccacgcacggctaattattgtatttttaatacaggtggggtttcaccatgttcgtcaggctggtcttgaactcttgacctcaggtgatccacccgtctcggccacccaaagtgctgggattacaggcttgagccgcactcgacccagtgttttttcttggaaattaaacggtttcggtgcagggagccccgaggtttcacaccaaggcaaggcaccccccagggcaagaagaaatgggcgtcccagccctagagagcgcaggctctggaaatacctacaaccaagtttaaatctacccttcccaagcctcagtttcctcatctgtaaaaggagagaccagggtttgttttcaaagttgcccggaaggcctagcagggcccctaagaggacagtgtgaccagaaggcacccagggctgtgggtgggcccaaggagcctgtggggggtcttagggactcaggtctcaaaaaagcatcttaggccacaatggctcacatctgtaatcccagcactttggaaagccgaggtaggaggattgcttgaggccaggagtttgaaaccatcctgggcaacacagcaagactccacctctacagaaaagttaaaaagtcagctggctgtggtggggtgtgtctgcagtcccagctacttggggggctgagtcaggtgcatcatttgggagtttgaggctgcagtgacctatgatcgcaccactgcactccagcctgggcaacatagtgagaccctgtctcaaaaaaaaaaaaaaaaaaaaagccagcatcctggacagagctgggggctacctggatgctgccaaaggccccagaagcctctcagaaggcccctgtgccacccccaaccccggactccagtcttacctcctcctggcccctgacctttctgggtatcgaaaatgctgggctgacccagctggctgaggagggggctcccactgctggggggctccaggtggttcaggtggaggtaggatgggtacagcccactgggcaggtgggagaagcctgtaacagaaaagagaaaagctgggctgggccaattcgtgctgctcaccaggagcttccttccagctcctggaaataaactattttggcagccgaccgctggtacagggcgccttgaggt

SEQ ID NO: 12688 - DNA, 768 bp, Artificial sequence
  DNA replication origin
cggggtgcccagggctgagggtctgctgtggggggcttcctgccgtattgtgctttctcaagccctgggtctggttgggttgatccaggaccatcttgcagcccaggggtggggccggagcaggggaaccctctttggtctcctggccagcatcagctccacacagctggggagaggcggcggtctcggggcggtgggtcggggcggtgggctggggcggcggcgcctccctggttgtctgcctgacggtcctcccaacttctctctgcaggcgaggccttcttgggcagctttgtggccagcgggatggggccctcggcctcgtcccatgggagcccagtgccactgccctctgacctgtctttccgctccccaacccctagcaacctgcccatggtgcagctgtgggccgcccacgcccatgaaggtaaggaacatgccggggtcggggctgagggctgctgggctgacgtcccagccactctggccacttcatgtgcccctctgttgtcatcgctgagctggggctggtgggtcccaggtcacctggcttccctgttgtttctcaaacgctcagggcttcttcttgtcactgtcacagggcatttgtatgagctgtttcctctcctttcagcctgacaccccatgccacagaccaccttccagtcctcctccggctcagctcagagaccccctcttccgcacccacttccatcacttgcttgtgacgacagattatctcatcattcatgaactacccgctttccc

SEQ ID NO: 12689 - DNA, 1069 bp, Artificial sequence
  DNA replication origin
tgctgggattataggcttgagccaccgtgttcggcctcattatattgtcattgtggttaaacacatgcttccttccctatcattcccgaagggaggcatgtttatctccattttgttgatgtgcaaaccgagacctggtaagggaagccccgtgcgccagggcctgcatgcttctctctgacctgtgacccagaggcctgccagggtcttcccttagaggggatggcgtttggggctcgtgggacagagcccctgggtggcagctgggaggcaccctgtccgatgtgggcctggccacgtggggcatggcggggctggctgtggcttccacccaggccctgctgatttccatcatgtttctgagcagcagtctgccccgtggcccctattggcagtgaccccggggtggggcctgctgtctggaggggttgccctccacggggctcccttagcggcccccacgcctgccgctccattcatcacggattcattccctaagccactgtggctcggtggtgccagccatgggctgggggacaccctgcagggctgcattctgagtccctgctttctggctgtgtgacctggcacttcccatctctgagcctcaccttctttttctgtgaaatgggcacacggggctggctagggctgctgtgggaggtgattctctggctggagggtgggtgtcctctctgggcctgcagagctcagcatatgagccccccgcctgtaagtcccccaccgccttgccctgtggcctctggaagtcccagtgcgccaccgacttcaggattccacctgcagatggggagaatggtgccgggccggatctgggctggttgggcggcaggggtggaaggccctcctccgagggtgcggggtgcccagggctgagggtctgctgtggggggcttcctgccgtattgtgctttctcaagccctgggtctggttgggttgatccaggaccatcttgcagcccaggggtggggccggagcaggggaaccctctttggtctcctggccagcatcagctccacacagctggggagaggcggcggtctcggg

SEQ ID NO: 12690 - DNA, 928 bp, Artificial sequence
  DNA replication origin
ggtggctcacgcctgtaatcccagcactttgggaggatgaggcgggtggatcacctgaggttgggagttcgagaccagcctgaccaacattgagaaacctcatctttactaaaaatacaaaattagccaggcgtcgtggggtatacctgtaatcccagctacttgggaggctgaggcaggagaaacacttgaacccgggtggcggaaggtgcggtgagccgagatcgcgccattgcactccaccctgggcaacaagagcgaaactcccatctcaaaaaaaaaaaaatttttttttgctgggcctgatgatgtgtgcctgtggtcccagctacccaagaggctgaggctggaggattgattgagctcaggagttggaggctgcagcgagctatgatcgagccactgcactgcagcctgggtgaattgaacagagtgagaccctgtctctaaaaaaagaaacaacactcgtgcaattgggtaatcccaaatagaagtatgtcctgggtggcaggtcacaggtggcaggttccagccactgtgatatggcaggaagtaaggaagatagtccccgccctcaaggagggaactgtctctcggggaagacagaggcatgaaatccacaaggaggctggcagatctgtttccgaggggttgtgggtggtcacaggtcacttggggcctgcttgggtcgtgtggctgttggaggcttctctggggcccagggagacccgaggtgggagtgaaggaggagcattctaggaggcctgggagttcgtgcctgacgggccaggcgggaaaggggcaggctcctgacgtgaccagggagaagtttgtttgttctggagagtgaggtgaggggggtggcacgctggcctcatcgccatagctgagtggggattgtgtgtccattttacagagtggcagactg

SEQ ID NO: 12691 - DNA, 1351 bp, Artificial sequence
  DNA replication origin
aagcaattcccctgcctcagcctcctgagtagctgggattacagttgtgtgccaccacgcccggctaattttgtattattggtagagatggggttttaccatgtctgccaggctgaactcctggcctcaagtgatctgcccgcctcgtcctcccaaagtgctgggattataggtgtgagccactgtgcccaggtgtgtgttttaggttttgacggtcattggtcttagcttctaaggtgtcgggtgagataataactggggtgagtaggcggcagccagttacttgatttggggagccaggtcttgagctcagcctagggcgagaggcagggagacccccataccgcaggttggtatgagggattccagtcaagtctttcgagaggccagtgagctctgggcctaactcagtgccccctggcaccctgaggcttgcatccttcttggtgaaacggggggatggcaactgctcggtccttgggtgtgggtgtgagcagtgggtggggcaggggggcactgtgggggcttggagtatagtctagagatggaaggagaccaggcaggatggcctggcatgggctgtgcttcttcggggtttattttagagcctcttttgtgagttgcgggatgccttgatcctctcctcaccctaatgtgtatctctttgcgttggccctgggaacattggaaatcacatttatggctggacagggtggctcatgcctgtaatcccagcactttgggaggccaaggcaggaggatcgcacgaggccaggagtttgagaccagcctgggcaacatagtaagaccccatctctacaaaaaagagaaagaaaaaaattagtggggtgtgatggtgtgtgcctgtggtccctgctacccaggaggctgaggctggaggattgattgagctcaggagttggaggctgtagtgagctatgattgagccactgcactacagcctgggtgaacagagagagaccctgtctttaaaaaaaagaaaagaggccgggcacggtggctcatgcctgtaatcccagcactttgggaggccaaggcaggaggattgcttgaggcctgcagtttgagaccagcctgggcaacatcgcaagacctcatctctgcaaaaaagaaaaagaaaaaaattagctgggtggccaggcacggtggctcacgcctgtaatcccagcactttgggaggatgaggcgggtggatcacctgaggttgggagttcgagaccagcctgaccaacattgagaaacctcatctttactaaaaatacaaaattagccaggcgtcgtggggtatacctgtaatcccagctacttgggaggctgaggcaggagaaac

SEQ ID NO: 12692 - DNA, 728 bp, Artificial sequence
  DNA replication origin
gcgagtgcacaggaggacccggccgagtggatctccctgggaagacaggaggggacgggcacggcgcggggcacttacccgggtgcggatggagattcaggccggccatgtacttcccgggcggcagcgggccgggcaagcccgaggcgggcaagcgtccggcagtggccgcgcccacgcggtggctgtccatggccaggccggacagcagcggcggcgggggaccgtgcacggaccgctggggcccgaagtctcggccatccatcctccgcgggagtgccgcgatcagccccccacccggcccgcaggcctagctcagtgggacctaaaagttcggcctcggcgtagtcccagagtcctcgggcggcgggggctccgcggcgtgcatggcggcggccagcggggcttgcgctcggcggcgggcccgcggcccggggcgcacaggcggccggcggtggggcccctccgggcggccaggcggagctgcgcgaggcggcgcacacggcgtcttggcggggaggagacaggccgcggaagaaatagaaagggggaaagaaaaaagggaaaaaaaaataaagtaacaagtttcagaaagtcgcctcgcccttcaggatcggggggtgccgactgagtggccagaaatgaaatcgggagtagcccctttccactgaaaaatgaaatccaaactccttccgccggcggcttcaggctcccgggacctggctcgg

SEQ ID NO: 12693 - DNA, 1843 bp, Artificial sequence
  DNA replication origin
gcggaggagttggcgcgccgagcgctcggcccggggagcggttttctaccaaaaaaaggaaaggcgggcaaaaagtgtgaggcggctgcgggtggcggaggggagcggcggccgcgggatggcgggcagcaggggcgcctagctgcgccgggagccggggccgccgccggagtcgttgtcgccggagcctggagccgtgaacccagccgcgccaggtacgccgccggtcagcctgccggcccccggccgggcgcgatggtctccaaacttctccagctcgccccccaaccacgcctgcccctcggggtgcgcggggggggatccccgctactgtctggctccggattgcagaatcggggaccagggccggcggggagggggcgccccgggaggggtgggggtgggctgctgggccccgggcacccacgcgagcccccagccccgctccggccctcctggcccggccgaggggcggcggttcctctctcggttcccagcaggcggcgggggagcccgggacgccgagacgttttcgattataggctgtttttaattaaaagccggaattcagccattttaactccatttaagagggggagaaaagtaaggagaacgcagcggagcccgcagatagccgaggcagcttctttgccagtgtgagggtgttccagggggcttcaccccgacttccccaaactggggcgcctgggcatactacgaggcgctggcttttaaagaaagctacccaaagaatctcttacaaaaaaaaatcacgggaagctcatcgcctccttaagacatgtatcctcggatgtggcgatcttagatttttccaaagtaaacgcgaatctggtaaccagagcctgatgggagagagggagggagggggtgtttgtaaccaaaaccgggttaaaataggcacccttagcaaagttggggagggaggctggagaggaaggccggcgggtttggctaggggttttgcagccgagggggtctcctgctcggggggctgggcgcggagtgcagggcgccgggcgggcacccgggagccggtggctttggcgtgatcggcttctcttaagagagcccaggcctcccggaatcaggaatgtgagctgctgcagacagagatcgagggaagggtgggctccaagaccccctcccatcctcacgagaatcggcaaaggacaaatcttttaaacaaacagctttaacctggaactacagggggatttacccaaaggtgggggaggcgccccttggcaggcccgcgttgcaaaggctttctttgtaggttattttggggggtggttgtggggggggaagctagagtaggagcgagacccttgatccctttccttcccctcttgacatcccccaaatcccccacgccaggccaggtcctcgggctgcaggagctcaggccagggcgttggaaaatgaaaccaaagcttgttttgtaggattctttccagtccttaggcgagaatgccacgtctcgggtcctcggactcgagctctgggactcacagtgccccccggggggagaaaggggggggaccacgagcctctttaaaaataataaacccgctttggaccctccctcctcccacccccagaaaaacaccattccgtcggcggttcaaggcgagctcaggaaaaaccaaactcggaaaagggaggcgaggtctccaaaaggttaaatattaaactttgcggatcagatagtgccagagtgttttgggagacacttcggaccgtttgtggcaaggcttcacggttttaaaccccggagcatttgacgcctaggaataaaataggaggtttgtatttacgccgt

SEQ ID NO: 12694 - DNA, 700 bp, Artificial sequence
  DNA replication origin
aagattttaattaaaacaagagaagcccgctctttcgccccgcgctgcggactcagcgttttcgcattgcccgttctgttttttttaaatcaatttttaaggcaactttttgggaggggggaaaaatgagcgagttagtgcccattcgttctattttcttttctccacttttagaaaaaagtggggggaggcttcgagaacgaacgggggggtgtctaatttaattccaggataaatttgaggaaaaaagttcagcctcttgagggcagtttcaagttgcccttcctggagcttcctgcgttagtttctaggctgccctcttttggaagctgtagctccgctggggaggagggaggagtgagaaggaaagaaaggaacaaaaatagccggagccgaggggaacaagccacggtgtccgcgtttggagctgggcgtgcgggtctcagtggcggcctcggcattcggggcggcgggaggcgcccggtgcatccccgggacggccaggagcaaagacggagaggagaggggggttagagaaaggaggtattgtgtctgtgtgccttaggggaggaggggactgcaggaatcgaataaacgcagtcgagctgcgcggggctgctggaagcccaggcgggggaagggggccgtgtgtgggggcgcagagcgcccttgagccttacgcagaggtcttgtgtgttcc

SEQ ID NO: 12695 - DNA, 1493 bp, Artificial sequence
  DNA replication origin
ccagggcacctgccctgcgtgcccacccagtgaggggttcctggcccagagttgccccctcagcatatcccagggggctggtgaccctgtaggcccctccactttgctaaagaggatacagggagggttggtggcccagaactcacgaaccactgctgaccaggaatggccaagggaggcccacacagaacacccaatcccacagccacctgctctagtaccacttggggcctctccagccactggcctggctgcatttgctctccaaaactgccactttcttttagtttttaagggacaggctcttgctctgtcactgaggctggagtccagtggcacaatcatagctcactgcagcctcaaactcccgggctcaagcgattctcccacctcagcctcctgagtagctgggaccacaggcacacgctaccacattgggtgtttggatggatgagtagatgggtggatgggtgggtgggtgggtaggtggatcggtgggtgaatgagtagatgggtgagtggatggatggatggatggatgagtgtgtggatggatggatggatggatggatggagaagtggatagatgagtgaatggataggtggatgggtgggtagatggatggacaggtgggtgggtgggtgggtaggtgaacggaagagtgggtggatgggtgaatggatggatggatagatagatagatagatagatagatagataaacagacagacagataggctaatggatggatgaattcgtgctttctgtcccttgacctggtctacaagccacttccccagctagacaaagagagcttagaaccccatccctgccaggaaacagacaaaagctgtcggggtcttttttctctctctcagccttacctgggacacacagagctttacggtggggccttgttccagttgctgcaggctgccattcctgaaggtcgggggacaagctgcctcttcaaccccagctctgctgggggctcctcagcggctgggggagttgtgggtggggcaggagacctggcgagaagctcacgggtaccctcacccacctcatcccgccctgtgcccagccctgaccccagccctccctctttgtacctcaccccgtggaaggaaacacactgaaggtggggaggggtgggccagagcctcagactcctaagacaaagggagaaaaatggaccgaagagaggcagggggtagacgcaggcactgccttttttcttttgtagacagggtctcactcttgttcaggctggagtgcagggcgccatcatagctcaccacagcctccaactactgggctcaagtgatcctgcctcagcctccaaagtagctgggacgacaggcatgcatcaccatgcttggccaatttttgtattttttgtacagatggggtctcactctgttgcccaggctgatcttgaactcctggcctccagtgatcctcctcagcctcccaaatcttggggattaca

SEQ ID NO: 12696 - DNA, 1328 bp, Artificial sequence
  DNA replication origin
agggctggccaccccctcggcccctgcagtgtggccaggcattgccaagccatggggtcaagtgtgcccacccgctccagtgcagatggggagactgaggccccgagaggtggtggccagcccaggaccacaggccaccctggggcaggcaggaggaccaaggctctgtctcttgagctcggcctctccacacagcctccctccaggtggttcaacgtccatgaccagcccccgtcactcgaggagccacttgggggtctccagggaggtcccttaagccctctcctgtgcactgcgtccctggctgtgccacgctgggtacgtgggctcaggttgtgccccaggactgcctctgggcaaagtggtggcccagctgctccctgcagaccctgggaggaggggagagtggggatggggaggaccctcctggggtgggactggggcctggagtgggagggtcaagaggatcagggcagcagacacctcctaggtcggccctgggctcagccctggacacgtggggatcctgaaatcatggcagcaccacggaggaggcctggctgggatgggacagtccccaggccatgacagtgtgaggaacacagagcagggtttggggaggtcacagccggcggaatgttctggaaggcttggctgaatcactgttagcaagactgaggaagctggaaaaagcattctggggagggagccgcaggtgcagagcccccgggtgggaaccgcagggccgtttatggggctggcagtgcagcttggtgggacctgcgcctctccctgaggcacagcgcgggcaggacaggtgtctgtgtgtctgcgaaagcctgctgagtctgtgggggccacagagaagctggggatggggctgagctgtgacagcgccaaggtgacaggtgactgtccgggtgacgggagataggctccgttcagggcatggtgaaggacttggggtgaagtggacacaggccagggggactgagcagagggacccagaggagctggaggggggtggcgggaggtggggcccctctgagctgaggcctggggccccacacagtgggggtggagtcgttgtgtctgagatgggaaccttgaaggcctgcggggaggtgatgtctcagctggagtcactgactgggggctgggtgagaactccaagctctcggagccgttggacaggagaaggggagagagtaggaggggacctaagccgggcacaggagtttcctggggctgagagtttcccatgaggaaagaagatggtgggtcaggcgggtgtgctccgcccccagtgcctccacaccccccaccct

SEQ ID NO: 12697 - DNA, 1032 bp, Artificial sequence
  DNA replication origin
gtggacatgtctgagtgactatgtatgaagaatgtgtgtaagaatgagttatgagtggactctgtggctcacgcctgtaatcccagcactttgggaggccgaagtgggtggatcacctgaggtcaggagttcgagaccagactggccaacatggtgaaaccccgtttctactaaaaatacaaaaatcagccaggcatggtggcgtgcacctgtaatcccagctactcgggaggctgaggcagaagaatcgcttgaactccggaggtggaggttgcagtgagctgagatcgtgccactgcactccagcctgggtaacagggcaagactgtctcaaaaaaaatttttttaaaagaatgtgagttatgtgagcatgtgtgtgctacatgagtgaacacgggcatgtgtgtgtaaatgagcacatctgtacttgtgcacgtgagtgtgaatgtgtgagctatcagtgtgtgggtgtgtgtggggggggtgtacgtgcaaatccacacaggtgctgcgtggagatgagaacgtgtgtggtgtgggtgtgagtgtgagcgtgcaagggtgtgcatataggaagctccgtgtgtggatgtgagcgtgggagcgtgccgtggaaagcatggggtgtccgtgtaagtagagtgcgtgtggggtgagcagaggtgtgtctgtgtggctggggtggaggtgtggactcaggcggtgtttgtggacatgtggaagtgtgagcactgctggaactgtgtgtgtgtgatatgggtgtgacacgggagagggtttatgagcctgagtgtgagtgtgcaggtgtgtgtgcgagggcatgtgtgtgggtgtggtgtgtgtgaatgcggagtgtgcgagtaaacgtccgtgtgtgaatgtcagagtgtgggatgtggcatgtgattgtcagagtgtctgaagtgtacgggtatgaacgggcgtgggcgtggggccgttggacgagtgagtgcacatgcgtgtgcgtgtgccagtctgcgggcgtgggtgagggactgatggagcgtgtgc

SEQ ID NO: 12698 - DNA, 1540 bp, Artificial sequence
  DNA replication origin
gccatgaaggccagcacggcatcgggctggagggtgccgctgcgagagaccaggcacaggcgctgcagcgaggggcactggctcagcgcctggaagaactgggcgttggcgctgaagtagggctgctccagcctgcggggagagagggcagctgtgaggtccgagggaggggctcgcaggccaggccagctgggcgtctggaggtgctgccagtggaagcttcctggcctggggcccagcccagctgttcccgccacctcccaccaataccactatcccttggagtactgggtgccgactcaggcccccagggtcccccttggagatctgatttggaggcgacccggtgggcctgatgcaagcagccagccagtgtctacagagcccggcttcaagtcaccagccgaggccatcagcatctgtgtccgcagcctgcctggtgcaccccaatgacccccaggcaccctatcttcctcaaacgctggtgtgctgggcagcggatgcaaagaggaccccacacatggcccctgcccttgggaagctcagctggacagggaggcagataaggactgaacaccatgagagagggcggtaatccgggaggctggtgtgggggagggagagggcgagaatctgggaggcagggggtaaggtgggcaggaacttcagccagatgggggccacttcagccacgacagatgggaggacagcgctggatggctgcagggccaaaggaggaggccgaggggagtggggccaagctaagaggttggcagccagggcaggggggaggcccaagtccgcaccaaggctacagtgacagagaccaagacgggagaacccaggggaaaggggaggacttgggaaagggaagtaggggacgacattctagatccttcctggggagtctgtccatgcagacagaaagcagaaggacaggccatgtctcgaagtacagtggcagatgtggggatgtggcgctgctgaggacaggcccggggggcccttggagaaccaggctgtgggactgggcaagacctggactgtggcaggttgtggggtgcagcgagcccctgagataagaatcaagagggagcagagaggctggaggggaactcacgtgacttcaggggctgccaggaactcccggggtggggggaggagccgctggagggacgggctgaggcgaatggggaggggctagtgtggactgagctgcgacgcccccccacacacacactatgcaggagtcctcaccttgggacctgagggtgtggccttatttggaggcaggtttgttgcggatgcaagggagttaagaggaggatgcatcctgcatgatggggactctaaatctaatgactggttccttataaggccaggtgaaggcacagagatacccagacacagacagaaggcggccaggtcacaacagaggcagagactggggccacgtgtccaccagccaagcagtgccaggcgtggctggcaggcgcccgagttcctcctcaccatcctcagaaggaatgaaccatccctg

SEQ ID NO: 12699 - DNA, 1284 bp, Artificial sequence
  DNA replication origin
cctcagcctcccgagtagctgggactataggcacatgcgaccatgcccggctagtttttttttttttttttttttgagacagagtctcactctgtcacccaggcttgagtacaatggcatgatctcagctcactgcaacctctgcctcctggattcaagcgattctcctgtctcagcctccagagtagctgggattacaggtgcccaccaccatactcggctaattttttttttgtatttttagtagagacggggtttcaccatgttggccaggctggtctcgaactcctgacctcaggtgatccgcccacctcggcctcccaaagtggtgggattacaggcgtaagccactgtgcccggccgcctggctagttttttgtattttttgtagagacggggtcttgctgtgttgcccgggctggtcttgaactcctgggctcaagtgatcctcttgcctgggccgcccaaagggctgggatcacaggtgtgagccactgtgcccggtccggagagtctgttaagtgtggcctcctagttgatgggcctaagccaagccctgagtccaggctgaggtctggcctgggagagttgctttggcgtcctcagctcataggtggcctttagccacctatggatccaggtgagcccacggattgggctggggcacacgtgacaaggattggccaggaagaggaagaagaatgtggaagggagaccgagcagaggctgtcagcaagggaggcactggccggagggagggggtgttccggaagcaagaggcagaggtgacggcagccaccgcgggtggaggggacctttgggctcatgtgacctctgccaggtgcttttcatgggtgtacaggtcttgacccctttgatattctcaacaacctctgagtgtcgacacagttgtacccacttaatggatgaagaaagtaaggcccagagagtgcatgaacttgcctaggtcacatggctgcttgtctccggcctcccgaggtcagcgtgatttcatggtccccgatggcctccggagtctgggacggaatccccgtggccaagggccttcctcaggagcagggccatggagaaggcgcggagaggcctgcgggttctgtgggttttgtgggttttgtgggccagcctgagagaccgaccctgctcataatgccatctctgtggacaaactccagcctgtgcccagcagcccctgagaaccacgtctgctctgagctgggtactgcctgttcagaacaaatgccggttcccagacgctgccagctg

SEQ ID NO: 12700 - DNA, 1218 bp, Artificial sequence
  DNA replication origin
ccgcttgcagtgcttcaacatgtctgagagcgcgggcatgtacaccaccttccccatcatgcccaggttggccagcgacagggaccgcaactgctggcactgcaggccgatattgaccagcccggagcccgtaaggacgctgggcagctgtgcgagcgtcaggtgccgcaggaaggccagctggccgatggcggccacctccgagtccccgacactctgtgcgcggctgcagggtgggagcgagttgcggatggcgggctcgttgcggggcatggcggaggagaagttggacccaatcagctcgaggtgttccaggaagggcaggttcttcagcagagaccagaacacggaggagggctgggggcacgcctggcccgagaaggggctgggacaggactgcacgcccacacgcactttcttgccaaagccgcgcggcactgcgtgcatggccggctgggcgggcgcgcggtcggcgcgcggcgcggagtcagcgacagagcagacaggcagggagagggagcgcaggtgacgcagccgggccaggagctggcagaggtggcggcccaggccctccgagctgtggtggtgggcggccgagaggttcaggtggcgcaggttgcagcaggacgccaccagagtctccaggatgctgctgtcgatgtcgtcctccgccttgcggagcagcgagtctggggacaggcagtggacgcagccgctgaggttcaagctggccaggctccgcaggtccttcccgccgttgatgacctgctggatcagatggccgcctgacagggtacagcggctgaaactgaagtagaacgggttgttgaatttcatgtgctgcaggagggaagagccgttcagccaggacttgggcagctgcagggcatccagcacgacattgcgcgccatggagtccaggaggttcttggtggcgccgctctccgcgaagctgccagggacggagatgaggaaggcgtggaggttctgaggagtgcggtcgctaagcacagccaggtagagccgcaccacctcctggttgatgtagccgggggccaggcgcgcatagaagacccgcaggttctggtagtgcggcacgttgctctggcccaccataagctggcccgagaggatggcgccctcgcgcgtgcggtccagaatctcgaagtagagcagcagcttctctaggctggtgcagcagggcaccacgccgtagga

SEQ ID NO: 12701 - DNA, 2343 bp, Artificial sequence
  DNA replication origin
gccaggctccgcaggtccttcccgccgttgatgacctgctggatcagatggccgcctgacagggtacagcggctgaaactgaagtagaacgggttgttgaatttcatgtgctgcaggagggaagagccgttcagccaggacttgggcagctgcagggcatccagcacgacattgcgcgccatggagtccaggaggttcttggtggcgccgctctccgcgaagctgccagggacggagatgaggaaggcgtggaggttctgaggagtgcggtcgctaagcacagccaggtagagccgcaccacctcctggttgatgtagccgggggccaggcgcgcatagaagacccgcaggttctggtagtgcggcacgttgctctggcccaccataagctggcccgagaggatggcgccctcgcgcgtgcggtccagaatctcgaagtagagcagcagcttctctaggctggtgcagcagggcaccacgccgtaggagggagtgaacagcgtctgcttgagctcccgcacgcggctcagggtggccttgcactcgctgctcagctggctggcgtcgaagccggggctcacgtcgatggccagcgagcgcaggtgctgcagggccgagagcatcttggagaggcgcagggaagtgaggtggcagcccgagaggttcaccttcaccaggctgcggcagcgggccacgtgttccacggtggagccaggcagccagtagcagccagccatgctcagctgctggatctcccggccgatctccttcaccagctgcctcactttgtcctcgctcgcctgcgggacagaggcagggtggggagaggaaggaaagggctgaaggcacctacgggtctccaaccctcagtgcgcacactcccccttgcagcagctgctccaccgggagggaagctccccacctctcgctgcctacctgcccgcactctgacctggagccaagagtccccagctaagtgggactggtagaggggtgcagccacggtagaaaacggtttggcaggtgggcacggtggctcatgcctgtcatcccagcacttggggaagccaaggcagatggatcacctgaggtcaggagttcgagaccagcctggccaacatggtgaagcccgatctcaactgaaaatacaaaaactagtcaggcatggtggtgtgcgccttttatcccagctactccagaggcgaaggcagaagaatcgcttgaacctgggaggtggaggttgcaattagccaagatcttgccactacactccagcctgggcaacagaaagagactctgtctcaaaaagaaaaaaaaggccgggcccggtggctcacgcctggaatcccagcactttgggaggccaacgaaggcagatcacctgaggtcaggaggtcgagaccatcctggccaacatggtgaaacctcatctctactaaaaatacaaaaattagctgggtgtggtggcaggcacctgtaagccaagctactggggaggaggcaggagaatcgcttgaacctgggaggcagaggttgcagtgagccaagatggcaccattgcactccaacctggtgacagagcaagactccatctcaaaaaagaaaaaaaaaaaaaaacggtttggtggtggttcctcaaaaagctaaacatagggctaccacatgagccagcaacttcactcctagggacagacccaaaggaactgaaaactgagactcagcctccctactctgtgcctgttcactgcaacagattcacaagaagccacaggtacaaacagccccagtgtccatcaacaggtggatggatgaatcagatgccaactgtccacacggggaaatgtgatccagccacaaaggggaagggaggccgggcgcttcagcgcatgcctgtaatcccgcactttggaaggccaaggcagacagatcagttaatctcaagggatggagaccagcttgggaaacatagcgagaccccatatctaccaaaaagaaaaaatatattagccaggcgtagtggcgcacacctgtggtcccatctacttgggaggctgaggcaggaggatggcttgagcctgggaggtggacgttgcagtgagctatcatcgagccaccacgcccagcctgtttctgttttttgagacaaggtctcattctgttgtccaggctggagcacagtggtacaacaatagcttactgcagccttgatgtcccggggttcaagagatcctcccacctcagcctcctgagtagctggaactacagacatgtgccaccatgccatgctcatttttctcttttttttttttgtacagatggagtttcaccaagttgtccaggcgg

SEQ ID NO: 12702 - DNA, 876 bp, Artificial sequence
  DNA replication origin
cgaggtgggcagatcacctgaggtcaggaactcgagaccagcctcaacatggagaaaccccgtctctactaaaaatacaaaattcgccgggcgcggtggctcacgcctgtaatgccagcactttgggaggcagaggcgggcggatcacgaggtcaggagatcgagaccacagtgaaaccccgtctctactaaaaatacaaaaaattagctgggcgcagtggcgggcacctgtagtcccggctactcgggaggctgaggcaggagaatggcgtgaacccggaaggcggagcttgcagtgagccgagatcctgccactgcactccagcctgggcgacagagcgagactctgtctcaaaaaaaaaaaaaaaaaaacaaaattagccaggcatgcctgtaatcccagctactcgggaggctgaggcaggagaattgcttgaacctgagaggcagaggttgtggtgagccaagatcgtgccgttgcactccagcctgggcaacgagagcgaaactccatctcaaaaaagaaaagacaaaacaaaaaaaaaagaaaagcacatcttgtaacagattatagggaaaaaaggaggaatgggtcagagaggctgggaaagagaattccagggaagacgtgctaggaagatgcaacatttgagttatggccagaaccagcaagaccagggggaaagtattttccccagagaagggacccttgcagtgcgtagatgagaccttgagtgtttcacacatcatggaccagagtggctgagcagaggagaaaggaggaggacaggcaggtggcaggaggcctggaggagagaaacttcagggttctgtgaaactctcccagatgcttgcctgggccagaattaggcccca

SEQ ID NO: 12703 - DNA, 1468 bp, Artificial sequence
  DNA replication origin
gcaatgccagggtacatggtggtgccgccagacagcactgtgttggcgtacaggtctttgcggatgtccacgtcacacttcatgatggagttgaaggtagtttcgtggatgccacaggactccatgcctgagagggaaatgagggcaggacttagcttccacagcacagccccgaggggtaaccctcatgtcaggcagagccgggagacagtctccactcacccaggaaggaaggctggaagagtgcctcagggcagcggaaccgctcattgccaatggtgatgacctggccgtcaggcagctcgtagctcttctccagggaggagctggaagcagccgtggccatctcttgctcgaagtccagggcgacgtagcacagcttctccttaatgtcacgcacgatttcccgctcggccgtggtggtgaagctgtagccgcgctcggtgaggatcttcatgaggtagtcagtcaggtcccggccagccaggtccagacgcaggatggcatgggggagggcatacccctcgtagatgggcacagtgtgggtgaccccgtcaccggagtccatcacgatgccagtggtacggccagaggcgtacagggatagcacagcctggatagcaacgtacatggctggggtgttgaaggtctcaaacatgatctgtaaggcagagatacaccatgtcacactggggaagccactggggacagccaggccagacgggggacatgcagaaagtgcaaagaacacggctaagtgtgctggggtcttgggatggggagtctgttcagacctactgtgcacctacttaatacacactccaaggccgctttacaccagcctcatggccttgtcacacgagccagtgttagtacctacacccacaacactgtcttagacacctagtcagagagacaaacaccagaaaaagagctcatctgggaaaaagcaaatagaacctgcagagttccaaaggagactcaggtcagagaagagagtcctacggaaaacggcagaagagagaaccagtgagaaagggcgcagctccgggaggccaggaaggagggaggcggccaccagaagaggtagcgggccactcacctgggtcatcttctcgcggttggccttggggttcaggggggcctcggtcagcagcacggggtgctcctcgggagccacacgcagctcattgtagaaggtgtggtgccagattttctccatgtcgtcccagttggtgacgatgccgtgctcgatggggtacttcagggtgaggatgcctctcttgctctgggcctcgtcgcccacataggaatccttctgacccatgcccaccatcacgccctgggaaggaaaggacaagaagccctgagcacgggcgcagcccccaccccggaaaccgggaggctcctgtgcagagaaagcgcccttgcctcccgcccgctcccggggctgccccacccagccagc

SEQ ID NO: 12704 - DNA, 2878 bp, Artificial sequence
  DNA replication origin
gcgggtgtggacgggcggcggatcggcaaaggcgaggctctgtgctcgcggggcggacgcggtctcggcggtggtggcgcgtcgcgccgctgggttttatagggcgccgccgcggccgctcgagccataaaaggcaactttcggaacggcgcacgctgattggccccgcgccgctcactcaccggcttcgccgcacagtgcagcatttttttaccccctctcccctccttttgcgaaaaaaaaaaagagcgagagcgagattgaggaagaggaggagggagagttttggcgttggccgccttggggtgctgggcccgggggctgggggcgcgcgccgtggcccccgcgccccacgctgggcagtgcccggttcggccccgcatggccaggcctgcccccggcctgcccgtctctcgggccccccacccaccgcgggacatcctaggtgtggacatctcttgggcactgagcgcccaggtggggtgggccagggtctgcacgggtgccagggccctgggttctgtacgctcctgcagaaggagctcttggagggcatggagtggccaggcagtcactcccccttgccgacttcagagcaactgccctgaaagcagggcctgaggacctctggctgtggggctcagctagctaaatgtgctgggtgggtcactagggagagacctgggcttgagaggtagagtgtggtgttgggggagtcaggtggcttgcggccacttagaagtcgcaggaccacactccccaggacagggcaggggccagcggtccagtggctggaggtggcccgtgatgaaggctacaaacctacccagccgcagccctgggaaggaaggtgggctctacagggcagggcaccttttaccctggagctgcctgcttttgagggtaacagtcacgcccagccaagacaaggcctggggcgttagtgggtgacctaggcactgcggggcgggggggctgggtctacacagcctgggtctgggcccaccgtccgttgtatgtctgctatgcgcagccacagctgaactgccctcccagaccatctggaggccgctgggggactctggggaccaagactccatgtgccacagaggattgggggcggggcggtgctaggaactcaaagccagcctgggaagaccctgtccttgtcaccctttcttgccttgggtctgtccactgagtagcacacaagaccgggtgggcagggtccgttctgctccgggaatcacagactgtgtgtacccaggtggtgggcatgcagcgatcagtggcgtgggaccacagaggggcattcggctcagcctagaggaacctgccttcctcctcctccccctccttggaggtggtgacaagaagctggatttttacacaaaaataggaagagtggtgaggtgggggcacctcaggcctgcggggctctttgcagcgcgtagtaggtgttcactgagtgtgtgtcgcaataggcaaagatgagtccatataaggacatggaacctgtggccaggaaggaggctgcttgttccagttcacggtacaaggctgtgctcagccaatgggacctgctcctcccttgaaggttgcagaggccacagcctggtgggaaagatgaccaccacccagcacacagtggcagacacaggttcacagtccagaagacttgctgagcctcctccatcaccaccccacgcaagggcaaacttccccagcctgtatactccctgcctcctggggatgggactgtcctgtccctggccttgtatctttcagctgcaggcgtcttgccagctgcctcaggacctgccaacgttcacccggctggcgttgtggggcgatgggcggggggcccttcttgctgcctgttgatgagggctggttctgggggttcgtggaacgttgaactgggtggagtgctgggggggtggggtgggcagtggggatgggaccggatctgcagagcagggatgagaggttgtcaggtgggcggctccaggcagcaaggtggggtgcagagcagacctgatccccaggcaggacctgtgttgccactgggcctccattcagctggccaagagacaggagctccagccccaccccgccccgggctgcagcattcctggcctgtcctcctggcttgtggttccctctgtctgcagcggccacttcctagtgctctcctatgcacccttcaagtcccatcccagaaagcccctctttggggaagcgttttagcctctgcagccacgccttcctccctacctcagaccaaggcttgcagctggcatttagaactgggcctcagccaccaggctgcgagccctcccagggtctccgtcacccccactccttcccactacacccaccccagggctcctcgctgttgaatgagtgactgcctgggtgtcctcaggtggcaggttggaggtggccgagcagcctggggtgaggggcagggaggagctgaagagagaaagcaagcagcggagcaggaaaagaggaagtagaggtgcctggccagggggcgggccgagcaggggagaagtgaacaggttctcttctgtgcttgggaactttgccctgtaagggagctttcggagctgtcactggggcacgcacgcagcccccggagaaccctcggttgaactcagccaaggggactccacctgcctggctgggacttttgttttttcccctccaagcctttgctttggtgacacccccaccctgcaaggcctccaggcaaccaactcttacagcgcagacccagggaccactccttggccctcccgcaaaacaaccacccagccaccttgccctgggcactgcagcgccctccctatcctgccaggagggaatccaa

SEQ ID NO: 12705 - DNA, 1255 bp, Artificial sequence
  DNA replication origin
ggattacaggtacaagccaccacatctggccttgatacctgttttgatcactttgggatcatggcatgtagttaggactcagtaaactcagctcctacttgcaaataggaagaaaggaaggaaggaaggaggaagggaaggaaggaagggaaggagggaggagggaggagggaaggaataaaggaaggaaagaaggagggagggaggaaggaaggaataaaggaaggaaggagagagggaaggaagggagggagggaaggaagggagggagggaaggaaggagggagggaaggaaggagggagggaaggaaggagggagggaaggaaggagggagggaaggaagggagggagggaaggaaggagggagggaaggaaggagggagggaaggaagggagggagggaaggaagggagggagggaaggaaggagggagggaaggaagggagggagggaaggaagggagggagggaaggaagggagggagggaaggaaggagggagggaaggaagggaagaaggaaggaggaagggagggagagagggaagaaggagagggaaggagaggaaaggaaaggagaggagagagggagagagggcagaccccgttctatgtcagaagggacagaagtaacatccggaagggatgtgttatctgtcaagtgagtgagcatcctgtcccaggagtgtgtcccaggagggtgtgggcacacccttggcaggaatggtgtcccgggactgccagagctgttgaggaatagcgctagggaggaaagggctgggccggcttcgggctcacaccttccaaggatgtcagagaggagggtgtgtcacaggaagtgcctgggtctctgggctgtaactgactcaccgggactctgataatattaatactcagacgccagactgcagcctgttctccagaggcccccaggggaatgaatcaatgactgtctgatatcctgaatgtgtgttagaggctgacctggaggaggcagctaacccagcttgaggaactggcaaggctttcctgaggaagggtcttttgggctgggccttgaagtctgaataggagtccaccaaagagacaatttagggaggggttgacacggggggatgttggggaaactgcaagtatctgatgtgcctgggctctttgggaagcgtctggagagactttggtggggaggtctggactggacaccatttctatcctggccagtacccagcaaagtaagtgaagaggccgggcgcggtg

SEQ ID NO: 12706 - DNA, 1201 bp, Artificial sequence
  DNA replication origin
cgtggccccagccgggctacgcacgctgcgggcctcaatttcttcaatcgcaaaatggggacagagcgcgggactcgcggggaccggcggggggtgctgtgggcccgatccggagtggggactggggtcagggtcgtggtctacgggcccggcgtgggggtcgcggcaggggggctgggctgcacccccgggccggcgagggctcgcagtgagggaggggaacacggtgggcgggggcggcccgtggacccaacgccccctccccgggcgctcccaaacctcgccttttatggagaggaactcgggccaagtgggccgggccggccgaggggcggggtgggggccggtgaggggcgggctgggggccggccgggtccgcgctggactcgcacggggcctggcttatctcccggagcgcctcgcggccctgggacgcgggaggcgccgcgagctgcggcccacgtgagccgcgcgggcctgggagctcccgataacaactatccacccagcccgggcagagtcggcccccgcaccccaagctgagactctagccctggccccgggttcgaaccccaaccatgccagaaggcccgtctggggaagggggcgaaacagtctcttctcgggcagcagagagatctgagggatcaccgacttgggggcagatggggccaacacctctaattagctctgaacgagcaccccccccagtgcacttgtgtgtacacacacacacacacacacacacacacacacacacacagctctgggactccagaaggactcttgtctggggccagggactcccagtagggaaatcttgctccaaatgccacccgctccgccccacccaggttgtccagcgtccacctagggccctaggaggccgttggctccattatacagatgggcactttgaggccagacacggcagggctaaccctggatgaggcaaaagttctgatctcctgctgctgggccgtaaggactgactagacagctccagacaccaggaatgttgttctagatattcccaaggagggtccccatgagccgcctgacaggctgtgatttattggttttcttttcttgcttttttcttcttttgagacagggtctcactctctcacccaggctggagtgcagtggtctgatcacggctcatgtagccttcacctcccaggctcaaatgatcctccca

SEQ ID NO: 12707 - DNA, 1124 bp, Artificial sequence
  DNA replication origin
cccctccgccgccccttcggagaagcagccgggcatttcgaaagtcgcggccacacctcggaccccctccgggccccgctccgaaaacgggaagcccgcggaggaagtcgctgcggctgccggcgggccggatgactaagtttggcagagcgacccgcgccgtttgccttttatggcggactcgtgggccgcggacgtggccggctcagggcccaccctgcctctgagccacaggggccgcgggccgggggcgggagggggcgcgctcccccgagggacccccgggctccccgctgcccggctcctcgccgccctcctccccctagggggtcaggcccggccctggcctgcagcaggcagaggggaaactgaggcccagagagaggcgagacctgccccggccccagagccaggcgggtggagccacatgagagccaaggctcggcttcccagcctcgcctggaccgagctgactcacgctccccagtggggtggggcgggagggcgcagctgcatttatggagcacccggtgtttgcttgatggtgtgccttatgtctaagtctcactgcagtctcgccggggcgggcttaggtccgatccgtctcaccctaaatgcaggttcttctgagaggggtgtgcggcagggcgggggctgggggtgcgccgggccccgcccttgccccattcctcctgttcccctgcactgacccttggctgggtgttgtactttgcacaacccgttgtgcaaacccggcagatgcaaacctccccccatttaacagacagggaaactgaggctgtgagtaaaagtatcgtgtgcccagggtcacgtaagagctaagtggcagcgctgcggggaggggggattctagtctaagtgcgggggagggccccccatccctgaggcccccaatccctataggtgtaaatatacacatgcaccccacttgcagaagggttcgtgtgcgtctatgaggagctggcttgccacctggaggcacgtgtggcgtttccggccgttcagtccccaaccccgtggccccagccgggctacgcacgctgcgggcctcaatttcttcaatcgcaaaatggggacagagcgcgggactcgcggggaccggc

SEQ ID NO: 12708 - DNA, 1778 bp, Artificial sequence
  DNA replication origin
atttttttgtagagatggggtcttgctacattaccaaggctggtctcaaactcccagcttcaagcaatcctcctgccttgacctcccaaagtgctgagattacaggcacacgccactgtgccttgccttggggtcttaattcccctatcagggtcatgggggacttttctcagagagcctgggtgcagggctcaatacccacaggtgttcaaaaataacatcaggaaaagtagctgttctccttttactttctcttttctcgtccttcccctaaccccaccctctcctgccctcctcccaggccggctctggccgcccacagccttctggggctctctgggctaagatcccgcaacagtgctccggccagggctctaggcctgaccggctggcacctgccaccccagtgtcctcactgcccagacaggctgcctgaagatccggccgcctggaatcggaggtctggtgacctgcctgcctgtgtcccgttgggtacactggctctgagtctcacccggagtgaccctggccccggggacaagacaggacaggatggaacagcacaggcagggcctgggattggctggccccatttgtcagaaacacaagccttcccaaccaggccaggtcgggccaggcaggagctgggtgcagagagctgtgggcagagaaccttcccatccaggaccctcaccccagcaagtcctccccttcccccggggagaaagggcagcccctcaccagacgcctttgctgagcacctactctatgcccaagcctcgtacttagcactttgcctgcattatcgcatatcattttaattacccccaaagagattattgccccatgagtatagaagaagaaactgagggtcacagtggttgaccaccatgtccaactctgagcctttgtcctttcgctttcttcccttttttggaaagtgtgaaatcttttttttttttttttgagacggagttttgctcttgttgtccaggctggagtgcaatggcctgttctcggctcaccacaacctctgcctcccaggttcaagcgattctcctgcctcagcctccgagtaggtgggattacaggcatgcgccgccacgcccggctaattggtttctccatgtcagtcagggtggtctcgaactttcgacctcaggtgatccgctcaccttggcctcccaaagtgctgggattacaggcaggagccaccgcgcccagccgaaatatttcaaagatacagaaaagtacagaaggtactataatacaccccgaatgaagcaattattattttgctatgttttattcagttgttttctcaaagaaatataggatctcagaatcagtggatgcccccctccacccccagctcatgctcttctctgtgccccctcccataaatacctgcccctacatctataaataatgccacctgtttgctgtcaccagaaaatgtggggcttgttctagaacttcacataagtggggccagacagtaggaacccgtctgtgtctggggaacactgaggtagacccccgttgtccaccatggccctagtccctgccttggcgcagtgactgatcccctgttggtcccacccaccctcctccctgcaggaacgggttctgggtggtttcggcctgggcgtttttcacattttacagactggacgtcaccgccttgcacttttctcccaaggaggcctcgctgagatttctcggagcaggcacttgggcctccctcgccggcgtcttccgggaggccactccctgct

SEQ ID NO: 12709 - DNA, 1247 bp, Artificial sequence
  DNA replication origin
cagcaggcagtcggccggcggctgtgatcccagccctgacaagactccttatctctgcggcagccgccagcccattgtccagggaaggaagacgacaggaggccggccagccccgtccaccttcccccacccgtcttccccctcccccacccctccctgtccttcccagcctgccaggccccctctctgaccagacacagcccccggataaccaggcagcaattttaccagaagttgtatagtgaaaacgctgtatcacgttaaaacaaaaggaagtgtgttctagactgaagtgcacacggggcatgaatttttaagctaaaacaagaaccggagaaagcctccttccttctcttcccttagttccttcccctttccgtttccttccagaataatcagtcccggagccatttgctggagcagagccaggtgggcgtcccagtggggtgggggagggtggtggctctgagcagcgtcaatggggtggagagggctcgggggtggtggggtaggagagagctggctgcttggtggacagtcaaaatgggggaggatgagatctcattgagggtagggagctcaattaggcggggccggtgacctgggaggggtgactaagctgtcctggggctaggagatatccctgccaaaggacagcaaggctggaggacaggtctacaaggtgaaaggtgacagtgcccaggagacacgtgctacacccggaggggttgacaaaagaagcagatgtggccaggcatggtggctcccgcttgtaatcccagcactttgggaggccaaggcgggcggatcacctgaggtcaggagttcgagatcagcctggccaacatggtggatcctcatctctactaaaaatacaaacaattagctgcgtgtggtggcccgtgcctgtgatcccagctcctcagaaggctggtgcacgagaaccgcttcaatccgggaggctgagattgcagtgagccgagatcacaccactgcactgcagcctgggcgacagagtgagactccaactcaaaaaaaagaagcagatacggtcaggcatggtggctcccgcctgtaatcccagcactttgggaggccgaggtgggcagatcacccgaggtcaggagttcgagaccaacctggaagacatggcaaaaccccattgctactaaaaacacaaaattaggccgggcatgggggctgacgcctgtaatcacagcactttggaaggctgagatgggcagatc

SEQ ID NO: 12710 - DNA, 979 bp, Artificial sequence
  DNA replication origin
ggttgttcatgtctgggggacaagagcgaaactccatctcaaaaagaaaaaaaaaaaaaagaacatttccaggccaggcacagtggctcacacctgtaagtcccagcactttgggagattgaggtgggaggatcacttgaggccaggagtttgagaccagcataggccacatggcaagaacccagtttctacaaaaacattttttttttaaattagctgggctcggtggtgcacacttgtggtcccagctactcgggaggctgaggtgggagaatcgcttgagcctgggaggcggaggttgcagtgagctgtgatcgcaccactgcatttcagcctgggcaacagagggagactctgtctcaaaaaaaatcaaataaagaaaaaagaacatttccattattgcagaatgttctattggacggcgctgggccagatgcctgccccaagccctgggacacccaaacctggtgaaagtgccaagctcccatctgggggtgctcacggaaggggccgggagctgggattacaagcgtggaggcaggcgccaccccagaggaggtgggtgatgtctgagccagagtctttgggatgagcagggctttggcaggcagctttgttgggcaggcaacaggcacagcaggtgcaatggcatcgaggttggagaggtggactggcggggagaagagaagggagggtggcaggagagatgggcagaggccccccaggagcccagagccttcagggctttgggccctcttggggcactggggagccacgggagaagtgtggggtggagaggggcgccctggatttgaccaccttcaggaacctaccttggctgcccgggtgggtgggatggaggtgatgaaggtggaggtcgtagcattgtcactgagagcgatgcttattctgatttttgcccccgtgagcctcagaaatcggtcagaacagtgctcgggctgggcgtggtggctcacgc

SEQ ID NO: 12711 - DNA, 1851 bp, Artificial sequence
  DNA replication origin
ggaggtgaaggttgcaatgagccgagattgcaccactgcactccgacctgggcgacagagaaagactccgtctgaaaaacaaacaaacaaaaccccgagattctcttttcccccgtccggagctctatggccatctggagctcgttctgtccacaaggacacatttcctggcagcagctgtggaccagggctcactcactcacatctgtacccaatctagagcaggacaaacacctatcacctgcactggcaatggacagaggacagtggcagccccatcaccagaggcattcaagccaaggcattttctatcgtctatttatctatctatctatctatctatctatctatctatctatctatctagatgagatcttgctatgttgcccaggttgaactcctggcctcaagcgatcctcctgcttcagcctcccaaagtgttgggatttcaggtgtgaaccactgtacctggctggagtgcagtggcactgtcatagctcactgcagcctccacctcctgggctcaaggaatcctctttcctcagcctcctgagtagctgggaccacaggcatgcaccatcacacccagctaaaccttgattttttccatagtatatggctcagggcagagcaaagaagcacaaaaacatgttggcttgcggttgagggctgatgggagggggttctggccaaagcccaaaattaacagccacaacgtcagtgtctgtgggaggggttgccaggggcgtgcgggttctggggctcaaggccctgccggtaaacccatttgaagcaggatggcaagaaggtgacaccatcttcccccgcgcactgaaagcccctggctgggattgcctggggcagacacaggctcggaccagccccagcaatcccagtttatcagcgagccggctgagggcccggagttatctcagtgcccggcctgagaccttgtgggcagcctgtggtcatgctggcattccaggggccttttggcatgtggggaatgtccaggaaaagcctcagccttcggtgaggcgcagaaaagggaagtgtccctagagggggtgggtgagggcgtgggaggtggtgtctgcagggaatgtcccctttgggggaggaggatggagggttgggattctgaggatgggggggggggctgtagccagcaccatgtccctcctgtgtgaccagctcagagtcccatgaaattggggcttgggaggggaagggacactggcctgggaaccagagacctgggctggtctggctcacagttgctggacctctgtgatccgtgtcaaaaaacgagaacaccaattcctgtcctgcccactcaccaccaggtgggacctgaaccctggcatcgccagcattgggaatgtcggccactgactcaaccactctcccggagacctatttgggccacccgaggcgggtgcctgggccacacggaggggtcctggtggtcttcagggcagcggctgtggggctgaagcctcaaggaaccacatctctgcataggagggccaggctgcagggcctcggagacaacctagttgggcgtgttggggtctgtgggtcccaggtcctggcctcaccgggtccccaccgcgctgtcagctcccagcctctttccctcgtctgcctctgggcttctgtaaggctatgtgctccaaggccacctcctccaggcagccctcagacccccaccttcgcccagtaccgatctgcaccgtggtctctgaagtctccatcgtgacctcaaacctcgctcgtccttgctcctagcgaggcttggggtcggggtgtccgaggtgggggacatccgggggggttaggtggctggcg

SEQ ID NO: 12712 - DNA, 1865 bp, Artificial sequence
  DNA replication origin
cgcctccacctccccgtctgcccggccttcctccacctcctcccgctgccgggcggggtcggcctccgctggtgggggggggcgcggggtgtcagcccttccccccagcccctcctcccgcgtctgccccgcgctcgaggccgcggcctttgtgagcaggggggcgggtcgcctcgactgggtcctccctcgccccctttgtcctgctccatctctgcagatgggaaaaccagatgcggcggggcgggggaggggatcggcttttgcggttcacccctgcagaggagccccccgcgccgcccccgggcccagggctcgggtcccgaggttccccaggaggcggtctccctcctcgcgccgcggcccgggaacggcgtggcgcggatggcggccctccaggcaccccgcccttcgcccgccgcgcgcgtctccaggccggtgcgctgagctccgctccgcgggcgaccgagggcggcttcagcgcgagccgggagaccccaggccagctccctcgggaagcccctaccctctggtgaacccatcccctagggcgctcgccgggaacaattgactgcaactcgatccgtcccctccggggcctcctgcaggcacggctatttgcgaccggcctgtgcgccactctttcccttctttctcagattctccccgaggggctttctcttccttttggcgtcctcttccactcctggcggagaagctgttccttgcttgcagacagaggccccgctggagggaggggcgtggggggatctttttccctggataggaagtcggaccccaggccttggagatggctggacgggagcccagtttgtgtcctcatccctcctcttggaaggagccctcctgacggcccccctcttggctgtgggctctgcaggagggggaaagaccccccatggcagtgggggtgagggtggaggcctgggtggggtaatggccattttgtgcctgaagtttgctaccttaagtcccagagaggtgaagctgcttgtcatgggtcacacagcaagtgaccacaaggaagcagcatgcagaagtgggtgcatttggctccagaaaccccgtttcctgtttcccacagcgcatggcgggcagagctcctcacctgatcagcaggcattgagccctactaaggggacctgctgagccatgagtgaaccagtggggttcacgttctcttggggacattacgaagtgtcaaggaaaaggcagcgggtacaggttattagatggctgagtcctttctgagcaggacatttgagctggcctgaaggatgaatagaaggtggcaggtatggggggggtgctgtgtggaccagcgttgtaggctgtgggtgtctcctgtgcaaaggtcttatggcaggaaggtacagagaaagcccagtgtggctgggaggaagcttgtgaggtctgggccacgggaccttgggtgagagcttagtgcagggctatggtccttgccttggggttgcagccacagcctcccgtggggaagaagtcgcagaagtaggtggccttggccctgggggccaggaagttgcagagagcctgagggtgtttttggcgagcctgggcagataactcccctctcctgagaagcttgctgggggcgtctggtgtgtgattcaggctgatagggtgggaggaaccagaaattgcagccaggagaggtggtggtgatggctcagcttggagttgaaagggatgtgggacggcgcgggggtgggggtacttgggggccgaggttggggctcctctggcctcagatcttggggtccttatctcgtttctatgtcagccaactcccggggggcttttgggaactggagtctgcaggggtg

SEQ ID NO: 12713 - DNA, 1283 bp, Artificial sequence
  DNA replication origin
aagtctcattgagaaggagcctcccggcttcctgcatttgttccaggcgggctggtaagcgccctgcttatttgcaaggctgtgtgaggacgagccctgtaaaccctaggacgaggctgtgctaatgtggtttctgttccactgtctccccttctccttttgcccctctttctggggaacctggagcccctgatgccctctgttttttcctgctgctggggtggacctagaacctctccctccatcctttctgctgctggggtgggcctgcaggaggctgtcctcttacctggtccctaacttccctccgatcagcggggcttcagcggagccccagcgcattggacaggtggtgctctgtggccggcacaggccagggcccagggtgcggcccctgcctgtaggtagacatgcaggcccttctgagcagaatgagggggcggtgagggcagctgtgcgggtgtggctggcctgacggctccctgcagccctgcggcttctgtgcagtgggggtggggcgggccagacctttgcagggcctcttggctggtggagggctgagtgagcagaggccccagccctcgtgttccctggggtgtggccttaggatggtcccggcaccctgggacccagcccctgctcaccttatcctcctcccgtgcttggctggggtgtggtggctgagccagcccacccagtgcggtggatgctcgtcggagggcagagggtgggctaccggcttaaggggccccagggaacctggggggtggagcccaaggggttccaagaaggggcggggccaggaacccatagacaagagggtggggcagggaaagggcgtggcaagagggccacccacctccggtccagagagccagccagacccttactttctcttgctgtgtgaccttaggcaaggacatgccaccaccggccttagtctccctctttgtgaagtaggatgaagatccccacctgtggagcagatgtggggctgcatggttgggtcaggatggaacaggatggggaggccgggcgtggtggcttacccctgtaatcccagcactttgggaggcaaaggtgggaggactgcttgagtcctggagtttgggcaacatagcgagaccacccccatctctacaaaataatgttaaagttagccaggtgtagtggtgagtgcctgtggtcccacctactggggagactgaggcaagaggatcctttgagcccaggaggtggaggctgtagagagccatgcttgggccacttgcactccagcctgg

SEQ ID NO: 12714 - DNA, 1227 bp, Artificial sequence
  DNA replication origin
gggtccagtgtggatgcagagggcgctccccgcagcactgaccccagccccgaccgaggggttccctgcccagcagctgcccacaggagaacctgcctttgatgttgtaggcgccatcgttgaactccagctggaagacgtcatagctggagcggttggcgtccagggtgcccgtgaccttgcggcagccgatgaagccatgctccccgcggaacacgatgatggggcggttgatgagcttcatgaggaagagctctgagtcccctgtcccagaaagaggggagtcagtgagcctcctggcagggagtggggtggaggctggggtgaccagagagggagggccaggagctggggtcacacagcagtccccagggtaggacagtgcggggccagtccggggggatgcccagcacagagcaggccttggctggggctaccaagtgaccacggcatggccagaccctccaggactccaggacggctccagggaactggggctttagtgttacctgctgtctccaccgaggcggccagctgcccattcttcttggaggtcacaaacttgccattggacgccctcagtgtgatgcgccggtcacgccactcgatgtcaaagtagcagctggcattcctgggggatggcgggacagggtcaggcggggtagcccaggcaaggtggtgggggcggtgacaggtgggagcgaggcactcacttgctggaggcggtggactgcacgcccccggtggccgtcagcgtccagtacttgcccgtgtgggtacggaaggcacactttttggtgtcgcggtcgatctccagctggaaggtctcctggtcggtctcctcgtcctgattggcagacaggtccatacctgcagagaggaggccttgggctggtactggggccccacgccccctagttctggcagaccatagccctgagctcacagaactacacacgcaaggtaacaccacggggtggggtgggcggccgagtccccacagtggcacacatgagaagcagcagagagcacccaggaacgcaggcagggccggtcagaggccaaggcaagctacatctgttcccacatgactttccccagttagagaaataataggggccagggacaggggctcatgcctgtgatcgcaacactttgggaggccaaggcaggaggattgtttgagtctaggagtttgagaccagcctgggcaacatagcaagaccc

SEQ ID NO: 12715 - DNA, 887 bp, Artificial sequence
  DNA replication origin
gtcccaggcaagcctggctgtagtagcgagtgatctggcggggggcgtctcagcaccctccccagggggtgcatctcagccccctctttccgtccttcccgtccagccccagccctgggcctgggctgccgacacctgggccagagcccctgctgtgattggtgctccctgggcctcccgggtggatgaagccaggcgtcgccccctccgggagccctggggtgagccgccggggcccccctgctgccagcctcccccgtccccaacatgcatctcactctgggtgtcttggtcttttattttttgtaagtgtcatttgtataactctaaacgcccatgatagtagcttcaaactggaaatagcgaaataaaataactcagtctgcagccccaggccggcctgtgtgtgtcttggggctgaggtgggtgggggggctgaggtgggtgggagggctggcgggacaggtaggcgccctggctccccagctcagtgctgggagtgtgcagtgggagggaggccgtggctccagtgggtgctccggagctcgtgggcccagcacacctccttaagcgggggatggagcgctgggagggggtggactgtggcccatgcgacccccagagccattaggaggagttctgtggtgagaagtggctgtggctcctcgtaggctacgtccaccatgcgggggacctcgggggtgtctggcggtggcacgctggatgttgagaaggcgcagcccagggaacactcaaaccaggagaccccacattatcctctagttgacatgtgcccttcgactaggggacttggtggtaggggcagctccgcccccatactgcgaggatccgggccttccacttccccagacacagcaggttggggt

SEQ ID NO: 12716 - DNA, 1004 bp, Artificial sequence
  DNA replication origin
acacagcaggttggggtgcccctggggctgggagatgctgccctgggcccctcagggggcggccgtggtaggatggaccgggccgagcgtgcagaccctgggcaggtccctacatcggaaccagcagccctggggatatctggcatatcagaggctgaggactgtttccagactttaccaaggccacagtcagggcgacctgggttctgagcctccctttgcatcctaggctgcagggacaggggctgggcagaggctcgcggacctcgtgcagcttcattcactcccaggtgcccctaaggatagcagctgcgagaagactgaggggaggagcagtaaggcgcagcctggagcggagggacctggcgtccagtcattgtgcgctgggaaggcggtgatggcgacggaatttgggacacgcggggcgtcccgggggcagccagggcactgcaggccggagccccctgttcccccgcatcctccccgccgtcggcagcagagcaagcgctgattggctgctgatgacgcaactgggagggctgcgctgtgataggtggtccctcgggggcgtggggcgcaagtcttgagattggcaggggcaggtggctgctgcagagggaagtcggggtcacctcagcgaggttccggcggccacccctctcccctcccccatgaaagccaggctggaagccagaaaaatcccagtgactggaagggacagattaatcctccggaaccaaactctttgagacctggggaggagggtgggaggcactgggaagggggattggggggagcctggctcatttccacccatggagctgacctagaatgaccctaaggtccccggagccaccagctgattccgaattccattcattctgcaaaatttggcgcctaccacgtggccgagattcccgaggctgcagccaatgagcagcatagtccgatgggggaggctggaagggccgttcacgagatctctcgggaggaatcggtaggag

SEQ ID NO: 12717 - DNA, 1198 bp, Artificial sequence
  DNA replication origin
gagagcactgggttgggggtaaggtaatagatcaacagcatcccaaggcggaagaatttttcttagtacagaacaaaatggagtctcctatgtctacttctttctacacagacacagcaacaatctgatttctctatcttttccccacatttcccccttttctattcgacacagctgtcatcgtcatcatggcccgttctcaataagctgttgggaacacctcccagacggggtggcggccgggcagaggggctcctcacttcccagaaggggcagccgggcagaggtgctccccacctcccggacggggcggctgccgggcggaggggctcctcacttcccggacggggcggctgccgggcggaggggctcctcacttctcagatggggtggctgcggggcggaggggctcctcacttctcagacggggcggccgggcagagacgctgctcacctcccagatggggtcgcagcctggcagaggcgctcctcacatcccagatggggcggcggggcagaggcgctccccacgtctcagatgatgggtggcccggcagagacgctcctcacttcctagaagggatggtggccgggaagaggcgctcctcacttcccagactgggcagccgggcagaggggctcctcatatcccagacgatgggcggccaggcagagacgctcctcacttcccagacggggtggcggccgggcagaggctgaaatctcggcactttgggaggccaaggcaggcggctgggaggtggaggttgtagcgagccgagatcgcgccactgcactgcagcctgggcaacactgagcactgagtgaacgagactccatctgcaatcccggcacctcgggaggccgaggctggcagatcagtcccggttaggagctggagaccagcccggccaacacagcgaaaccccatctccaccaaaaaaaaatacgaaaaccagtcaggcgtggcggcgcgcacctgcaatcacaggcactcggcaggctgaggcaggagaatcaggcagggaggttgcagtgagcagagatggcagcagtacagtccagcttcggctgggcatcagagggagactgtggggagagggacagggacagggacagggagagggagagctatttatttatttttgagacggagtctcactctgtcacctaggctagagtgcagtggtgtgatctc

SEQ ID NO: 12718 - DNA, 883 bp, Artificial sequence
  DNA replication origin
ctgcctggccgcccatcgtctgggatatgaggagcccctctgcccggctgcccagtctgggaagtgaggagcgcctcttcccggccaccatcccttctaggaagtgaggagcgtctctgccgggccacccatcatctgagacgtggggagcgcctctgccccgccgccccatctgggatgtgaggagcgcctctgccaggctgcgaccccatctgggaggtgagcagcgtctctgcccggccgccccgtctgagaagtgaggagcccctccgccccgcagccaccccatctgagaagtgaggagcccctccgcccggcagccgccccgtccgggaagtgaggagcccctccgcccggcagccgccccgtccgggaggtggggagcacctctgcccggctgccccttctgggaagtgaggagcccctctgcccggccgccaccccgtctgggaggtgttcccaacagcttattgagaacgggccatgatgacgatgacagctgtgtcgaatagaaaagggggaaatgtggggaaaagatagagaaatcagattgttgctgtgtctgtgtagaaagaagtagacataggagactccattttgttctgtactaagaaaaattcttccgccttgggatgctgttgatctattaccttacccccaacccagtgctctctgaaacatgtgctgtgtccactcagggttaaatggaataagggcggtgcaagatgtgctgtgttaaacacatgcttgaaggcagcatgcttgttaagagtcatcaccactccctaatctcaagtacccagggacacaaacactgcggaagaccccagggtcctctgcctaggaaaaccagagacctttgttcacttgtttatctgctgac

SEQ ID NO: 12719 - DNA, 1325 bp, Artificial sequence
  DNA replication origin
gtggcgagagggggccacccggccgctcagcgcctttgtcgctccagcctcgccaccgcaccgggctcgagacgcccagcccagccccttggcccgatcccgcccgggcctcggcccgcgcccctcagctcggcggccctcacggcccgcgcccccgcccccacccccggagctccacagaggcgcccctcagagaggccgcgtcgcctcacagacccgcccaggagctcgagcgcgccccgcagccgacactcactcgtcactcaagtcgccggctagccaggcaggttcggcggccttcgctaccgcgccgcttactcctcagaagccgcagctgcgagctccgtggcagccgctgcactccttccggccctgccgcggcgtcacctcgcgcctgcgcacagcgccccctcccgactaaggacaggaagaaccatagaggcactccgggtactgcggaggagggaccggggggctcaccatagagagggccgcctagtcgcgcctgcatccgggctctccgcctgcggagacttgactcccccacgaggcaggagggtgaaaggaaaggagacccccatatccgaccccacaaggagccaccatctccccagagctgaaaagggtatggggcaggtggttgtggatgtttactcgatatctactgatttgccctaattcgtttggcaagtcattcattcattctgcaaatatattctgcggatttcctgtgggccacacactgttctaggaattggggaaattaagagtaaagtgggtcccatggctgggcacagtggctcacgcctgtaatcccagcactttgggaggccaaggcgggtggatcacttgaggtcagacgttggagaccagcctggccaacatggtgaaacccgtctctaccaaaaataaaaaaattagccaggcatggtggcggatgcctgtaatcccagctactcaggaggctgaggcgggaaaatcacttgaacctgggaggcggaggttgtagtgagccaacatggcgcccctgcactccagcctgggcaacagagcaaccctccatctcgaaaaaaaaaaaaagtaaaatgtgttcctggcctcaggaagtttaggttttagtgagcaagtgaataactgactaaaatactgctcctgctgggcacagtggctcatgtccataatccccgcgctttggaaggccaaggcaggaggatcgcttgaggccaggagttcaagaccagccttagcaaaatagcaagaccccaactcttaaaataattgctggccaggcgtggtggttcacgcctgtaatcccagcacattgg

SEQ ID NO: 12720 - DNA, 879 bp, Artificial sequence
  DNA replication origin
gtaacccccttttttctctcctacttggctcatgcagacccccgatcgcagccagtggtgggcactgagctaggagggaaacgaaggcagggtgtggaggggggttatttcaggcgtctgggctcattcaaaacatcttctgagtgcctgggtccgatctgggggagcacggagctggggtcccttgttggatgcagtcctacagaggtgttggtcacgttaacatgtgggggcgatccaggggtagccgccctgttagttacctcaactatcaggatgcatggacacccaggggagggaggatcagtttcaactggggaaggagtgacttcaggtcagacttaaataagatgttgcagatgaaatggcaatagggtctttgaggaccagggaggagcatccctgaggggtaatgatgggtggtactgaggactcagcacaggggaggcgcccagggccgtgaggctgggggcggggtggggggctgaccagcaaggtccgaggctggggtctccctcttgctccagctgcaaatgcagtacttcaaggcagaggcatgatcatatttgggtgttggtcaaagtatccctgcaggaagtagagttatgagggttggactgagggtgtgagacaattgagtagggagacaccagatgaaggcgtacagtgtgagcacctctgttgtagacgggtgaggagaaggaggcggctgccgcagttctgtgtagactgttcttttccagcccttggtgaagaaaggtgagcaacacttggggtggtgtgatgtgatggagttagcagaggatgtctgtctttgatgtttttttttttttttttaagatgaaactcacttgagttggggagagaatgaaactggta

SEQ ID NO: 12721 - DNA, 1429 bp, Artificial sequence
  DNA replication origin
agtgtgagggggatgttcagtgtgtccacaggagaggcaagaacagaatcagaggtcaagcagctcctggaaccgcccgcaggactagggattcccgcccccaccccccaacacttccttctgtcaccccatggccgttctgcttcagggcgactttgtgaagaatgtcccgatgaaccacggcgtgtacacgtggccggacggcagcatgtatgaaggcgaagtggtcaacggcatgaggaacggattcgggatgttcaagtgcagcacccagcctgtgtcctacatcggccactggtgcaatggcaagcggcacgggaaggtgggcgaggtggccacgtggagggcaggtggggcaggagtgaagggggtgggcggacatggggggggcagccatgagggggcaaggtcggggaggtcgggggggcagaaagggggtggggtggccatgtggagggcaggggaggggctgggtggccacatggagggagagaagggggtaggggctagcggcgctgtccagggcatattcactttttgtttattgaggcgaaattcacatcacataaattaaccattttattaattttttttttttttgagatggagtcttgctctgtcgcccaggcgggagtgcaatggtgccatctcagctcactgcaacctctgcctcccgggttcaagcaaatctcctgcctcagcctcccaggttgctgggactacaggtgtgcaccaccacgcccagctaatttttgtatttttagtagagatggggtttcgccatgttggccagggtggtcttgaactcctgatcccaagtgatccacccacctcagcctcccaaagtgctgggattacaggcgtgagccacactgtgcctggccgtatgcatgctttaataggctatttattgagttgtgttgttgttgttgttgtgtgtgtgtgtgtgtgtgtgtgtgtgtgtgtgttttacagcagattgcttgagacatattggagggattgggggtggtgacttctagacagcagcatctgcatggctgcaagaaggaatgagtttgcctgatcatgagaaagaagatagaaaaattctctctcacacacacagataaacctgtgaaaaagccttttgaggcttttctatgtagatcaaacaaagggtactctatgctcacttatactcggaggcggtaaaatgagtagcatgtccaaatgggtaaaacaacagtggatctggtgcctaagagagagtgaccttccgttacatggaaggcgcaactgttcactccaggtggcaacagacaggatttctctaggtacttaattgactaatagttactggatagaatgaatatactcgaatatgatgaatacagtcattctgtgccttaatgtgatactttttattttattttattttgagatggag

SEQ ID NO: 12722 - DNA, 1294 bp, Artificial sequence
  DNA replication origin
gtgcaatggctcgatctcagctcactgcaaactccgcctccagggttcaaacgattctcctgcctcagcctcccgagtagctgggattacaggcgcctcaccacacccggccaatttctgtatttttagtagagacgaggttttaccatgttggccaggctagtctcgaactcctgacctcaggtgatccgcccgcctcggcctcccaaagtgctgggattacaggcgtgagccacggcgcccggcctggataaatcttttaaaacataaaagtctgagtgagtccctggccggccggcacagatgccggggtggggccgtgaaccggttgggacgcgctcgctccggcctggggggacccgggccagcagccggtcgccgcgcgtgcgcactgggcggggggccccgcgctcctacctgcacgtggccagcgcccggcgctgggccgtagctcctgccgtgcacgttggggagccggtacatgcaggtgggaagctccacacggagaggcgcgccgcccccgtgatagggctttacctggtacatcggcatggcagaaccaaagcaaaagggggtagcgcgtgccaaaggccaacgctcagaaaccgtcagaggtcacgacggagaccggccacctcccttctgaccctgctgcgggcgttcgggaaaacgcagtccggtgtgctctgattggcccaggctctttgacgtcacgaagtcgacctttgacagagccaataggcgaaaaggagagacgggaagtatttttgccgccccgcccggaaagggtggagcacaacgtcgaaagcagccaatgggagttcaggaggcggagcgcctgtgggagccctggagggaactttcccagtccccgaggcggatcgggtgttgcatccatggagcgagctgagagctcgaggtgagcggggctcgcagtcttccggtgtcccctctcgcgcgccctctttgagacccacggcattccaacctccctggaaatggggggaacatggccgaggcgcgtggcgaggcagccccctggaggccccggagtggcgacctcagtgttgcagcgatctcgtgccccttgggtgcgccttgaggccgaggcaagctccttcggggtcctgggctgcgggcaaaggattcggccctgtgaggagttgggttcggcctgtcccagacaggccttgcccacatcccatcacagggccgtggacttgaagcgggagcgtgaaatccccatagactgaatgcatttcctttctacctgttctctctccccttttatttt

SEQ ID NO: 12723 - DNA, 2616 bp, Artificial sequence
  DNA replication origin
tgccggcctgcggcgggcgggaaggaggcgggagcttacctgacccggctcggcgctcgctccatccccctcggccgccgccgccgccgccgcacacagcccagccgcccggcgggggacaatgacgtgcctccatccgggcaccgccgccgccgcctccgggtcagcgccgcgcccgccgcgcccctccgggccgccggggggcgcgccagggccgcgcccgaacgcgccgccgcccaggggccgtcgcacaagaagcgcggcgcgcagctaacaagcacggcgagtgtgggaggggtcgtcgcccaagagccgtgggcgaaggcagacgtcgcgcgtcaccagagcgccggtcgggccggcagagggagcgcgctgattggctgggctggtcgcgcgtctgcgcgccggcgaaagggctccttccgccctgtgcttccctgggcagagccagacggcgcgcggcgggcgtaggactttgggctttcgcctcgtcctgcgcttgaccccagatgcgtttccagaagcggggcacctggggacgcaggagtctgggatccccgtcccccgaaaacggacttggctccgagaaatcctccgcttcgtgggcttcgccctctgcaactaccttgcgcctcccttggcctagcggacgcagcctttattttttgtttcttagaaacaaggtctgggccgggcgcggtggctcacgccttaatcccagcattctgggaggccgaggcgggcggatcacgaggtcaggagttcgagactagcctggccagcatggtgaaaccctgtctctactaaagatacaaaaaattagccgggcgtggtggcgcgcgcctgtagtcccagctactcgggaagctgaggcaggagaattgcttgaacccgggaggcggaggttgcagtgagccgagatcgcgcctctgcactgcagccctccagcctgggcgacagagcgagagtctgtctcaaaaaagaaaagaaaagaaacagggtctgtagcccaggctggagtgcaatttcacgacctaactcactgcagctgcgacctcccgggctcaagcgatgttcctgtcttagcctccctagcagctggggctacggacgcgcgctaccacgcccacttaattttagggtttttgtttgtttgtttttggtgtggagttttgttttgtagggacagaggtcttactgttgcccgggcaggtctaagattcctgggctcaagcagctccccctccgtggcttcccaaagtgttgggattacaggcgtgagccgctgcacccgactaattttttaagttttgtttttttttttttttttgtagagacgggggtctcgctatgttgcccaggctggtttccaacttctgagatcaagcgattgtcccacctcagcctcccaaagcgctgggattacactccggagccaccgcccaagacctgatgcagccttcaagtccgcctgaccccaccggtgcgccactgtccatcagactcacacactgagttacagaaagggattttctttttcttttttttttttgagacggagtttgctcttatggcccaggctggagtgcaatggtgtcatctcggctcactgcaacctgtgcctcctgcctcagcctcctaagtacctgggattacagatgcccgccaccacgcccggctaattttttgtattttgtagagacagagtttcaccatgttggtcaggctggtctcgaactcctgacctcaggtgtggaattttaaacctggctctgaaggggatagacccctgttcaccccgtccagattttatctcaaatcctagcattgtacaggcttaggagacaactggaccagttcttgctccagagtgccagatccacacatccaatcatttattggctgtctccacctcgaggcctaacagagctagttcatctctgcatctcccctccaccatgagcctgcttctccctgcactgattaaggacctggtattctgtgctcaccagacctttcctctctcactgcctctttccctcccctggtgatctaaccctttacaccaactcatgtttacctggcctccccagcggctgctgtcctgaccctccctgagtcagcctttcttcgctcaacaattccatctcaacagtctcttctctgttgctgcactccccaccctacagtggcttgggtggtcttccaaaaaccgtcagatcacttgactcccccactctgagcattctatggctcacagcaaagtctaaattccttagctaggtatcagaaactccaagttccctttcctcttttatgtgtttcaaccataacacactcctcaattccagtacccagccctaccccactactacatctgcttgtagaaagcccacccatgctgcctcttctgcgcagcccacagtgtgtccccacaggcacagcccaccacacctggctaatctttatttttttagagacgggctcgctatgttgcccaggttggttgtgaacccctggcctcaagggatcctctgcttggacctcccaaagtgctgggattacaggcatgagccaccacaccaacccagcttcattttccatttcacgctg

SEQ ID NO: 12724 - DNA, 819 bp, Artificial sequence
  DNA replication origin
cagccgcgggccgcccgggaccccgccgctctgggggctgcggcgccaccgcccgcccgggccaggccgctggggagggggcggcggccgcggcgggcgggcaccggggtagccgggctgcgcggcgaggccgggcccccctggttgccatggacactgcgctcccacccccacccggccccagcccgccccttcggcctgggggccgggcaggcaggcgggaggctcggggcggccggggtgggcgtgtgctggccgctgaccgcggagtccggcgtccccggcccgcccgccgccccccgcgtggctgccacctcccgccccggagccccctcagagccccgggccggcctccccgcccccactgcatccctaacagaggcaaagttttcccaccttgggcgccccctccccaggcctagccacctggctgctccgtggagagtccgaggtgcccacgccgggcggagcggccaccccgaagggagaggagaagccgggtggcgcgtccccaaaagcatgtgtgcctctctagcgttttttattttcggggcaggaagagccagcttacctggaacgggggatccgttgcagatgttggaaatgaaaattggacggaacaagttttcccatctaggactttaacccctctcacatgcatgcagtggagatgacttttgttaatgactcttaggaggccgtggggtcacttgtttatgggaaaacatgttggttatgtaaagtcaataccctgacagcaaaactgtttgagaaactagttaacgcctccttttcaaggtaaccacagaatcctaggtt

SEQ ID NO: 12725 - DNA, 898 bp, Artificial sequence
  DNA replication origin
ccgcagccggagagagcgctcgtccagcggggagcccgccagagagagcaggagcaagactgagggccaccgtcaccggcggcgccgcacctgcccccgggagcgcgaccgccaggaccgccacgccccggagcaccaccccggccacggcgacaggctcagccctggcgagcgccgctctctgggcaggtgcagtcaccaccactcccgacaccggagcggggtggagctggactgggtcagacaccactacaccgagggcgagcgtggctggggccgggagaagttctaccccgacaggccgcgctgggacaggtgccggtactaccatgacaggtacgccctgtacgctgcccgggactggaagcccttccacggcggccgcgagcacgagcgggccgggctgcacgagcggccgcacaaggaccacaaccggggccgtaggggctgcgagccggcccgggagagggagcggcaccgccccagcagcccccgcgcaggcgcgccccacgccctcgccccgcaccccgaccgcttctcccacgacagaactgcacttgtagccggagacaactgtaacctctctgatcggtttcacgaacacgaaaatggaaagtcccggaaacggagacacgacagtgtggagaacagtgacagtcatgttgaaaagaaagcccggaggagcgaacagaaggatcctctagaagagcctaaagcaaagaagcacaaaaaatcaaagaagaaaaagaaatccaaagacaaacaccgagaccgcgactccaggtgagcctggggccttgtgctccccgaggcgctggcgctgctgtcagcagtggggcctgtcccttctcactcgactcaggaacaagtgaccagccaggccacagttgtatccgtc

SEQ ID NO: 12726 - DNA, 1250 bp, Artificial sequence
  DNA replication origin
gactcgagacgcatcactgctgtggggtgggcaggtgcatgctttgctggtgaatgtggggcagagagggagtgaggggtggaggaggggtggttgtgttgagtctgaaggctgctggtgcaggcctggcggagaagaaggggcctggtagagagtggggccagacgtggctggaatcctgggaagagagagcagaggaaggaccctggggagctgccctgtgtgagggacgtgcagaggaagaggagccccgcggggccaggctgcatcctcccccgatggctggtgggatcagtattttaaaaagcccagagacttaattggagcctcaaggtctaactcggtcttgatccttgtgctaaatccacggcagcatcagacgttgctgaatagctggtgcgggaggctgcagctggccatggggactgcagcccctgcctccggggctcactcctgggcgggcagacggtggctaaggcagacaggtagcaggggtggtgccacgcagccaaggaacgcaaggaagggaagcagtgagcgggggcggggcgggttgttgggctgggggttccaattacaggcagggcagccagggagacctcagccagaggggatgcctgagggtgggagtgtctgctgggcctggtctctgaggcaggcatgtgtctgcccagcaaggcagcagcagcttctgaccgcagcgcccagtgctgtaggtggggctttggataccgtcctgtgggctatggctctgccttatgtgtgggagttctgaaaggaggaccggctggtggcagctcgggacaggcagggctctggtgatcacctggcagcagcaggagatggtggcaatggggacagagaagtgccaggatcctggatatttactttttaggcagagacaaccggcctcgctgctgaattggttgtagttacaaaaagatgagccatcagtaagcgtgtctcgagttatggaacggaaggagactgtcctgggtcttctcctttctgtctctgcgcccccaagcccctgccagagctgtaccccaggctcgggaggaaaacgtccttcctgagctgggcagaagccgcccttggccgtgaggcggtgttggttctgatgcggcttcccatggctttggtgtctccacaggcagttcttatggagcttcaggctgcccggggaggcgcagaagattgatcgcatgatggaggctttcgcttctcgctactgcctgtgcaaccccggg

SEQ ID NO: 12727 - DNA, 909 bp, Artificial sequence
  DNA replication origin
caaatcttcggcttcataccttgttctcgtttacgtggactgtttgctcatggccttacctcaactgcagactgcaatgttggcagcgtttttgtgggaccctcgtgatgttgtgctcacagcgcagcctggggctgaacagtgcgctgagagttcgcaacatataagaatcctgcagccgcagttcaggcttatcagattgcgtttctggaagctgtacatccagagaagggtgcaggcctggtgagtctgggaggggtgtctggtgcggcccttgcagctgtgactccatttctttcagtccatcagtctctggcgagagccggagaggttcctattaattcccacagccgtgggagcctggcatagccccgtagagggcctgatggaggcacaggatgggcgggaatacaggcaggtcctgtggcctgaggagctgccctgaggatgttagcttttgtcctgaggggcacggcaagcctgtgtggggcagaggcatgcgggctgactcgagacgcatcactgctgtggggtgggcaggtgcatgctttgctggtgaatgtggggcagagagggagtgaggggtggaggaggggtggttgtgttgagtctgaaggctgctggtgcaggcctggcggagaagaaggggcctggtagagagtggggccagacgtggctggaatcctgggaagagagagcagaggaaggaccctggggagctgccctgtgtgagggacgtgcagaggaagaggagccccgcggggccaggctgcatcctcccccgatggctggtgggatcagtattttaaaaagcccagagacttaattggagcctcaaggtctaactcggtcttgatccttgtgctaaatccacggcagcatcagacgttgctgaatagctggtgcggg

SEQ ID NO: 12728 - DNA, 1676 bp, Artificial sequence
  DNA replication origin
ccccgcccggcgggaggaggcccggccgcgacccgggccgcgcgctgaggagccgcccggtcgcctgcgcgctccctccggcggcgtccccagcccgcggcccctctgctgccggcccccggctcgccggctgcgggagtggcctcaagatggatgaagacggcggcggcgagggtggtggcggtgagtgtcggaggtgtggtgggctcgccggcggcctggggtcgggggccgggggctgggggtcgagggcgcggcgctgggccggggttcgccggaggagacggggtcgggggcagcggcagcggcgtccgctggaggcctgaggcacgccgggccagggccgaggctgggtctccgggggccgagggagggggcgggccggggtcgccgttcggcgctggcgagggtctgggtaccaggccggggctgccgcgggctggggtcgccccggagtctcgggccggggtttgggtgtcgctcctctggggcgggggaccttgcggggcgaccttccccgcatcttgtcgccaagggcgttcatgccctccggagcccggcgtttcggacgccccctttcagctcaggtgggcggaagcggctgagccggtgggaaaccgggaggggaaagttttgcactggaggctcctcgagtgtacaggacgggagggcaggggaaacggttggaaagcgtgacagtctgcttggctttgggtcagaaacggtcgctggatttgctcgaacggggagggggccagctggagttcagttcagggtagacgttttaggaaacggcagacgcgacagattgagcaaaaaactccgtggagccgagggtgggagacacgagctgcacccagcacagaggcaagaccggagagccaggtgtgcccggagccaggtgtgctcccgagtgggtcgggtcgatgcgcgtcgtggcccaggtggtctgtgtctgacgttcggtttcctcttgctggaggaatcgtgtttgttggaaattatttagtggaatacaaatgactgctgggtcatgctgggaattagattttaaaaacagaggaacgtgcctctgtatggagtgggtgttcgctttggaaagcaaagggttaatgcccgtgtttttacaggaacagccgaagttgaggttctctagactttttttttttttcctgaagatctcctttgagctgacagagaaatcatcagaatcatcagaaccccatgtaataagggagcagtttagagaaatcttaattacaggctgccggtgcagctgcctgtaagaatcagcagtattgaatgcttcaggatgaagtggttcatcatcaaggtgccttccagaattcaagtgctgctcagagggagatgtttttttgctgaaagacgcgatgcagccaggatggtgggaagttggcacccgtcatggcatttggcgagttcagttcttatagttgaagctaggggtagcactgtggcaccgagtgggtgtgttgatgggagcgctgtggaacgaaggcgcccagttgcgaaccctcctacagtcaggctgtctggagccatgagatcctaaggaatgggttcccggtggatgtcgtgtttcctgcctgtcacaatttgggcatagctgttttcccttgttagaaaagaaagacaactgtaatatgcagacgttg

SEQ ID NO: 12729 - DNA, 1539 bp, Artificial sequence
  DNA replication origin
gaccccttttctggtgcctctttgtcactcaagctgtcaaacacctttgcacgcagcagtgtcccttggctgggtgtggtggctcatgcctgtaatcccagcacttcgggaggtcaaggtgggaggatcgcttgagtccagaagtttgagacaagcatgggcaaacatggcaagatctcgtctctaaaaaagaatacaaaaattaaccgatgcatggtggcatgtacctatggtcccagctatttgggaggctgaagtgtgaggatcactcgagacactgcatgccagactgggcaatagagcgagaccctgtctcaaaaaaaaagtgtccctcgtgggtttggttgcatgagaatgcttggtgttcaattcttgaggttattagaagattgaactttgaaatcatcccgcaaccttgaaccaaaaggtgaaattgtccactttgatagatgacaacggaaggatcctttggttcaatggacagcttgtaaatataaaacagttgctggaaaattatattagagatgagctatctcctccattacaatgtttgcttttctttaatgcgattgagttccaacagaaaggcttgggaggggccacaagcaatgcttcaggagttactggaagagagatatggggagtgagagaggagatccatcgatgtggagcaggggccaggggaggccttctgcccaggaggcctgtgctgaggaccctggctgtgcccaagggaaactgaattcagagctcctcctgcatcataaatccaggacagctggcagctctccaaggaagactggcgctaaactccaagggcatcagccgccagattggccaacccctacaatgccctttgagagctgagccccaggtgtgttgaatcgggattccgttccaacctcatgaccacattcatttacaagccctgcattttgttaatttaaaaatgcactcaccaggagggaaggaggagaggctccattaaatataagacagctgaaaggctggaattcttctgacatgcatgtcttaggaaggagaaggcctgaccttgttctttttttttttgagacagggtctcactctgtcacccagactggagtgcagtggtgcaataataactcactgcagcctctacctactgggctcaagtgacgtgacctcccacctcagcctccccagtagctggaactacaggcacatgccaccatgcctgggtcgctatgttatcggggctggtctccaacttttgttctccagcgatcctcccacctcagcctctcaaagtattggaatacaggtgtgagccaccgagcctggccaggcctgacttctgaatgcattcgtttcttgatcttttaccccgagtgcacgtgcaagttgcacccctggccactgggttttgcagagtgtggcgttccagtgtccggggccccacgcccgtccgcaggctactggaatgctgagggcgaggaggcttcgctccacgcacaccggatcggcctgcacttcaggggccaggtctacagccttccc

SEQ ID NO: 12730 - DNA, 1305 bp, Artificial sequence
  DNA replication origin
cccaccaccacacacttgatggcctgcatcagggccgctcgctgggccgcggcggcggcggcagggcgctgagataggaagcggcgggctcggggcgcggcggacgggcgcgcggcttgcgggcggcggggcgctgggtgccggggccgctgtccacgccgcctcgccctccgcggactggaagccgatgcccggcagcggccaccacccaaagctgaggaaaactgcagagaaacaggaaatggccgctccactcacatccggcctcccctcccccgcgccggcgccgccgctcccaggttccgggcggggccgctcccgcccgcgccgctcccgcccgcgccgctcccggagtttctctggacttcgggaatgctcggaagcgctcgggcccactcggctccggccgcggggcgtggcagccgccatcttggcgcgctaaagcggcctgggcgtggccgggcctgcaggtcccttccctgggactcagggctttaagaggaacctgtcagctcggcgcggtggctcacgtccgtaatcccaacactttgggaggctgaggcgggcggatcacctgaggtcacgagttcaagaccagcctggccaacatggtgaaacactgtctctaataaaaatacaaaaaattaacggggcgtggtggtgggcgcctgtaatcccagctactcaggaggctgaggcaggtgaatcacttcaacccgggaggcagtggttgcagtgagccgagatcctgctattgcactccagcctgggcgacaagagcgaaactccgtctcaaaaaaaaaaacaaaaacaaaaacgaggaacctgtcagacagggcgcggtggctcaagcctgtaaacccagcactttgggaggccgaggagggcggatcacaaggtcaagagatcgagaccatcctggccaacatggtgaaaccccgtctctactaaaaatacaaaaattagattagcagggcgtggaggcgcgcgcctgtagttccagctactcaggagcctgaggcaggagaatctcttgaacctgggaggcggtggtttcagtgagcccagatggcgccactgcactccagcctggagtcagagcgagaccccgtctcaaaaaaaaaaaaaaaaaagaggaacctgtggtggctgggcgcagtggctcacgtctgtcatcccagcactttggttgggcggcccaggtgggtggatcacaagttcaggagtttgagaccagcctcaccaacatggtgaaaccccatctctactaaaaaaatacaaaagttagctggatgtggtggcagg

SEQ ID NO: 12731 - DNA, 903 bp, Artificial sequence
  DNA replication origin
acagagagaccccatctctacaaaataaaaagtagaaaattagccaggcatggtggcacacgcctgtaatcccagctacttgggaggctgaggtgggaagatcacttgaacctgggagatggaggctgcagtgagctatgatcacaccactgcactcaagcctgggtgacagaacaagaccctgtctcagaaacaaaaacagtccaggtgcggtggcttatgcctgtaatcctagcaatttgggaggctgaggtgggtggatcacgaggtcaagagatagagaccagcctggccaacatggtgaaaccccgtctctactaaaaatacaaaaatcagctgggtgtggtgacgtgcgcctgtagtcccagttacttgggaggctgagacaggagaattgcttgaacctgggaggcagaggttgcagtgagctgagatggcaccactgcactccagcctggacgacagagcaagactccatctcaaaaaaaaaaaagaaaagaaacaggccactgacaaaaggacaaatcctgtacgattccacttctgtggggttcccagaagagacgacttatagagacaaagtagaacagaggttcccagaggccgtggaagggaggaagcggaagtgagtggtgatgggttcagagcttgtgttaggggtgtgggactggacacgggttcacggcactgtgaacgcactggatgcccggaactatacactaacgaccaacgaacagtgaaactgaccaatgtgtgtcaggaatatctcaccagttacaggaagcccccaaaactagaaacccctacccctctactctgggcagggggttttcattccttcgggaggagctgaggcagcctcacacccatagcacagtgagcatgaaactgtaagcctggcac

SEQ ID NO: 12732 - DNA, 1239 bp, Artificial sequence
  DNA replication origin
acacacacagagagaaggaaaagccacagagctgggctcaaatgcccaacctgctacttattccagtagccacgcgactttgggcaaggcactcgctctctctgaacaggcttctctctcttagaacaaacgaaatcccacagcctcccagggctgctgtgagaatcaggcagcgcgggaggcgcaggcagcgcgggaggcgcaggcagcgcgggaggcgcaggcagcgcgggaggcgcaggcagcgcgggaggcgcaggcagcgcgggaggcgcaggcagcgcgggaggcgcaggcagcgcgggaggcgcaggcagcgcgggaggcgcaggcagcgcgggaggcgcaggcagcgcgggaggcgcaggcagcgcgggaggcgcaggcagcgcgggaggcgcaggcagcgcgggaggcgcaggcagcgcgggaggcgcaggcagcgcgggaggcgcaggcagcgcgggaggcgcaggcagcgcgggaggcgcaggcagcgcgggctctgtgcagtccctgacccgaggcacccatcttctgtgtggtcagcattcacaggcaagacacacgagtccgcgctcataccttgtgtgccaggcggtcctgcacctcacactccacgtccagcacctcactctccgctgacaggtccgtaaggacatcctgtaaaaagggcgttgcagaagcggccgtcagcctgtgatgggcagggtgggagaatgacaggtggtccctgctcctgacacttctgtggaggatggcggggatggcaccatctcctagttcggtcctgggactgaaccctaaactaaagagggaaacccagcggtggctcctgagggccctgatggcacgaccagctctgggccaggcgtgaagggtggaggggaccatggagtgtgcctaagacacgccctgcgccttccccatcacacacacgtattctaaggaccccgtggcacagaacctgtgccagggttctgaacaaagcctggttcccgtcctcaggagccccgtaacaggtgaaaccgtggagaggaggaggcctagactagcaccacagcaagggccaggcagtgccgagtcagaggatggggcacagcccaggcgcaggggcagctccctggaggaggtgacgccacagccagacccgaaggaagaggttgttgtgaaagcagagaggacaggcggcgtcctcccaacaggggcagcaggacccgctggctggggccctgggca

SEQ ID NO: 12733 - DNA, 1553 bp, Artificial sequence
  DNA replication origin
acccagcggtggctcctgagggccctgatggcacgaccagctctgggccaggcgtgaagggtggaggggaccatggagtgtgcctaagacacgccctgcgccttccccatcacacacacgtattctaaggaccccgtggcacagaacctgtgccagggttctgaacaaagcctggttcccgtcctcaggagccccgtaacaggtgaaaccgtggagaggaggaggcctagactagcaccacagcaagggccaggcagtgccgagtcagaggatggggcacagcccaggcgcaggggcagctccctggaggaggtgacgccacagccagacccgaaggaagaggttgttgtgaaagcagagaggacaggcggcgtcctcccaacaggggcagcaggacccgctggctggggccctgggcacggctccacaccagccatatttgaaaaggtccacaggcgagtgctgtgctgctgggctggaggccccggcagcagcgtccaggctgcggagtgggcatgggggaggctgctgggtaaagcacccagagctgtgataagaaacacaaacttgatgttaaagacagtgggcccaagcatagaaaagcgcaaaaacacatcctctgcagcaacggatgcagctgcgggccatcatcctcagcgaattaacgcagacagagaaaagcaaacaccgcatggtctgatgcgacggtggaagctcaacattgggtattcatggacacaaagaggggacaatagacactggggctactagaggagggcaggggaaggaatgaaaacctaaccactgggtactatgctcagtacctgggagacgggatcaacagtaccccaaacctcagcgtcacacagtatacccagctacaaatctgcacatgtaccctctgaatctaaaataaaagttggaattaaaaaaagaacatttaaagataaatccataaaggcaatgggaagccactggaggtatctgagcaggacggtaagatccgatccgtgttctagagtgagtccttggtggacaggacaatggacagacgctgaggtgagtggatggctacagcccaggagtccaagaccagcctgggcaacatagtgagatcctgtctctacaaaaatagaaaaaattagctgggtgtagtggcacatgcctgtattcccagctacttgagaggctgaggcaggaggatcacttgagcccaagaggtggaggctgcagtgagctgactgtaccatcgtactccaccctgggcaacagagcaagaccctgtcttagaaacaaacaaacaatcaaacagactggggagatgagactagacaaggacggagatgggaagctagaggactggggccaaaagcggggccatggcgctggaaatggagagagggccacataggctggggcaggaagttcacacacagcagacagggcgcacagaaaccacagacgacgccactgcttcttttgagacagagtctcgatctgtcgccacgctggagtgcaatggcgcaatctcagctcactgtaacctccacctc

SEQ ID NO: 12734 - DNA, 1019 bp, Artificial sequence
  DNA replication origin
acagcagacagggcgcacagaaaccacagacgacgccactgcttcttttgagacagagtctcgatctgtcgccacgctggagtgcaatggcgcaatctcagctcactgtaacctccacctcccgggttcaagcaattctcctgcctcagcctcctgagtatctgggattacaggttcccgccaccatgcccggctaattttttttttttttctgagacagggtctcactctgtctccaggctggagtgcagtggtgcaatctcgactcactgcaacctccgcctcccgggttcaagtgattctcctgcctcagcctcctgagtagctgggactacaggagcccaccaccatgcctggctaattttctgtatttttagtagagacggggtttcaccatgttggacaggatggtgtcgatctcttgaccttgtgatccacccaccttggcctcccaaagtgctgggattacaggcgccactgcttcttaaatgggcaatggggggacgatggcagagctgacgtgaacagggcgccccccgggaggagcagccctgtgggaagtgtggcttctctggtgcctcccgggagacccacagatggctcctgaagatgcaagtttggggtcctggccctggacttaggggggctaccccagagccagtcaggagcagaagagggctgagcacacaggctctggagtctcaactcattttctgggtcagcagagaagaacgggaagtgagactgaggagtggccaggaggaaaccggaatggagagaagaaagctttgacaaggaaagcgtcacctggcatctccaaggggcccaggagtatggactgaggaagacagaagaggggccatgggctggggatggatgtcggcagtcctgacctcacctggagaacggcaggccacgagggcctgtgaggatccaaaccgggagcctccagcggggctggtggccaggggcgtgactctctgcagcaagactgactcactgccgccatctggctctgg

SEQ ID NO: 12735 - DNA, 920 bp, Artificial sequence
  DNA replication origin
tggggtcctggccctggacttaggggggctaccccagagccagtcaggagcagaagagggctgagcacacaggctctggagtctcaactcattttctgggtcagcagagaagaacgggaagtgagactgaggagtggccaggaggaaaccggaatggagagaagaaagctttgacaaggaaagcgtcacctggcatctccaaggggcccaggagtatggactgaggaagacagaagaggggccatgggctggggatggatgtcggcagtcctgacctcacctggagaacggcaggccacgagggcctgtgaggatccaaaccgggagcctccagcggggctggtggccaggggcgtgactctctgcagcaagactgactcactgccgccatctggctctggtgcagaaattccccgggagggctcccgggtgtggggcctggctgggctcagggaagttaggcagggaggggtcaagcaggtgccctctgggagctcctgtggcgggggggccaacctgctggccgctctgctgctgacagttctcagtgaagatgaaacagcttcatccctttttgcaaagggagtatttcccaaccccaggctcacatcctcattttctgtcctcaccattttcccctgtgtctcatgcggttactgacggatttccccagccgagcagctgtgggctcccgctcccgcacccactcccagggctggaaagtcaggttccaacgttacctgcagagacatggtccccctcacagcgaccacaacagactctttcctgtgatccagagccactaaaaacggcagctcgtaaacctgcaggagcaagaaacaagcatggggcctaaacagtgaacacacgcaccagcacgcaaagtcggagccctgcagtgtctgcaatgacagcccaag

SEQ ID NO: 12736 - DNA, 1028 bp, Artificial sequence
  DNA replication origin
ccggcagttcggccacgtccctggccacgtcgcgggcgatctcgccatcttcgccgcttcctctcaggggccgccgcctcctgagccgcccagccccggggccgccgcgctgcgccgaccgccaccgccgccgccgccatgaacattttccggctgactggggacctgtcccacctggcggccatcgtcatcctgctgctgaagatctggaagacgcgctcctgcgccggtgagcggcgggggaaggcccggagaggctcgggcgtgggggccgggtctcgccgaggacccgccgacctcggccaccccacggctcgcggggcctgcgccggcccgacacaccccctcggccggcctaacgggtgcccggacccggggggcagcggcctgcgggccctcggggtgggctccgggccgggtgtcgcagcgcgggaccccgctctgcagtcggtccccgcgtgaacttgagctgtcggagcgcacccggctgcgcggggccctgctgtgtctgaaaagttggcgtgggacggggggtccgacaggcgtggcccctctctgggcttgaatgggggcgcttctccggccgggatctcccgtgggggtcccggggttgcaggaaacccgcgaatcaatgggacgggcgggaggaggatgggcaggatcgtggccggctgcgcctgacgtggcagcccagccagctcgggaggtggggcgggcgccgggagaggtcactcggctccccaccctgcccgtgcaagaccgggctctaggtgtggtgtagtggggtcgggtcagacctgtccttaagtgttgtgtgggcatcacccaagcccttgggtccaggatcacaccgctggggaggggcttgccgagaggtcgtcagtgattttcttggcgtaattaatgctgctttgggaaacgatctggtttttaagtgcctccatctaataatgggttctcttaaaactgcggcgcccggggaccgccgaggcctcctatgggctcctgcaattcgttgctccacgtca

SEQ ID NO: 12737 - DNA, 1623 bp, Artificial sequence
  DNA replication origin
ggcccggagcccaccccgagggcccgcaggccgctgccccccgggtccgggcacccgttaggccggccgagggggtgtgtcgggccggcgcaggccccgcgagccgtggggtggccgaggtcggcgggtcctcggcgagacccggcccccacgcccgagcctctccgggccttcccccgccgctcaccggcgcaggagcgcgtcttccagatcttcagcagcaggatgacgatggccgccaggtgggacaggtccccagtcagccggaaaatgttcatggcggcggcggcggtggcggtcggcgcagcgcggcggccccggggctgggcggctcaggaggcggcggcccctgagaggaagcggcgaagatggcgagatcgcccgcgacgtggccagggacgtggccgaactgccggcgcgcgcgcgcgcggggcaccctgggagagcggggccaggccccgccccttaaagggggcgcgccccagcgcaggctcagcaggtcagctcgcagggactcccttgcaagaagaccccggactctgccaaattttccctgccgggtttccggcttctcctcgggtgccagcagtttcctttacttttttgaaataacactccctggggatcttttctttcctcccacatatcaaaagagctctacaggcctattgtatgaaaaagtgtaagagaaggccgggtgcggtggctcatgcctgaaattctagcagtttgagaggccgaaacaggaggatcctttgagcctaggagttcgagaccagcctgggcaacctaatgagagttcctccaccccccgtctctacaaaaattttttaaaaaattagccaggcctgatggtgggtgcctgtagtaccagctattttaaaggctaaggcaggaggattgcttgagcccaggacatcgaggctgcggtgaaccatgattgtaccactgtattccagcctggacgactgagtgagaccctgtctcaaacaaaacaaaacaaaacaaaacaaaaaaaagtacaagaggaaaaaaattgatttctgattgcctcactcaagataaggtcaacattgaaggtggaggtggaagatgcagtttatgtaggggtctgaagattttaccattctggggactgtctttaagaaagagaatccaaaattaggtagaaaagtgaacgtctgaccgggcgcggtggctcatccctgtaatcccagcacttaaggagtacgagacgggaggatcacgaggtcaagagatcgacagcatgctggccaacgtggtgaaaccccgtctctactgaaaatacaaaaattagccgggcgtggtggcacgcacctgtaatcccagctactcgggaggctgaggcagggagaatcgcttgaacctgggaggagaaggttgcagtgagctgagatggtgccactgcactccagcctggcgacagagcaagactccatctcaaaaaaaaaaaaaaaaaaaaaaaagaaaaaaaagaaacttgaatatttctacgggatggggacgtcacaagaaattgcaaacaaaaaaagctgacaaacaggatctgctacataatttgcgggacggagtgcaaaacaaaaacgcacagttcgcagttca

SEQ ID NO: 12738 - DNA, 1616 bp, Artificial sequence
  DNA replication origin
aagcctctgagtcccagtttaacacctttaatggccgggtcctatcaggggtccaaggtacatgggaggcgggctcccccagggatcgtgcttattcttcctaccggaatatcgggccgaagcagccagcagatccccccctcccaccccaaagcctgcggtggggcagagggtcccaggaaggggatgggtgaatcctggctctgccttcgaggcagatgctgtcagttcccgaatacaagacacgcctgcgcagcctccacttccaggccaccctccaggagaagacagaggagatccgaggcagccttgaatgcttgcgccaggcctccctggagctcaaaaacagtcggaagctcgccaagatcctggaggtcagtgggcgtacccttcctggcaccctatctgcttctctgcctcctggggcttccagcctggaggcccatccagacagcagggtggatgggtggtggggtgaggacaggacctacccaccttcttgtccacagtttgtgttggccatgggcaactatctcaacgatggacagcccaaaaccaacaagactacgggcttcaagatcaactttctgacagaggtgaggggacctgccggcagcaatcgactggtttgctctaccagcaaggcgctaacgccaggcctagctcagttgtggcagagggcagaagaggacatcgtgaccaaggagggctctcctcctagcaggaaaagggccacattgaagccaggatgtgactgcagcaaagggtggggtggggtggggtggggtgggggaacacactcccaggatctggaaaaatggagtgagggaagagagttggaaagagagtgtcaaaggctggggattgggctgggtgtggtggctcatgcctgtaatcccggcactttggaggccaaggtgagaggatcacttgaggccaggagttggagactagcctggacaacatagctagaccccagttctacaaaaataattagctaggcatgtcacaggcctgtagtccaagctacttgggagactgaggtggaaggatcgcttgagcctaggagtttgaggctgcagtgagttatgatggagccactgcactccagcctgggcaacagagcaagaccctgctattaaaaaaaaagtgggggcgccaagaattcatcattgatgccacagtagtccaggagaagctgggcccatgtgaccccatctgatggggtccttgacgggaatgtatattgggggtcacttgcagctgaactccaccaagacagtggatgggaagtccaccttcctgcacatccttgccaaatcgctgagccagcacttccctgaactcctgggctttgctcaggacctgcccaccgtgcccctggctgccaaaggtatgctgggtgggtggatggggaggcagaggcatgctgtcctgggctgggagagtggccccatgcagcccctgtcctcttccctacagtgaaccaacgggccctgaccagtgacctggctgacctccatggcactatcagcgagatacaggatgcctgccagagcatttccccctctagcgaggacaagtttgcaatggtcatgtcggcatcctctgagcag

SEQ ID NO: 12739 - DNA, 2231 bp, Artificial sequence
  DNA replication origin
ggaccctctgccccaccgcaggctttggggtgggagggggggatctgctggctgcttcggcccgatattccggtaggaagaataagcacgatccctgggggagcccgcctcccatgtaccttggacccctgataggacccggccattaaaggtgttaaactgggactcagaggcttgggcgcaatggcggcccccgaaggcgcgcgggaccccagcagccctggccacagcgacagcccctgtggagccggccgaggcctcggggcggggttgtggtcgcggcacctgcaggacgaactggtccggctcgctgaggcggccgggcgcctcgcggaaggcctggtagcgctgctcctcgtcggcgtcgggcgcgaagagcagcagctgcgcgagatgtgcgggctccaggcgccggggctccatgctcatcagcacctggcgcagctccgcggggctcagcttcaggtgtgccaagaggatggctgcgggcggggcggggcggtgagctgggcggggccggagcggggccggatgggacccaagacggagagggcagggcagaggcggggagagggcggacacggggcggggcctaggggagaggacggggccttgaggctggaaggacaagaaacgcggacggggacaagaggctgagctgaggcggctcccgaatggggagaggacggcgcttcaatattggcctgggctaaggggaagaaaaaaggaaagggggcggggccgctcggtgagcaggggccgggagagggtggggcctggcaggaagggggcggggcttccaggttggcccaggatacagcggggaatctgaaggggcaggggacaagggaagcaggtagacctgtgaggcagagctggggcggggactgggctactggaggaactctagaggggtgggggtcaatgaacagggcggggtctatgaggctaaactgaggcggggcccgggtggaaagagggcggggctttgggattggccggggctactgtgaggagcctggcgggtaggagcaaggaaactgagcggggctgctggttgagttcgagcggggggagagggcggggcccagcagggagagggcgaagcttccaggtgggcttcggctacagggaggagaccgaatggaggggacaaggaacaagggcggggcctgcgaggggtgccgtagggggccggggcaggggcgggccctgaaatagagacggtctttcagcgaccgatttaagggtgaggacggggttctcgagacgctagattgagaagctgggtggggtctatgggggtcgggccagggactagggcggggcctgcgaaggagagagggaatgaggctggaggcggggccagaaccgggaagttgattagacagtgagggtggggccagcacccgcgcccagatgggatctggctggctatggggcctgggagggggccttcaccgcgctgagcgacaggaggccgggtccccaccgcctaatctctgtcatccacctgggcaggtctgaggcccagagaaagggccgccgcctgccccctacaccccctggggttccccggaccctcacaggtgttgtaggccttcttatgggacaggatctccaccacctccttcttccggaagggctccggccccggcaccggttctggaaaagaaactgacagtttacggaggcggctaggctgaggctgcagtgggaaggcccaggggtggcgtggtcacagccaacagccactatccccctaagcacgacctcgacttaatcagctacacgtccatagtcccttcattcctcaggtcggggaccttcaggtcctgtgtgtaacctcccccgccccgtgtcctgtgcactccccgtgctgcaggaagccaggtctttctgttccatcctgggaccgcctgttccacccatcaacgacagggagatacccaggaaggggtgagggcaagagagcctggaagatgtatttgtggatgcctcctgtctacggtgtgactgagcaaattacctgacctctctgtgcttcctcattaggaagtggggggtgatcacattatgtacatcacagagttgccatgggatttagaaatgagagtccctggtgtttgatcactgcacagtaaatgccagctttttttttttttttttttttagacggggtctcactgtgtcacccaggttaccaggtcggagtgcagtggtgtgatcgc

SEQ ID NO: 12740 - DNA, 818 bp, Artificial sequence
  DNA replication origin
tccccagtgtgtgtctttggctgagggacacagattggcttcaatgcctgcagtggcccccaagcgtggggacgttcttgggctgggcctctactcatcctctgcttggggtagggaggatgatgttggaagatgcctggccgatgggttttccttcagtgctgctgcccaagccatcctcccccagtacagagcgctgctgggtcccaggtcacctacctgaccccagatggtgccttctgagttctccacctgttcccaccgcaagcgcttgacgctcatgtggctggtctcactgcgccggtggcccaggccccgggacagcatggggggtgcacagggcacgggtgggggcaggggcggtgggggtggtggagggactgggtggctgagttgggtgaggggcttggccagcgcctgagcagggccccgggaaccatcagagctgcgggagctgggcttagcgtcatggaaaggcaggggtggcggtggtggggggctgagcgggggtggggggatgtggtcagagatggaggagtaggtcagggagctgccttcttcactgctgctgatgcagtcgctggcgctgctccgctcattggttacgaagctgccctggtcatcatggaagctcatctggtggtggggagagaggcaaggggagggtgaggctgggcccagagagactagagcaggtgcaaagtgaaggatcatgggatagcctgggacaaggacagggccatctcacgggttagcctcaggctgtgagggacacctgggctaaggataggactgtctcacaggttaacctcaggctg

SEQ ID NO: 12741 - DNA, 806 bp, Artificial sequence
  DNA replication origin
gtggtggggggctgagcgggggtggggggatgtggtcagagatggaggagtaggtcagggagctgccttcttcactgctgctgatgcagtcgctggcgctgctccgctcattggttacgaagctgccctggtcatcatggaagctcatctggtggtggggagagaggcaaggggagggtgaggctgggcccagagagactagagcaggtgcaaagtgaaggatcatgggatagcctgggacaaggacagggccatctcacgggttagcctcaggctgtgagggacacctgggctaaggataggactgtctcacaggttaacctcaggctgtgagggggatagcctgggctaaggataggaccctctcatgggtaagcctcaggctgtgagggggatagcctggaataaggacaggaccctgtcacgggttagcctcaggctgtgagtgggatagcctgagctaaggaatgggctaacctgcgacagggaatatgggctagcctcagtcaaggagcatgataaccttgaacaggagatagggtaacctggggcaaggggtgggatagcttgagctagggagtgggatagcctggggaagatcccaagggcagcaggccccttgcgggagcccaggaacactgttgccttgcagaccgccacacctcgcctcacccgcctccctccacacctgcttgcgtgcccacctcctcgtagtcgttctccggggtcaggaaatcatccacgatggtgacccgggggcccagctgctcgctcagcacgtccaggaagcggtcagtatcgcggct

SEQ ID NO: 12742 - DNA, 1352 bp, Artificial sequence
  DNA replication origin
aaatccgagcagcgagggggagactggggtgctaccggctgctcatcccgatccccccagccctccgccactcctaggaagaggtgggagagcctagggcggcgcccgcgaggacgcgccttcgggccgcggtttgcagagatccggggtccgggaacgcgccccgactccgccgtcctcgccggcaggatcttcatccccaagaagcaccgggcgcgcttcgacgaggtggtgtctcagggcctcctgggcaagctgtgccgcgcacgccgggcccagggcgcgcagcgactgcgccggagccgcagcgaggagcggccggagcgcctcctggtgtccacgcgcgccagcgccccgccgcgccgccccgatgagccgcccccgcgcagggcctccttgctggtgggcggcctcgccggccccgggggcgcgcgcaggtacgcggggctcacaggcactggcagcgggcgcctccctgcgggtgggctcgggaccgagacccggggagagggcgtaggggcggggctgggcatctggggtgcatagggggccggagaggttaaggggagagggacacgggacatctccaacctctgcgccccagggccccctctccatcatgctgctcgccccttctttttcccccaggactgtccgagtctacaaaggcaacaagagcttcggcttcacacttcgcggccacgggcctgtctggatcgagtctgtcctgcctggtgaggggtgggccggttgccctaagagtccctaaggcccaggatggggtgaagggccccgtggtggctctgccgggtcattgtaccccatgtaggctcctgctcagcaacccctccacgtcaggtaccatccttgtgtagaccgtgtccccagagtgtcccagagccagcagatctgaatcccattcctacctaagatgcttgaggccagagccttctgcctgagttggggcaccccacccctgcccctctaaattcagcatccccccaagccaagggaaccaggttctgcatccagacctttcctgtgtccacagggagggccggggcactgtctaggactctggggcagccaggactgagctgctgcctacccaggctgtgcccccagcaacacgagcttcatggagtgcccacgctgaactgggttcttgcctggcaggccagactcagacagccaaaagggcctcagggcctctgcctgctgtctaacacctgctgaatatggacttcgctctcctcccaccctgcttgctccttcttgttcctgaaatcatggcatctttttatttattttattttattttaatgagatagtgtctcgctctgtcacccagg

SEQ ID NO: 12743 - DNA, 1053 bp, Artificial sequence
  DNA replication origin
accccatctctactaaaaatacaaaaattagccgtcgtggtggcatgcatctgtaatcccagctactcgggaggctgaggcagaagaattgcttgaactggggaggtggaggttccaatgagctgagatctcaccattgtactccagcctgggcgacagagcaagactctgtctgaaaaaaaaaaaaaaaattagcctggtggcatgtgcctgtagtcctagctacaagggaggctgaggcaggaggatcccttgagaccaggagttccaggttacaatgagctatgatcgtgctatgatcgtgccactgtactgtagtctgggagacagagcaagaccctctctcaagagaacgagagagacagagaaagagagagagtttctagccctgcagcggagacccacgggccttccccctgcctctcacttccaaggtaactactttgagagcaggagccacagtccctttagctttgaacgccagttcctggctggcacagatagcaggggctccctgaatacatgtaggattaagttgaaaggaggccagtgttgggtacggagcctcatttagctaaggaagcaaaggagtggacctgggcaagagcctgggcaagagcttagagataggactgaaggtggcagaaacggggttcctgccagatatctgagtgggcagctgcagatgggcctggacagagaagcaagcaggaagactggaggcgtggtgaggggctcgtgggttccagtttcctccagcagagccatctagagacgaggtgggagacagtgggtggtggggatccctggctcagggcttggcctggcgggtgcagagggagtggggggagaggacagaggcaggaggaggaacgggtccgtggactggctttgaggggctcgggccctgcagtggccagagtcatggaggacggtccgaacgggccattcccgaggtgaagcgagcaggacgccaagtcctagctgggggcgcaaatccgagcagcgagggggagactggggtgctaccggctgctcatcccgatcccccca

SEQ ID NO: 12744 - DNA, 1139 bp, Artificial sequence
  DNA replication origin
gagtccagagacagtgattgctggactgccactcaggggggatagtgactggtggtaatagtcactgtggccccactgctcctggctctgctgggtcagtcgatttagggcagacccagggctggggactctgggccagactgagctgcatggagggccagcaggagccaggttggatgtctggctcaccaggcagccttggcctctgtctcagccccaaaaacaccaagtaaggaaagggctgcccaaccttcttccatctgtgcagttggtgacagcctggttcccacctgggggacagggccttttcttttttttgagatggagtctcactcttttgcccaggctggagtgcagtggtacaatctcggctcactgcaacctctgtctccccggttcaagcaattctcgtgcctcagcctcctgagtagctgggattacaggagtgcactaccatgcccggctaagttttgtatttttagtagagatggggtttcaccactttggccaggctggtctcgaactcctgacctcaggtaatctgcctgcctcggcctcctaaagtgctaggattacaggcttgagccaccgcgcccggacgacagggccttttctagttgctgctggaaggtagagctgtgatgtcctcttgacccctgcccaggttggactcaagggttgggtgcatggggtgatgtcttcagagtctgtggctggagccggaagtgaggtggacagtctcaggtgtgtgtgtcttctctcctttgcctggacatgaggcttgaggtctgggaggcgctagggaatgtgcaggcctggcagatggagcggtcaggctctggagaccttaaatgaccatctgggggatgaggctgtgtttccggatttgcaggaagcattgcaggtggatgggaatgggcaccgggcagaggtgagcaggacattcatcctggttcctggttaccccccggaccatcgagacctggagcggagctcactgcggggacagagcctcctccctgagaatccacacccacttcctcccaccaggcaatttcttttgcctggcgggcctaattactcctacccacagaggtggagggaagtgtgagggccgctgggacacctcagaggggttt

SEQ ID NO: 12745 - DNA, 1353 bp, Artificial sequence
  DNA replication origin
gtccggggcgcagtagctggagaggacgcaggcgaggatcctgggaagggaataacggagagagccaaggggagtgagcgcggcggcttcaaaccgccgccagtttccgctgcaccccagagcgaccaaaagggtcccagcagggcagaggcggggctacctggagggggcggggccaccaaaaggggccagggcggggctgcgggccgggacggctcgggaggggccgcgcgcgctcgcagggcagaggtgcgtggagtcgcggcgcgctcgctccattcctgggctcggctaccccctgcccttcggcacctgccgcgccgcggtccccggctccagatggggaaggaccagggcttctctcggcactttcggtagcttccccatcgcgtcccgcgcctccgggaaccgtgcgccctctgcgccacggatccgcctcgggctggtctgaaagcgggtggggctggagcgtggaggggcttccctgccctgggtgggcaccctccgagcctgggcggagcccgaggcccagggaggttggaaataaactcggtgggtaccggggcggcgaggtctaagcgttgggcgctcagaacccgtgcgtggccctaaagagtcggtgttgggataaaaggctgggattgaaagcccactttccttcctacaattgggctggtcgaggggacaggacagagggccgagactgaggttgggtgctcttgtgaaaatcgggggcatctcgtcctgagtttggggggcacgacctctccactgccgtgctccctatactgaaccagggaacccttgtccccttgccaccatttcgctggctgatgatcaaaggtgagataaagaaagctgggtggggggccaggcgcggtggctcacgcctgtaatcccagcactttgggagggcgaggggggtggggggtgcggatcttctgaggtcaggagttcgagaccagcctgaccaacatggtgaaaccccgtctctactaaaaatttaaaaagccagccaggtgtggtggtgcatgcctgtagccccagatactcgagaggctgaggcaggagaatcgcttgaacctgggaggcggaggttgcagtgagccaagagtgtacccctgcactccatcctgggcgacagagagtctctctcaaacaaacaaacaaacaacaacaaaaaaggccaggcgcggtggctcactcctgtaatcccagcactttgggaggccgaggcgggcggatcatgaggtcaggaaattgagaccgttctggctaaaacggtgaaaccctgtctcaactaaaaatacaaaaaattagccgggtgtgaaggcatgcgcctgtagtcccagc

SEQ ID NO: 12746 - DNA, 2617 bp, Artificial sequence
  DNA replication origin
atgaacaccataatatagagttattgggactgggtgcagtggttcatgcctgtaagcccagcattttaggaggctgaggtgggagggttgcttaaggccagagttcaagaccagtccgggcagcatagtgaaaccccatctctacaaaaaatacatataaaaaattagctgggtttggtggttcatgcctgtaatcccaacattttgggaggctgaggtaggaggatcactggagcccaggagcttaaggccagcctagacaacacagcaagaccccatctcttaaaaaaaaaaaaaaaaaagtttaaaaatgagctgggggcagtggtgcctgcctgtaatcctagcgattttggaggctgaaacagaaggattgcttaaggccaggagttgaagaccagcctaggcaacagagcgagaccccatgtttacacacaaaaaaattaaaaaattagccaggcatagtggtacatgcctgtagtcctagctatttgggaggctgaggtgggaggatcacttaagcccaggaatttgaggctgcagtgattcatgatcatgccattgcactccagcctgggtgacagagtgagactctgtctctaaaaataaataagagagatattggcagaattctatgagacgtgtagatagaagcaccaggcataaaatatgtgctcaattagtattggcttctcttagggaagctctcgttcccaagagcaggtgtctcaagtagggcactgctgacatttaggagctgatatttctgtgttgtcaggggctgtcctgcacattagaggatgtttagcagtatcccaggcctctaccccctagatgccagtagcacaacccctgtcagttgtcattttgtaacaaacaaaatgccaagtgactgccaaatatcccctgggtggacaaaaatcacgactggttgagaagtacagctctggaggaaacttaagcagtgccttttgctggagcagacacttcagggaagtccggctgttgcctgtcccctggtgatcacctagtgactgggtgaccacctcatgctgccctgggtcacctggccacaggcatgagcagctggccccactgtgcccacggagacctggctctgaggtagcgtgcctggatttgaccctgggcgtctgctccctggttgcatctcctgtgctcacagcacggtggatggttttcagagcctttggccatgtgtggttctggattctgggccactgcagctggcacaatacaaccaggaatggctccaatcataatgggatggctggggccccacagacgacagagagctgtgctggctgggaggcttgtcagctgcttctctcccttgcagggctgaggacagggcttggggagggcacggcatgagtgggcactggctccagtttctggctgcttccaggaagaagtacagccacggggggtcacagcaaagtgatggtcttgcaagggccaggaatggggggctgcagtgtattggggagcagtgcgtggacagtaccagagaccgatgatcggaccagagggtcctccctgtgctgcctgcaggtacccacaggctgccccatgggagctgtccctctgagtgagacagagggaaagtccccggggcatcttgcctctcctgttcccgcctgtctttggagagggcttcatgctgatgttctggttgggggtgcccctgaagagcccctccccaggatgtgccttgaactggttaccccaactctcatttgttcctcaggcctgattctgggcctctccagaggcagtcgggactccttgagacatgacacgcaagcaggcacgctggggtcccctcctgctgctgttcaggggatggcaggcccagagcctccagggatgagtccagacctcctttcctgtggcctccctctcctcccctttaatgttcctcccctcttctctcctggcagagcaagaggcgcagctctgggaggccctctactcgctccctccccactcacctgggtgttgtcgcagcctgggcgtcctgtcctcactcgcactgactccccaggcctcagacactccacctcctctgtgttttggaattcggcttcttgtcccatcccaacacccccctctgggtcacctcccagcatcagccctctcctggtgtgccaaaacctttggagtccttccacctctcctggaaccatgaaaccctcccacggctccttcctcttcccagagtggggtctcagctgctgaccacggcattcaaagcctccctatccagcctcttctcggccacagccgataattagccaggcatgatggtatatgcctgtagtcccagctacttgggaggctgaggtgggtccctcccgaccccggggagggtaaacagggcttcttctagccggccgactcctgctgagccctggaggcccagcgtaaagggcatcccctccggaaaatattgcatgttctaccaaaggccgtcggggcttcctctgaactgcggggactcgccactgtgtgggggtccggggcgcagtagctggagaggacgcaggcgaggatcctgggaagggaataacggagagagccaaggggagtgagcgcg

SEQ ID NO: 12747 - DNA, 1140 bp, Artificial sequence
  DNA replication origin
aaaaagttatttctagagccgaatttgccgcggagatgatgcgctggctctgagcgcttcctggggagctgattgacaggcagccccccgtcccgcccctccccaccagggatgggccagcggggcgcaggcggcccagctgtcccccaggaagttggctcgctcgtctcccggctgctggcagccgggctcggctggaggccctctcggttctcctctcccacagcgctgccggtgtctgttcctgccccctcccgggccagcccgcctgccccccgggacagccccatgcccgcctttcccagccgccgctggtccccaagccgccggcagctgcggcagcgggtcgggcagggcgcgggagggggaacccccttgggcgcgctcgatttagagcctgggcagcgggagccctggacacctggggatgcccagtccccgcagcttgaaacggcagcctctgctgtaagcgcgtgtcaagtgcgccaggaaaactggggaggctgctggaggaaggggcggcgcccagctgggctccgcaaggagaatgttaccctggcagtagggcttcagccaccccgcacctcttcaaaccccctacttcccaacaaccccctccccagggctggccagtcacccatggccccatagtgtgctggcctctagggtggcagcgatctctgggcagccccatctggagagaggtcagagggggcatggagaagccacagacgcagctgtgattcccagggttgggtgccagttgatggctaactcagcacagagcaaccagggcaggcttcttggaggaggcagcaggaggtggcggtgctgtggcttagtgactggtggagtctggtggtgcgtcctgtagatgtgggaggacagtccccaaggagagttcggatgggccaggtgctagccatacagggtgagggcagtgccgccctggcctatggcatccaacagcccccagctgtgaaccacccaacagggagtagaggggaccacagagagccaccacttgggccctaagaccccacattgaggagagacaaggtttaatttttttaagaatttataaatagagacagggtctcactatgttgcccaggttggcctggcctcaagagatcctcc

SEQ ID NO: 12748 - DNA, 1682 bp, Artificial sequence
  DNA replication origin
agggggcaggaacagacaccggcagcgctgtgggagaggagaaccgagagggcctccagccgagcccggctgccagcagccgggagacgagcgagccaacttcctgggggacagctgggccgcctgcgccccgctggcccatccctggtggggaggggcgggacggggggctgcctgtcaatcagctccccaggaagcgctcagagccagcgcatcatctccgcggcaaattcggctctagaaataacttttttccttttttcccctcttctgattctcctagcaaggggctcaccccttactcaccccaggcagctcatggtggcctctttcggtggtggtcgcctatgctccgctgcagagccgagagctgcgccggggctggggtgggcgggggggcggcggggagggtggccagcccagtccctgacattggccaggcccagagggaggggcaggctgcggggtgaatggcagcaaggggagggggcgggctgagtccgggaagagggaggggagggatggaggagcagtcgcaggcccaggaggctgggtgaggagggaaacccggcgggatccggggagggagaacagcagtccagcccagagggggtttggtccaagctgggcaggcagggagggcctccaaggatggaagtggagtcaggagactcctgggtccctccaggtgaggacccaccagtattttttttcttctgacaaataaactgagagcaggccgggcacggtggctcacgcctgtaatcccagcattttgggaggctgaggcgggcggatcattttaggtcaggagttcgagaccagcctggcaaatatggtgagacctttttttttttttttttttttttttgagacagagtcttgctctgttggcagggctggagtgcagtgtcgtgatctcagctcaccgcaacctccctctcctgggttcaagtgattctcctgcctcagcctccccagtagctaggattacaggcgcccgccaccacaacctgctaattttttgtatttttagtagagatgggggtttcactatgttggccaggctagtctcgaactcctgatctcatgatctgcccgcctcggcctcccaaagtgctgggattacaggtgtgagccactgtgcccggctgagacctcgtctttcctaaaaatacaaaaattagccaagcgtggcatcgtggcacccagctacttgggaggctgaggcaggagaatcacttgaacccgggaggcagatgttgcagtaagccaagatcatgccactgcactccagcctggatgacagagcgagactccgattcaaaaaagcttcgagcaaaacagagcggaagagcagaaagtgcactgctgaccctgctcgtggtcctgtgactgctaccaatttgctgtgtggcttcaggccagcctcttaacctctccgagcctcagtctgtctctgggaaatggggttaataacagctcttgggtgattcagtgaaagagtgttcctctagtgtctgctgaggtccttggcacacattcatcatcatcaccaaagggtcgggcaccgtggctcatgcctgtaactccagcactttgggaggccatggtgggcgattgactgagctcaggagtttgaggccagcctggacaacatggcgaaacctcatctctaaaaa

SEQ ID NO: 12749 - DNA, 1829 bp, Artificial sequence
  DNA replication origin
agcgcatcgcggcgcagcagcgagtggcggatgtcgctcatggtgcggccgccgcggcccccgcgccgagcgcgtctcacttccgcccggggcccgggactgcgccgctacccgtggaaacaaagaggcgcgacccgggcctgggctgcggcacccgcccgcttgcccgcctgccgccgcctgctccctgcctgctcagggggccatcgctgctgccgccggccagcaggcgcccgaaggtccgactgcggcgccgccaggagccgccgggagctgccgccgcgcagccgaacagcggccgaatgccgggcacggagacggcggcccgcaggggccaagcgcaggccgcggcctaggcgcgctctccggagggcgccccctggcggcgcgagcggtgaggggcgcgccgcggtcccaggtggaccccgcccccggagcccgcccaaccgccggtgcaggcccgctccgtccttgcccaggctccctcgcgggctgtgcgtcgcgttcagagctgccgctggttgatttcacggtgctttccaccagcaagaattgggggtggtgccgggctttggcttcggccagcggacttgggttccctggccgccccagctacccgtcttcacgtttccatctgttctcagctggggggtacgggggaagatggctggaaggccccctgcccctgactcccacttcccagcctctctgactgcgggctccttggcctagcaaggtgcagaacacctgccacctgcacctgagagccctcccactccaaagaccttccgcaccaagacctcgtttctggcagtcatgtctcctctgaaataggtggcagttcactttcacaatttttaaactggtgagaaaggacttgaatgtggctagaggagggcaggccggaggccacacatgcaggaaggtgcctgatgtacaagcccatactggccggaaggcaggcctgggtgaggacactctgttgttgagatgaaaatcccctgggggagagaggagaatagagggggcataaaagagagcacagccaggcacaacgcgcaggcgctgagtcaatgagaccctcctgcacatcacacaggtcagagacacggccgcaagcccctcctgtccacatgcccagagtttagagacaccaaggtctcagcatcacctagaacctctgagaagtcatctcttgatccccttgacaccaggacttcagagatgcccggtttcaaaagaagacaagcaagggggattcctcagtcaacacccattttcccctctctcccttgcccaccgaaagtgatttataagcacagcagaaatcaaaacaaacaagccatgcttggaaaacgaggatccacatgtgtaaataaacgggaactacagctcaaaggcagtcatacacttgtcattcttgtttcttcctctcatgacatggaaaggcaggtagaaagatctcttgaaggttgctccgaagcccatgggagtgaatgttccggtggacttggggctctgctgacggaggccaggccacaaggggacaacgctggcaccaggcccagtcacctctgtaccactcgttagtagtctggttggtggccgccagatacaggacaaacaacaggtagccacccaggaggaagctcagaaccacgacaaagcccagcatgaagacaatccgtggaaaagtcaggaacaggtactaggagcagagaaaaggtagtgctttaggcagctggactgtgacatccatgagagtgaacactggccaaccctgggcctgccacagccaccagcgctgcttcctcagcccacctacttgt

SEQ ID NO: 12750 - DNA, 2176 bp, Artificial sequence
  DNA replication origin
tgttggccaggctggcctcgaactcctgacctcaggtgatctgccttcctcggcatccaaaagtgctgggattacaggtgtgagccaccacgcctggcctacctcttagatttgtgacagtctctgtgttcaccgtgtttccaaatagactggaaacttcttgaagtgctttctatctccggcagggtgtgtacaggttcaaatcatcacatgaccgaaatttggcctctgcagtactctgcagtacctcctccttgggttcgttaatctcttgctaagttacttacccagggttatttaatagtagtaacagaaagaaagggggctcagaagaactttgggcaccgaatgcaccagccctccacataccctctgtttactgcctcagcccctcctgggggccctgggcccaagcctttgtactggggagcttgggggttcagtctgtgacagaccagccccttgatggagtatgggggagtagacagagagcaggcagggccgtggctgggaaaacgggttgttgtgggacccagttaggataatatgcagggacggagccttggctaagtgacggggtgtgagtagaacccggcaggctggccttggtgttaggagagaccagtgcaggcgctgcagacacaggacccagccggagcaagatcctggggcaggtcaggagaggggcgggcagagcccctctgtctgcagcagaagcttccgatgggggaagcaaggggaaggcagggtagggaggaggcctgggacctgaagctgggaagggccccagagggcctttttttttttttttttctttgagacagggactcacactggctcccaggctggagtgcagtggcacaatcatggctcatggctcactgcagccttgaacttctgaactcaagcaatcctcctgccccagcctcctgagtagctgggactaaaggtgtgcaccaccacgcccagctaatttttagtttattttctgtggagatagggtctcactgtattgctccgtctggtcttgaactcctggcgtcaagcagtcggcctccaaaagtgctggcattacaggcgtgagccaccagacccggccaagagaggttctgactggggagaacccatggggagttggtcgtttccggctgacacagagcggggcagccctcgcctcggctgggggagctgggggtgatgagccaagccagggagttctggggggttgggggatcatcctggggagggcgtggttagaaggcaagggccgtgagaaactctttcaggagtctgggaagggacccagcgttggaaagccacgttgaatttgctgggaggaggattccaggaagtgcgggccgtggttgtgctgtaccaccaggacgggaggtccaggcctctggggcccggaggccttggtgggagcgcggtggcggatggggagaccgtgcttgcagctgttctcggagccccggtgctgggtgctgggcggggtgggtgcccaagagtgggggcatctgaagctgaggctgcgcggggcggggtgggaggtgggtgggtcccggaggtctgtaacggctgggtccaggcctgggccgtccccgagggggccgcaccggactcattctgaatttcaggactctgaatttcggggtcgtttgcaaggccagcttcctggggcttctgcttggaattcaggtagggcgcggtcattctcggctctgaggagactgtggccagctgttctgtgtgtcccagcgcagcagagagccgcagaggctgacgtggaggccacctgtgtgggctgcgcgcccgggagtgctacggccggagctccgtgggccacaggccccgtgcagagcccactcccacgcatcctcgcctgtggggtcctggctctgccactgcttctccgtgtccaccgcctggacccccgggtggtccgtgcctgtgtcggtgcctctcctgggcggggtgcggggggacggggtcagcctaccgtgcgcacctgcggagtccccggagcccgcccgcgctgacgcttatgcttgtgttcgcagcctcctccagctggtgatctcgggtcccgtgcagcagtcgcctcacgccgcgctccccccggggttctacccccacatccacacgcccccgctgggctacggggctgtcccggccc

SEQ ID NO: 12751 - DNA, 1225 bp, Artificial sequence
  DNA replication origin
gagtgcgtccgtgcgggccgctggccgggccgggggcgggggcgcgggggccggcacaggaagtccccccggcatccgcatcctgtcccccgcccctgcccgcccgccgcgcccccgcgccccggcccccgccgccgccgccgccgtcgccgccgccgctctaggcagccgcagctcggtgggcttaaccattcccggcccggccactcacccggcccgggggacacgatgcggcggcccctggggcgtcccgggctggccggtgccgagcgcagcgcgcgctgtgccgcatccctgctgcgcgtgtcctcgcgccacggggttggcgactgtcactgcctgggtgtctgggtggggggtacccaacccgatccctgccaccccctagagggcaggcgtggcctcggggcgcccctgccgcggtgcaaattgtggctaattagcacacaattcgatggcactcggagagggagtaggcgccatccgggcccggcccgagcgggccctggagaggccaccccggtccgcaccgtggagccctcctcctagaccccggggctggggagggcaggccagtagggagtgtgtgcctccctcccccgatcagggactgtgacctgcatagatcaaatgaggccaccgtggagaactggcagagctggaatcctcccgcccagcgcccctgcggcctttcgctgaccacaaggctggtggtcaggcctcccacctccctcaccctctcctctcctctttccctacttggcaagtggattcctgcctgggtcaggggtcttctccaagggaggccttccctaaccccgtcttaatgttgcaccacctaactttcctgttctcggtgcacaaacctctctaacctggagaattcaaattcaaattgggatgctcaaattctttagaaaaaaccaaagatctgggggcagggcatggtacttcacgcctgtaaacccagcatttcgggaggatcacttgaggctggtagtttgagaccagcctagccaacatagcaagaccccatctctacaaaagaggtttttaaaaaattagctgggctactgaaaagtagcctgtaatcccaactactttggaggccaaggtgggtggaccacttgagcccgggaggaggtcgaggctgcagtgaactatgatcgcgccactgcaccccagcctgggtgatagagtgagaccctgtctccatctaaaaaca

SEQ ID NO: 12752 - DNA, 1471 bp, Artificial sequence
  DNA replication origin
ggagccaacatctggggcaggaggggcagaggaagagagcctattagtacctgaatcggatccgggaaattgagtggaaattgactcaggagctggggccaggtgggaggatggtggaggccctctggctgccaggaaacacagcaatgagttccagccagcagcgcgtgtgagtgttaagtccagtcagcacccatgtggggagcggggagcccctcaccagcctggcctcagcctgcctgacacagccaccttggaaaatctcaagggagagctgctggtgttactcaatgcagctgaggttggctggtgtgagtctgtgcaggctgcccgccacccttgagcctctttctgccacagcaggcaggcatgaggctctgtcaagggatcccccgaggccctcacctgagagggtgtcaggccctgggcccccatcctcaagacattgaagttccagcacgaaggtctcggtggctggccccacttccatcctggcggtcagaccccgattcccgggagtcggctgtgctgaaaggaaggaagcagtttagccaggctggagtgctttgacccccgccaggtgcccacaggcccccaaaggccctccacctctgcctcgggccacccagagcggtcagctccatacctgctgcaactataggactgtcccccgcaacggggaacggggagtgccggcggcctggaggctcaggactggggagttggcagacagcaccagaggctgtcacctgcatagaggcaggactgcctctcctgacttttcacagcgggatggagagtggggtagccccacagagacacaactgtgggtatcagcccttcacaagggaggaaagctagagtcaccaaagggacattcagggcggggagctctggggccaaagagagactgtccatcaacatcctccctgcctccttcaattctttttttattaaatacttttttttttttttcttgatacggattctcactctgtcacccaggctggagtgcagtggtgcgatctggactcactgcaacctccgtctccccagttcaagcgattctcctgcctccgcctcctgagtagctggggctacaggtgcgtgccatcacccccagctaatttttatgtttttttatattgtagatgatgttgcccaaggctggtctcgaactcctggcctcaggcgatcctcctgcctcggcctcctaaagtgttgggattataggagtgagccactgcgcctggcgcccttccattctattgccttcctggcctgctctgagaaggccgccagcaggccacgtgtgtcagctgccaccccagctcccgggcaaggcaggtgtccagagcactgtcacccacggcctggccctgtgcccaggcgctcctgagagtccaccctggcccgtgcagagctggcccctctcccctaaacaggccgactcgtgccatccagtccaaac

SEQ ID NO: 12753 - DNA, 2155 bp, Artificial sequence
  DNA replication origin
gcacggacctggtgcgccaccaggccacgcacacgggtgagcggccacaccgctgcggcgagtgcggcaagggcttctcgcagcactcgaatctggtgacgcaccaacgcatccacacgggcgagaaaccctacgcctgctcctactgcgccaagcgcttcagcgagagctcggcgctcgtgcagcaccagcgcacgcacaccggggagcgaccctacgcctgcggggactgtggcaagcgcttcagcgtctcctccaacctgctgcgccaccggcgcacgcactcgggcgagcggccctacgtgtgcgaggactgtggcgagcgcttccgacacaaggtgcagatccgccgccacgagcgccagctgcacggcgcgggccgctccaggggcctcggcctgctgcgcgcctcgcggccggcggccctcggtggcccagcccgcgcggagcaggccgctacagccactgcgcccgcagacaaggcgctgtgagggccgtgatcggggctgcctggccgggaggggaccccccacccgcctccacctgaaaagctccttgacccgggttcatgggcgctggaggcgtcctggaatatccctggagtaaaaggcttccaccatcatcatcatcatcatcttccggattccctgagaaaataccaggttcacagatttcaccgccagaaaaatccatccgccaaaagagaagtggaccggggctgaaacagcacacgggacacgtttgtctgccctttgaggggtctgccaaaggttttccctccgggaaaactggacttactacgaacgaggaaaaacccccagtggcgagacgattaatgacactggccgaggactggacacccaccagggaatcaagacgtggtgagacacacgtggaaaatcttcgatcctggtgaaaatgatcgcaaggagaaattcggggaggaagcaaacttgtttgcactatgtagaaactgaccaaggcatcgaatcgtcctcagaggcatttgccttgaaaatactttccaagatgaaaattcatcagggtgggtataattctgatgaaaacgcctgtgttcatcaacacagggtcagagcgctcaccgggtcgatgtgcaaatccaagccaggaagtcctgctccgggtggaaggtaaaaccttccctccagggaaccaggggctccggcgggcatcggaggcagcttcttggcctctgctgctgtgtcccccagtccccccagcccgcattaatgtcctctggaataagagcctgtggctgaagcagagggccttctgggagagctctccaaggtctggaaggagggtcccccagaaggagctccggggtagccccactgtggcccccctggactccaccagcttcatgcttctcagatgctacccaggggccggcccggggagaccagggcagatttctcccgcaccaggctgtggaggtttggagggctgcctgagcagacactgtgccattgctggggctggggaaagaatatctgagacgacgtttgggagcaatgctctttaccacgttcaccaagtcgtctggggcaggggttgtgagctgcagcagttgctggtgccttgtgggaaggtggggcagggaggaggctgcccgccacctctgcccccagtcacttcctgcttgacctgactcttcacatgtggctgcttaattcctgcccctctccccccagctgcttctcctttactaacacacctgctacattttacacatgtgttggtaagtgagaaacagaaacgaaaaataaattaaaatgcagaaatacaatgtccttgtcttggtgttttcacctctggattttgtgtcttccatagggcttcctttcttttctttctttcttttttccttcccttcccttcctttccccgtcccccttttcccctttctttcctctttacccttcccttcctttcctttcttctttctgtttcttttctttcttttttttttaatgttgcctgggctggtctcaaactcccaggctcaagcaatccttccacctcagcctcgcaaactgcagggagtacaggtgtagccactgtgcctggccaaagattcattcctttttttctttctttttttgaaagaggttcttgctctgttgcccaggct

SEQ ID NO: 12754 - DNA, 1383 bp, Artificial sequence
  DNA replication origin
gagccacgggccggacaccggggccggggcctgcgggccggcggcggaccccgcgctacacaaagtgacggcccgggagctgcgcgacggcggcgcgtgggcaccggaagtaccgccggccggccccgccccgcccgcgcccgcggggggaggaacttccggtcacgcgggggcagcggcgcggagcggggaagcgcgggttgcgggggtttgcccagctgggcctcgggccggggcgaggacggggcatgcggggaggggacgggagcgccctcgacactcgtggggcgcccacaacctcgccccgctcctggacaccctggccaggtctcggaggtgaccccgaggtcccgccgctgcgaccaccgccttccccgaaccccagcccggcctcgttcatcggggcgcccgctgaggaccaggccccgcgctgggccccctccgccagtccacggagcctgcccgggaccccaggatggtggagggaggaggcgacccctgtggtggggagggggccaggtgtccacgcctccaccagatccccgggcccgcgcggggtgaacgtcttgtgggtggggagggaggagggacgggcggggtgaacgtcttatgggtggactgtggcggttgagtgcaggaggagactggggttgtggagcccgcacttggagggacatggggtcacgggcagggaagcgatgtccaggcagagggcatggccagtgtgggggcagaagtgacaggcgaccccaggaacccagggaggggtcggtgagctcagcggccacccccagacccccacccacaagcctgtctgcacctgctcccaagaggtgcagctggggtgtcaggatgagctctggcattggtggagtccagggtctgtcttccgcctggaatggtgtggcctgggccccttccccagctcccagcccgcctgcaccactgttcttggtgcttttctgtggggaccccaggcctgactgggcaagagatagaggaggactcggccaggcacggtgtctgtaatcctagcactttgggaggtcttggcgggcggatcacgaggtcaggagttcgagactagcttggctaacatggtgggtgaaaccccatctctactaaaaatacaaaaattagccggccgtggtagcgcacccctgtagtcccagctgcttgggaggctgaggcaggagaatcgtttgaagccgggaggcagagggtgcagtgagccgagatcacaccactgcacgccagcctgggcgacaaggtgagactctgtctcaaaataataataagatagaggaggactcaaaccttagtcccacagaggggtgcagccccaaccccttgaatcagaccctcacagtgatgtcgcttggc

SEQ ID NO: 12755 - DNA, 1635 bp, Artificial sequence
  DNA replication origin
ggcggcggcgcgggcggcaggtgcgggcgggccgggcttgcgctcgggggcggcggcggcggcggggccgggctggccctcgacgcccggcgcggggaggccgcggggaggcggcggggccggggcctgcagagtcggagcggaacgcgggtagggacttccgcggcagcgcccccgcctcccggacccccgtccgggcctgcgcgttgccgacccccggggccggtccgggcaggaggcggagggggcaggcccgggaggccacgcgtgacacctcggggtgcccgcccacgccttctcggccgcagcggcaggggctgggccgcggccgcccccaggacacacccatccaggaggggctgtcatcgtctaggtctctgcaggaggaggcggctccggacgccccctggggggcgggaggcgctcggcccgtcgccccaggagcccgctttgtgaccttgggggccttatccgggctttccctcatctgcagaaggagccccggtgggctgctcggctgtcttctgctgccggcaggtaggtagggacacccatccctgggattggatggggtctgggctgtcccgcgtggcagcagaggtaggaaaggggctgggctttggtcgaggacccgatgggcaagaggaagtgcaggtaccaggaggatcaggcccccagctctgcttgtgtggggagacctcggtgcttggtttggttcaacaagtgtgggcaggtctgggggccgggtggggtggtgagggggctaccctggggaacctgagatggcccccgtggaaataacctgcaccaggagcaaacccaggaaagtagggggatccagaatccgaggacagacagtgaggactgtggtggtcggggaaggaagtccttcaggagggcatgaagacccgaagggctctgagggcagcgggggccacccagagggaatgaagggggctagacacaagcacacccccacatctcccgctctctgagttgggtttccctggctttggagcttttgtgaggagtttctatcaactttcaagctttgcctcttcttcctgcccttgcctcgctcccttctcctcttgggagataccttgtcacctcccattctaaatgttggctgcagcaccgtatcctagagtgcagggccctagtagaaatgagggtttggggccgggtgaggtggctcacgcctgtaatcccagcactttgtgaggtcgaggcgggtggatcacctgaggtggggagtttgagaaatgagggtttgggatgacgttggtgaagctccctgtggcctctggtttgggattgatgctgatgagaccccctgtggcctctgacccagagttggatgccgagggagaagtgagcagtgtttacagtggactggcaggctggcaagaagagggcaagagtgcaggcctgggggaggcagagataacccagggggagttgctggaatctaaactctgcccggactgctgaggtccgtttttcaaaccattatgttctgaatcttgggttggggacgatgtctggctgtgcttctgacctctgtaggagctggtcctccaccttctctggtcatccgtgggtggacttcttgggagaaagaactcagtgtcg

SEQ ID NO: 12756 - DNA, 1568 bp, Artificial sequence
  DNA replication origin
cgagccagctccatctacatgttgttcattgcctgcacaggtgcctcgcaaggctgaagggagagggcaggggtgcagcttggtgtgagaggggcagaatgggggaagctgagcaaagcttagagctgacaggccgggcacggtggctcacccctgtaatcccagcactttgggaggccaaggtgggtagaccacctgaggtcaggagtttgagactagcctgaccaacactgagaaaccccatctctactaaaatcatcatcatcatcatcatcatctgggcgcacgcctgtaactccagttactcgggagactgaggcaggagaattgctcaacccgggaggtggaggttgcggtgggccgagattcggccattgcactccagcctgggcaacgagctcaattccgtctcaaaaaacaaaacaaaataaaaaaaggctgggcgcggtgggtcacgcctgtaatcccagcactttgggaggccgaggtgggcagatcacctgaggtcaggagttcgagaccagcctggccaacatggcgaaactccatctctactaaaaatacaaaaattagccagctgcggtgctgtgcgcctgtaatcccagctactagggagtctgaggcagaagaattgcttgaacctgggaggtggaggttgcagtgagcttttaaaaaaaaaagccgggcgtggtggcctgagcccataatcgcagctacttgggaggctgaggtgggagaattgcttgaacccacgaggtggaggttgcagtgagccaagatcgagccactgcactccagcctgggtgacagagtgagactcttgtctcaaaacaaaaacaaaaagcttagagctgacaaaggcaggtcttctgtggacagggccgccggctgcgctgtcttccaggaaggccagggaggcggagttctccaggagctttggggaaaactgccccagcgtctccacctggttttctcagcacaggatccctgcttgggtttaaccttcggtcgcaccccttcctagagtttgccccgttcctcagcaggtggcaagccctggagggagccggcggtctggaagagatgttggacgggagccctggctttcctgggagggacagtttcaggtgctgcgtgtccccaggttcctagctgggggcggcggctttcctgccttgcggctgttcaggactggcagtgggacatgggcaaccgctcacttggtgaaaggaggtgccccgtccgactgaaggaaggtcctgctggtggcgtctcggaagccctgatttctcgggacaggaacctgccagaggctcctgtcaagttcacttacctctctcttctggcctgcctttgtcaccttcaggagcctggttctggacggacgacatagaggaccacgaggaggaagacgacgaggacttcctggcggaggtggccgaggaggagaacgagcccccagggctctggtcggcggcctacggcgtgggggacgtgcctgggacgtgggggcccgacgactcggattcggcgcagactccagaggggtggggacccgacccaggcgg

SEQ ID NO: 12757 - DNA, 1266 bp, Artificial sequence
  DNA replication origin
gcgaacgccccttcccgtgccctgagtgcggcaagcgcttttcgcagcgctcggtgctggtcacgcaccagcgcacacatacgggcgagcggccctacgcctgcgccaactgcggccgccgcttctcgcagagctcgcacttgctcacccacatgaagacgcaccgcggagccaccgcagcgccgggctcgggttcggccccagcccccgcgcccaagcccgaggcggccgccaaggggccgtccagtgccggccccggtgagcgcggcagcgccctgctggagttcgcgggcggcacaagcttcggctccgagcaccaggccgcgttcgccgggccctcgggcgcctaccgggagggcgtcctgtgaggggcccggggccgacagcagcgcagcctgcagggccaccggcccctcccttggacggccggccccccgctcctcgggccccgggaggctgagggtcccagtcctgggtgcggtgccttccctcagccctcgccctgcggccccgggtctcatgcccgccgggtccgtgtgctcagccggagacgtgggggagctctggggagaagagcagcgcggaggcagcgaggccaggacgtcacccccacggagactgcgatatcccctgggtgggcccgggctgtgaagcagggcggtagttggcgggcgatgctatttatttcactcggattccgacttgggtggtctggggagcaagggatttgtgtgtttgcaaccgggtgtggcggcgagggaggggcccggccacccaggtgggccagcgggatgcctgggaggccggtgggtttggctgaccacttcttcccattcctcagtgagagacttgggccctcccggtcatccgagtctgtcccgaaggtttaactgcgcgcggcgaggggaggccttgtaggtttccaaagggcggagctccagtgggaaaacttgaaacttgtcgtctgcggatatttatttccacttcttgtatggcctgaagaatctaggaggagaaaaagccagataccaaacttacggccaggcagacgggtcgcgggtgttgacagggtcctgagggagtttgaagccttattctcgagccgcctcctcttctctacccacacttgcaccgaggtcaccccggcaccctccgcaccggttcggttttggtctctgcttgtcctctcagtccttggtactttcgtctccctcagccggaggtggcaaactcagacatctacgggcgcccgaggccctcgcagcc

SEQ ID NO: 12758 - DNA, 1032 bp, Artificial sequence
  DNA replication origin
tgtcctctcagtccttggtactttcgtctccctcagccggaggtggcaaactcagacatctacgggcgcccgaggccctcgcagccctgagccccagctttcacttccctgggctgcccctctccgggagcaggcagacgccccgttctcggagcccagcgctcacttagagcgactgaggttggtcgaaggatctttccccacatcccataatcagggccctaggacactcgcaggtccctttaactctgcttctgtcattacactagaacaagtagtgtttctgtttagagtcccatttcacaaattggttagtggaggcacccgtggcctggcagcttgcacagtggctgtccacctcgggggggtgtggacctgagccgtggctcagtgacaaaccaggcacccaactatgcaaggcccctgcctggtgggcatcctaccctctggactgggcccatggaagccactgggcgggcagctggggtgtagttcatgtgaagccccattcccctcacgcttttggggccactgtgaatggggccaggaaacggatttttggtgcagctgcattccctaatagacctagttccctccacgttagtgtagacatggccttgggggctgagcgcagcagccaggctgccagggctgggggcgggtaggaggcacggtagttggtgggtgggaagagggcctgggtggtggcggtcagttagcctggctgggtgaggttggtgaggttgcggggcggggtggtgaggagagcaggggtcccagggaggcattggggtgctgggtaatgacctcggccctgggtttctcctctccctgcgggacaggagcctcagaaagggccaagggcaaggtgggcttggggggctctgggaatctcagctctagccctgtatggccaggatctgctgtctccgtccctcctgggccccagcagctgtcctgcagctgtcagcaggagggcctggctttaataaagagtggacaaactgaacttctgactggactccatgctgt

SEQ ID NO: 12759 - DNA, 1022 bp, Artificial sequence
  DNA replication origin
gctcactgcaaactccacctcccagattcaagcgattctcctgcctcagcctcctgagtagctgggattacaggcacccaccatcacgcccagctaatttttgtatttttagtagagttagtagaaacgggatttcaccatgttggccaggatggtcttgaactcctgacctcaagtgatccacctgtctctgcctcccaaagtgctgggattacaggtgtgagtcactgtgcccagccctttttttttttttttttttttttttgaggtagggtctcactctctcccccaggctggaatatagcagtgcgatctcggctcactgcagccttcacctcctgggataaggtgattctcctatctcagcctcctgagtagctgggactacaggtgtgcactaccacaccagctaatttttgtactttttgtagagacagggtttcgccatgttgcccaggctggttttgaactcctgggctcaagctatccgcctgcctcggcctcccagtccctgttctgttcttttatagtcctctatgggctctgacttttatagttcttagctttggttattacattattatgtgttattggttgaatgactgtttcctccaagagacagtgtgatccaacaagaaagattttttttgttattctttctccccgtggaccagcacagtgcctagtaaaaaaataattatctgcataattaacatgtttgaatgaatgggtcattgaatggagaaaggtgaagtctagacctagagacatcaggttttgggtggtccccagctaacaattccttgctgagctgcagagcctcaacctgccccaaccttttttttgagatggagtcttgctcggtcgcccaggctggaatgcaatgccgcgatctcagctcactggaacctctgcctcttggattcaagcgattctcctgcttcagcctccccagtagctgggattacaggcatgcgctgccacactcagactaatttttgtatttttaatagagacgaggt

SEQ ID NO: 12760 - DNA, 1982 bp, Artificial sequence
  DNA replication origin
tgtccccgccccatgtgggtggagcctcctgcccgggcctgtgtcgcggcagagcctggcgggctttgtgcgcaggcgcttgcggcttcgcggggctgaccgtgcgcttcgcctgcggggtcgtgctggggcggcgggtgagcctggggggctgcagagcgggcgcggggcgcgtccgaacagtcgcagccccgagcccctgggaccgccttccccgcggaggcttgggctcagcgcctggggcggaggtggggcgggggcggtccgcccgcagcagggggtgccggggccgcctccgggtttcctccgctggatgcggcggtggtgcgctgtcggcccggcgggtgcggcgggtgtggggtcacgggtgtcgcgcgccgccctgggccctcctccgaggtgcctcgcgtggggcccgtgccagggcccgctgagtcggggccgctcgtgggccgcctggctgccgcctggggcctccggccgctgcgtcccgcggcttctgggaaccgtgcgcgctcacaggcggacttgggcctcgaacaaggttcctgctaaattgagttgtgccttaggctctgctggacagagcagctccactgcgttgacaaggagggggctcagggacagaaatctcagcgggaagacaacccctcctccgaagggaggcccatcagggcttcagagaaggggcagagaatcgcataagaggagcgtgtggtccggaggggcccgggcttaggggaggccctgaaagacccagtagaggaagggagctgggcagagggtgatagcagaggccagactggtctcaaactccaggcctcaagtgatcctcccgccttggccttgcagggcgctggggttatgggcatgagccactttgcctggcctactcaattctgttttaaatgtttctgtgtttgtgaagtgggacaaaaattgttaaagcaatgggaaacattgcaggtttaagttccactaaatcatactggagtcaaaaagggatgcggggatgtttccctcctttccttctgcagggtcaaggttacccagcggacgtgtgggggtttttaggagaattaggcgggtgcagagcctgccagatcgctcattctgtttcttccccccttcttccaggtacgctatttgaagaacaggtttccatgctcttagaggagcatcagaaaatgaacaaaccccaggtgagttccttttttagattttttcattttccaggggatttgctggcttttataaaattcgtttattcagatggacatttaaaaagctacttcaggataaatgaggagtgagaggcaactgagcagtaggcagaggtggctgcggaaccctgtggtcatgtgatcctacaatcgtcaaaggagaggggcagatttgtctttttttttttgacacagagtcttgctctgttgcccaggctggaatgcagtggcgtgatcttggctcactgcaaccttcacctctggggttcaaccaaatctcatgcctcggtctcccgactagctgggactacaggtgctcaccaccacacccggctaatttttgtattttttatagagatggtttcgccatgttggccagtctggtctcgagcccctgacctcaagcagtcctcctgcctgggcctcccaaagtgctgggattacaggcatgagccactgcgcctggccttcatttgtcttttatcttcctaatctgcacttcattttcactggccaccagaagaaacgaactagttactcttgggacagaaagatttcctggagtctgaaagaatgtctgaacatcgtcatggagcaaagaaccttgcagtgaacctccctgttgcctgtaattgttctttgttggaagttggcggtacaactcaggttttattagggggaccagagcaatatggactcaatagagactttttggaacatctgttttgatctaaggacaaaacctaaaagcatttggag

SEQ ID NO: 12761 - DNA, 971 bp, Artificial sequence
  DNA replication origin
ccgtccgggagggaggtgggggggtcagccccccgcccggccagccgccccgtctgggagggaggtgggggggtcagcccccccgcccggccagccgccccgtccgggagggaggtggggggggtcagccccctgcccggccagccgacccgtccgggaggtgaggggcgcctctgcccggccgcccctactgggaagtgaggagcccctctgcccagccagccgcctcgtccgagaaggaggtggggtgtcagccccccgcccggccagccgccccgtctgggagggaggtgggggggttagccccccgcccggccagccgccccgtccgggagggaggtggggggatcagccccccgcccggccagccgccccgtccgggagggaggtgggggggtcagccccccgcccggccagccgccccgtccgggaggtgaggggcgcctctgcccggccgcccctactggaaagtgaggagcccctctgcccggccaccaccccgtctgggaggtgtgcccaacagctcattgagaacaggccatgatgacaatggcggttttgtggaatagaaaggggggaaaggcggggaaaagattgagaaatcggatggttgccgtgtctgtgtagaaagaggtagacatgggagacttttcattttgctctgtactaagaaaaattcttatcctgttgatcggtgaccttacccccaaccccgtgctctctgaaacatgtgctgtgtccactcagggttaaatggattaagggccatgcaagatgtgctttgttaaacagatgcttgaaggcagcatgcttgttaagagtcaccaccactccctaatctaacccaggtacacaaacactgcggaaggccgcagggtcctctgcctaggaaaaccagagacctttgtttacttgtttatctgctgaccttccctccactactgtcctatgaccctgccaaatccccctct

SEQ ID NO: 12762 - DNA, 1296 bp, Artificial sequence
  DNA replication origin
tcacctcccggacgggtcggctggccgggcagggggctgaccccccccacctccctcccggacggggcggctggccgggcgggggggctgacccccccacctccctcccagacggggcggctggccgggcggggggctgacccccccacctccctcccggacggggcggctggccgggcagaggggctcctcacttcccagtaggggcggccgggcagaggtgcccctcacttcccggacggggcggctggccgggcggggggctgacccccccacctccctcctgggcggggcggctggccgggcagaggggctcctcacttcccagtaggggtggccgggcagaggcgcccctcacctcccggacggggcggctggccgggggcgggggctgaccccccccacctccctctcggacggggcagctggcctggcgggggctgacccccacctccctcccggacggggtggctgccgggcggagacactcttcacttcccagacggggtggctgccgggcggaggggctcctcacttcttagatggggctgctgccaggcggaggggctcctcacttctcagacggggcggttgccaggcggagggtctcctctcttctcagacggggcggccgggcagagacactcctcacctcccagacggggttgcgaccgggtagaggcgctcctcacatcccagacagggcggcggggcagaggcgctccccacatctcagacgatgggcggccgggcagagacgctcctcacttcctagatgggatggcggccgggaagaggcgctcctcacttcctagatgggatggcgaccgggcagagacgctcctcactttccagactgggcagccaggcagaggggctcctcacgtcccagacgatgggtggccaggcagagacgctcctcacttcccagacggggtggcggctgggcagaggctgcaatctcggcacttcgggaggccaaggcaggcagctgggaggtggaggttgtagcgagccgagatcacgctactgcactccagcctgggcaccattgagcactaagtgaaccagactccatctgcaatcctggcacctcgggaggccgaggctggcggatcactcacggttaggagctggagaccagcccggccaacacagcgaaaccccgtctccaccaaaaaaatacgaaaaccagtcaggcgtggcggcgcgcgcctgcaatcgcaggcactcggcaggctgaggcaggagaattgggcagggaggctgcagtgagccgagatggcagcagtacag

SEQ ID NO: 12763 - DNA, 1070 bp, Artificial sequence
  DNA replication origin
ctcactttccagactgggcagccaggcagaggggctcctcacgtcccagacgatgggtggccaggcagagacgctcctcacttcccagacggggtggcggctgggcagaggctgcaatctcggcacttcgggaggccaaggcaggcagctgggaggtggaggttgtagcgagccgagatcacgctactgcactccagcctgggcaccattgagcactaagtgaaccagactccatctgcaatcctggcacctcgggaggccgaggctggcggatcactcacggttaggagctggagaccagcccggccaacacagcgaaaccccgtctccaccaaaaaaatacgaaaaccagtcaggcgtggcggcgcgcgcctgcaatcgcaggcactcggcaggctgaggcaggagaattgggcagggaggctgcagtgagccgagatggcagcagtacagtccagcttcggctcggcatcagagggagactgtggaaagagagggagagggagatcgtggggagagggagagctttttttttttttttttgagatggagtctcgctctgtcactcaggctggagtgcagtggcgtgacctcagcttagtgcaagctctgcctcctgggttcatgccattctcctgcctcagcctcccaagtagctgggactgcacgcatccgccaccatgcctggctaattttgtttttgcatttttagtagagacggggtttcaccatgttagccaggatggtctcgatctcctgacctcgtgatctgcccttctcggcctcccaaagtgctgggattacaggcttgagccaccacacctggcctatctatataggccttgctcatctgttttctctcacatctaaaccatcctgtggtatttctccttaacagccatgtctccaaacactgcttttcactccatttcctgcttatgatttctgttgggctgacctcatttttttagtttctctgtcatgcttttccctcagttaactgttccctatgtttaataatttcaccttttcagttttgagggtcatctttttaaaaatagcaaatatat

SEQ ID NO: 12764 - DNA, 776 bp, Artificial sequence
  DNA replication origin
cctggccctcccaaagtgctgggattacaggcgtaagccaccgctcccagcctgagtttctttttagaaacaacagtctaagaacaagatagtaaaatcctgtcttttttgtacacagagtaaagtggacaaataggtgaaagaataaatgaaaggctggaatcccaccttcctctgctgtcccagagcattggatattgaccgataggaggcagcaaaccactcacagagccaggaagaaatagatgcgttggtattgccaggagaagggtctggcccggctaaaatacgctgaccatagccaggagatactgatggagagaaaggaacacagagaggtcacatcttggaagaggaagattgtggagagggggaatgagggtctggggaggggctgcccatcagagaagggacttcagtgttggggtgactgtactcatttggaaatagcagggtggaggggtattcgatggtcggatgcaaatccgagggaggaagggatgtcggtgatgctcccaggatggtgggctccgatgggatctttggtgggggcgtgtctaggtcagctggtgtcaggagggtcttttgtgtgccaggcagagaattgtctcaaagagctgagagtagaggggccaggagcttcagggctgcggtcagactgtggaccagggctcagatcctaaaggacccataggagaggcaggggctattcattcactcggcaagagaccagcagagtcctgagggagatgctgacaaatcataaaaagaccaag

SEQ ID NO: 12765 - DNA, 1170 bp, Artificial sequence
  DNA replication origin
tgcgcgctgccgccgcactgccatcgcttcctgtgtgtcctcaggtcaccgcttgctctagttcccaggctttggcccccagtggacgagaatcgctgagcctgcggggctggacgctgagcgcctaggccagcacctaggcgggcgcggagctatgtgggccagggttcgcacgggccgggtggaggcttgagcggggacccccgagcgtgagcccctgagccggcggccctgcggccaggggaaccgggcgggaggtggcgaaggtggcagcggaggcggaggcgaaggggcggcgggaaccgggcctggcccgtgtgtgtcctgggggcctggcccaggccgccgctgtacggtgagtcccagggaggcggatctgggccccgggaaggacaccctcctggatttgccccgtaggcccggcccgggcccctcaggagcagaacagccttggtgaggtggacaagaggggacctcgcgagcagacgcgcgccagcgacagcagccccgccccggcctctggggagccccaggagggtaagtctttgggttttcgggcccggagcgagaaaggcctgggtgaagtcaccgtatgttcgggaccttagagtatgaggcgggggagggtccgatcgcttgcaggagaggcgtgtgtttggccttgaggcgctgcacgggaatatctgggaggacgaggcttacgggggcgtggagggtatcaccagcctcagctgcagacgtcgtctccactccccactaacccctaacagcccttcctcctcctttccgtgctccagatttcgaccgcctctaaacgtccgtcagcatctctgttctctcatttaagtgtctgctgattccccccttagatctgccctggagactggtagtaatgcaggaacagtctgcagggattctctcttgctgcctcagttgctaggggaagagactgggccttagcaggtgggtgacttgaccgggtcactggctttgtgggtagagttgctcatagtagaactcaggagtcttatctcccaggccagtgttctttctcccgtatcctagttttcttagtagaaggttattaggtgcagcaataaccaagttcagttagataatttagaaacaaaaccatattttatacacattcatttcatttctgagagctca

SEQ ID NO: 12766 - DNA, 1453 bp, Artificial sequence
  DNA replication origin
acaaggaaggaagagagagagtgtgagggggatgttcagtgtgtccacaggagaggcaagaacagaatcagaggtcaagcagctcctggaaccgcccgcaggactagggattcccgcccccaccccccaacgcttccttctgtcaccccatggccgttctgcttcagggcgactttgtgaagaatgtcccgatgaaccacggcgtgtacacgtggccggacggcagcatgtatgaaggcgaagtggtcaacggcatgaggaacggattcgggatgttcaagtgcagcacccagcctgtgtcctacatcggccactggtgcaatggcaagcggcacgggaaggtgggcgaggtggccacgtggagggcaggtggggcaggagtgaagggggtgggcggacatggggggggcagccatgagggggcaaggtcgggggggtcgggggggcagaaagggggtggggtggccatgtggagggcaggggaggggctgggtggccacatggagggagagaagggggtaggggctagcggcgctgtccagggcatattcactttttgtttattgaggcgaaattcacatcacataaattaaccattttattaatttttttttttttgagatggagtcttgctctgtcgcccaggcgggagtgcaatggtgccatctcagctcactgcaacctctgcctcccgggttcaagcaaatctcctgcctcagcctcccaggttgctgggactacaggtgtgcaccaccacgcccagctaatttttgtatttttagtagagatggggtttcgccatgttggccagggtggtcttgaactcctgatcccaagtgatccacccacctcagcctcccaaagtgctgggattacaggcgtgagccacactgtgcctggccgtatgcatgctttaataggctatttattgagttgtgttgttgttgttgtgtgtgtgtgtgtgtgtgtgtgtgtgtgttttacagcagattgcttgagacatattggagggattgggggtggtgacttctagacagcagcatctgcatggctgcaagaaggaatgagtttgcctgatcatgagaaagaagatagaaaaattctctctcacacacacagataaacctgtgaaaaagccttttgaggcttttctatgtagatcaaacaaagggtactctatgctcacttatactcggaggcggtaaaatgagtagcatgtccaaatgggtaaaacaacagtggatctggtgcctaagagagagtgaccttccgttacatggaaggcgcaactgttcactccaggtggcaacagacaggatttctctaggtacttaattgactaatagttactggatagaatgaatatactcgaatatgatgaatacagtcattctgtgccttaatgtgatactttttattttattttattttgagatggagtcttgctctgttg

SEQ ID NO: 12767 - DNA, 1917 bp, Artificial sequence
  DNA replication origin
aggcggagtggagccttgggaactccccggccaagcacaggggttcgaaaatacagctgataccccgcgggcccttagcacgcgccccagcgccggagcagggtcagggtcttcttgcgacccggccccgctccagatccccccagctctcggccgcggacccgggccgcgtgtgagcgccctttgcacctcctatctccagggtccgccgagagccacgattttttacagaaaatgagcgataaagagattttgtactgtcctgactggagagtcccaggccgcgggggacggagcgcccctgggatgcacgcccggctggcccggcctctgggcgcggtggtgagaggccctgacctagggggaccgcggggtgtggggagtgcggagccccactgggggcggggcgaggtgtccgtaggccccgcccaccagcccctcctccctcctgaggccccgcccccccatgcctgcctgcctttgccagcctcagccaggagaagggagcgggggagcggctggcagagacagaggagggtgtgacggcgttgctggtcccccatgggtccagagggcgagacagactccgaaggcacaccctccaggggcctgtgtaggcatcctcggccctccagcgaccacccccgcgtcggacagggtccacttccgagccacggtggggtcaccctgtgcccagtaggggccttggaagtagtggttggaggccaggtacgctcggttactaccctttcctggctacagcctcagctgcgatgcccaagagaaacaggctggtggaggggcagaccccctacaaggcctgaaggtgccgttcctccacccgctcctcttgtggccagaggagagggacacccccgccatgaagagctctgaacggttgggtgaggacaagtcggggccgtgggagggccatggagcccccagctgcaccccagcaggcccggggccggcccacaccattcctcactccccacagcctctctacccctgactttggtgagaccctcgtccgtacctccaggctccatgcccgcttcagcatcgctctatggattctcccagccctaaactggccccatctctcctctctgccctcatgtgagtttggttcttgaagcctctagtggtccctggggccagactctgtggccttggatagggagtctcccatctgagccataggttccttctctgttgagtgtgtgacggaacatgttggagcccttagtgtggcagctgcaagcgccccagaccctgtaagaaacacaaaagggtgcggcgggagacttgacattttctaaatctgggagggaacgctgccttcctcatgccgaccttcagcgacaagcagactcagaagcggtcccgaggtgccaccgtaaactgggtgaaggccagcactgtgtgcttccagttccccctcggcatctgtggactgagtgttctctggaggtggctggcgacatcctacaggcagcctccagcaaaccagtcggagttgggcaacctgacgctcggatgattcacctctgaatggagggcaaggtgatatttggaaggttgtgggcccctgggatgctgggcaaacggggagcgggtacctggatagtgggcctacagctcttcccagttccgagtcaattccaatgtccatggtgccaaggaacagaggctctgatgttgagcagacttgaaggtgatccaggcacatggagtggccactcagggtcttggctcctggctgtgctctttctatctgggcatttcccatgagaaggtttcacaggccacctggctgctcctggcacacggagaatgcccagatgctgacatgtgccaaacaacacatatgtacacctgataggccacgcacatgcaacatgcaaacacacgtga

SEQ ID NO: 12768 - DNA, 1143 bp, Artificial sequence
  DNA replication origin
ttggcactccatccagcctaaacaacaagagcgaaactgcgtctcaaaaaaaaaaataaaaataaaaatagaactaaaaatactagggagtgggccgggagcagtggctcatgcctgtaatcccagcattttgagacgctgaggtgggggtatcacctgaggtctggagttcgagaccagcctgggtaacaggctgtaaaaccctgtctctactaaaaacaaaaattagctgggcatggtggcgcatccctgtgatcccagctactctggaggctgaggcacaagaatggcttgaacctggaagatggagattgcagtgagccaagatcgcgccaccgcacttcagcctggaggacagagcgagactctgtctcccaaagaaaaaagaaaaaaaaagaaaaaagaaaagcagtgagtgggctgggcatggtggctcacccctgtaatcccaacactttgggaggctgaggcaggaggattgcttgaggccagaagttcaagaccagcctgggcaacataggagaccctgtctctacaagaaatttaaaaattagctgggcgtggtggcgcgtgcctgtagttccagctgcttgtgagactgaggtgggaggatggcttgagcctggaagattgaggctgaagtgagcatggcactgcgctccagcagtgggtgggggaagggagggagggggcgcggtggggaaacggagcaaccgtgtctggaaaaaagaaaagagcaggaagtatgcatacagatatgtgtgtgtgtactgagctatggtgtgaaatcattcctgactgcgggttatagtcaaaaccccatgaaaagcatcactacagcccacgggtgtgtcagggacacagtgttgtgagccctgggaaggcagggcctgtggccagcactttatcaacactggcgcatgcaccctaagaggcaaagggatttgcattgtccccttacagcgtgggacactgaggtcgccaggggcatggcgactgtaagggacagtgctggatgtgagcctcgcctgcaggaggcggtccaggaaacgtgggtggaggggctggagaaattgagggccgcgtggcccgggaggctcccggaggagggaagggcctatctcagcgaggggtataggcgga

SEQ ID NO: 12769 - DNA, 1155 bp, Artificial sequence
  DNA replication origin
accttgaaggcgaggttaattaagtcctgttgtgggatttgagggccggaatttaatttttggagttttatttaatgtcgggagcagactgggtaataaaatgtatattgagaataagacggccttttgaccttttagggtctagggctgtaaggcaactcagggttgctgccaaacgagtcatgaacggggctggatttttaaatttgatgaaaaagagcctaaacgctatctgatttgagaaaaagaaaaaggagcattaaccttgactatgcctttagctccagccacctttttaagacgaaattgctgggcaggttggggagggctggtcacagaattaaactgcaagccagatccagtgtgaggaggggaggtgataaaaggattatagggtggaggagcagaggctgaggaagaattgggagctagctcagcctggcgaggaggggagaggtcagatgggtctgtagaaaaggaagattagaaagactcagcgacactaggggttgggactgaggggacaggtgggagggaaagaaggaagatttgggatgagttgcattgggaacagagactagggagggaccaatgtgtaagagaatacctggacatcaggcatctcagaccatttgctcattttatgactagaattatctagatattgtaggatggaaaatttgaaagtgccgttttctggctatttgaaaccactgttgggtttgtattggggtcaagcggcattgtagaagaaaataaggcatttaggttttaggtcaggtgtgagttgaagaggttttaggttttgaagaacacaggctaaggagaagaaaggggaatggaggatggaagcttgcccatagtgaaggaggcaagcctagagaaaagagacagtagagacatggagagaagggatggggggttcttgccttccagaaaagagggaaaggggttggggcacagaaataaaaggttggggtgcagagataagaggtcaggttgtggaaataagggatcggggctcagaaataagagggcgggcatggaaataagggatcagggcacagagataagaggtcagggcatgaaaataaggtatcggggtgcagagataagaggtcggggttcttgcccctcccccagaaaagcaggact

SEQ ID NO: 12770 - DNA, 863 bp, Artificial sequence
  DNA replication origin
tgggggtcagcccccgccaggccagccaccccgtccggaagggaggtgggaggggtcaccccccgcccagctagccgccccgtccgggagggaggtgggggggtcagccccccacccggccagccgccccgtctgggagggaggtgggggggtcagccccccgcccggccagccgccctgtccgggaggtgaggggcgcctctgcccggccacccctactgggaagtgaggagcccctctgcccggccagctgccccgtccgggagggaggtgggggggtcagctccccgcccgaccagcaccccatccaggagggaggtggggggggtcagccccccgcccggccagccgccccatccagcagtgaggtgggggggtcagccccccgcccggccagccgccccgtccgggagttgaggggcgcctctgcccggccgcccctactgggaattgaggagcccctctgcccggccaccaccccgtctgggaggtgtacccaacagctcattgagaacgggccatgatgacaatggcagttttgtggaatagaaaggggggaaaggtggggaaaagattgagaaatcggatggttgccgtgtctgtgtagaaagaagtagacatgggagacttttcattttgttctgtactaagaaaaattcttctgccttgggatcctgttgatctgtgaccttacccacaaccctgtgctctctgaaacatgtgctgtgtccactcagggttaaatggattaagggcggtgcaagatgtgctttgttaaacagatgcttgaaggcagcatgctcgttaagagtcatcaccactccctaatctcaagtacccagggacacaaacactgcggaagg

SEQ ID NO: 12771 - DNA, 1192 bp, Artificial sequence
  DNA replication origin
caattcccagtaggggcggccgggcagaggcgcccctcaactcccggacggggcggctggccgggcggggggctgacccccccacctcactgctggatggggcggctggccgggcggggggctgaccccccccacctccctcctggatggggtgctggtcgggcggggagctgacccccccacctccctcccggacggggcagctggccgggcagaggggctcctcacttcccagtaggggtggccgggcagaggcgcccctcacctcccggacagggcggctggccgggcggggggctgacccccccacctccctcccagacggggcggctggccgggtggggggctgacccccccacctccctcccggacggggcggctagctgggcggggggtgacccctcccacctcccttccggacggggtggctggcctggcgggggctgacccccacctccctcccggacggggtggctgcccggcggagacgctcctcacttcccagacggggtggctgccggacggaggggctcctcacttctcagatggggcggccaggcagagacgctcctcacctcccagacggggtcacggccgggcagaggcgctcctcacatcccagacggggcggcggggcagaggcactccccacgtttcagatgatgggcagccgggcagagacgctcctcatttcctagatgggatggcggccgggcagagacgctcctcactttccagactgggcagccaggcagaggggctcctcacatcccagacgatgggcagccaggcagagacgctcctcacttcccagatggggtggcggcccggcagaggctgcaatctccgctctttgggaggccaaggcaggtggctgggaggtggttgtagcgagccgagatctcgccactgcactccagcctgggcaccattgagcactgagtgaacgagactccgtctgcaatcccggcaccttgcgaggccgaggctggcggatcactcgcagttaggagctggagaccagcccagccaacacagcgaaaccctgtctccaccaaaaaaatacgaaatccagtcaggcgtggaagcgcgtgcctgcaatcgcaggcactcggcaggctgaggcaggagaatcaggcagggaggttgcagtgagctgagatggcagcagcacagtccaggtttgactcgg

SEQ ID NO: 12772 - DNA, 1115 bp, Artificial sequence
  DNA replication origin
ccggacgaccccagcccggctttgaccccgagacacctgttccgccgcgcccggggtttggttccatcctccacgcttccccaccaacccggagaggggggagggcgaggggagacgagaccttggacccgtagcctgagggcgcctccgccggccatacctgacatcagctgcggctccctctcgcccctcctggggggcggagagggggacgacttgggactggtgacctttgcttctctgggcagccgcagaagtggctcgtggccgctagccgaggccgcccgctgccgcccagattattccccggcagcggcagcacagcggcggcggccaaggcgggcccagcgcgcgctcccgcccgctcgctccgcccctccccgcagcgcgtccaggccgtggcccgcctatggcgcagccgccacccgaagtctcctggcgctgacgtctccgccgccgcaccagccccagggaagggcggagcgggaggggcggtgggcggggatacggcgacgtgaggaagcggggattggctgccgggtgcacgctccgccctaatgcgaaggggtctgggaagtcggatcttgcacgagcagtagattttgttgtatcccccttgcggcttgtgtctgctactctccgcatttctgatcctgctgtaaggttatgcactagcttcaagaccttgagcgggacgaaagcagggtaacaatagggagcgagaaaggggatgcttgaaggacctttgtctgaggtacaggctctaaccctgcaggactcttgtggcctgtagcctgctcttaacccgttcatttgtttttctgttctctccccgtgctctctttactcagtatctctctgggcttaataaaaggaagtaataagatgaagtatgcatacgggtgctgggtcatcatgtgagaaccaggaagagctgagaaccgagataatgataccagaaagctttctataggcacatttcgtctttggttctgtcagcacttcggttctgtggggcaatggccggaagagcttcttaggggcgtaacaaaacctatctcccctttcgctgggctctgaataaggaagttgtctttggaatagggggaggaggc

SEQ ID NO: 12773 - DNA, 1172 bp, Artificial sequence
  DNA replication origin
catattctgaattctgtttctgtcatttcagccatctcagccttgttcagaacccttgctggagaggtggtgtggtcatttggaggaaagaaggcactgtggttttttgagttgtcagagttcttgggttggttctttctcatctctgtgggttgatgtttcttcaatctgtgaggttgctgacctttgggtgtttttttctttctttcatctagtatgatgaccttgagggtttggttgtggtataagatggattcagtcaactggctttgtttttggaagattttaaggggccaatgctgaagctctcaactcttggactgtgtgttctctctctgggggacttgtatcgggccctgatcttgttgtctggatccttgaggttaggaatccactgtatggggggttggggtggggagctgaggtggttcggattgctgttcactacactaatgggtggtgttagccaaagcattttgtagtgcagtaacactgggatccatcctcgttcacacatgacagcagcagtggcagtggaagcatagtgaggtatatgcttgtttgctgcagcagggtacaggtgctgggatgcctgcctccatgtgggcattcatcacagcggcagaggcagcaccgctgggtgggggtcggggggtcgctgctggcaactgtgcagtcaggctggtggtggtgttagcatgggggtggggtgctggtgggcacaggtctgtgtgtattctctgtgtgctgcaggctagggtggtccctcagggcaggggaggatccactgttttctctgcctagtttcactcccagggcagtgttggcacaagggcagggcactggtgggagtagggctggctggctggctctatgcctgccaaggctccaactgcaatggtggtggtggtggtggggaggtggggtggagtgcattctcactgcagcagtagcagggcagggagcttgcacacactgcactggtgggtaaggaaggcaaaacctgcgcatgcacatgtgctctgggaaagcaatgtgggggcttgctgtgagcctgggagaaactgcagtgtagaaagggagcaggcaggctggtgcatggccatgggggccacccctctggagctgtctgccagccaggcatgatctgccagtacaggagctgtgaagtg

SEQ ID NO: 12774 - DNA, 1324 bp, Artificial sequence
  DNA replication origin
ggcggcgacggcgggcggggaccccgcggcgctgcgcctcatcctctgcgacgggggatgaggggtctgagaggaactggaggaggaggaggaggaggcagtggacatggtggctctgcgggccctggacgccgccggccgacacggaggcgcggggcgggaggcgcgcgagcgtgtgggagccggcgcgatagtgcgtgcgagtgtgtaagggggaggggcgggggtatcgctgtgggggaggagtctcggggctccccctccccaacgcacacccccgccgcctcggcgaggggggaggggaaggctgcgaaaacaaacgtccaacggccgcaaccgcccggctgggctcggtgtggcggtcacggccggggccgcaaggagcccggagccgccgccgccaccgctccaggcatcgtgctgacagggcaacggcccggatcacgcagccccgagggccgctcgcagccttctcctcagccctcgcagggctgcacgcacgggagaacccggcagctgcaaggagggccgggacccctgcttctggggaccagggtagagagaaagggcctcgaggtgctggcgctcctcggagtccgcgccaccgcaaacgccgccgccgccgccgccgcttctacccactcctcactccgaatggcaactaattcgccccagccgcaccccgcccccggcaccgcctcccagcgcccaggacccggcagctgccgcagcgagcatttccattggcttaggcgctccccactagaactcgagtgattggttctggaataggagtgagagaagcagtgtccaatgacaatggtgcctcctactttgaaggcggggcgtgaggggtggcagcgtgaggtgggggctgtgcgcgcagggaggagcgtaaaagttgacagccttgaggtaagtgcgagactaggaaagtgggactgtgtgtgtcctgcgcgtgtcccgacacccccagacacgcaaacgccccgctaggcaggttgcaggggctccaccctcctgggccgtctgtatgacttgagacacaggacacatgaggcaaactttaatttgcaagtacacctgcatccggtgggatgttttagttagaaccagaagactggatctcttttagtaagctgagttttcgtgaccagtagccttattaatcaaaagaacttctggtgatcaggagaaatgtctggaacctgcactgaacaaagtaaaatactcttacagcctaacatttgtagttatgcagtgaaaagagattatcaagttctatgttccaagacaataacactgaatagcaggggtcaacaag

SEQ ID NO: 12775 - DNA, 1029 bp, Artificial sequence
  DNA replication origin
ctgcctcctcctcctcctcctccagttcctctcagacccctcatcccccgtcgcagaggatgaggcgcagcgccgcggggtccccgcccgccgtcgccgccgccgggagcgggaacggtgcgggcggcggcggcggcgtgggctgcgccccggctgcgggagccggccggctgctgcagcccatccgcgccacggtgccctaccagctcttgcggggcagccagcacagtcccacgcgtccgcccgtcgccgctgccgccgcctcgctgggcagcctcccggggcccggcgcggcccgcggccccagcccgtccagcccgacgccgccggcggccgcagccccggccgagcaggcgccgcgggccaagggccgcccgagacggtccccagagagccaccggaggagcagctcacctgagagacggagccccggctcgcccgtgtgcagaggtagcgagcccaaccctcccgtcctcccgggctgcgtctccccgacggtgccctccgtggaaacttcagcctcttcgggcttctctttgctagtgcattatcgaaggtgtgaaagtggctttgggaatctcacccccctgcggtcgctgtggggcttggaggagcgaactgaaaagcgacttttatttgaccctcatgccgcccctcagagtctctcttccatcactcgcctgcttcgagaggtttttcagtttaagagctggctagctcattcgtgtgtttgccgtttgtagccggggaaggagaagctgggcgaaacacttaacacgcacacaaactcttcagcagcggataaggtggcggttgtaatctctaccgtctctttgtgcttttctgcaaagttcctaacgtgcctgtaactaccgggatagtattttattttttagagggttggtggcattagtttcgatgtaaggatatcggctggatgtaatgatatctgctagaggggacagttttgaatgtacaattgaagtgtatacggttttttccctcagtcctccctctctccctctcccc

SEQ ID NO: 12776 - DNA, 1352 bp, Artificial sequence
  DNA replication origin
ccacagatgccgagcagacattatcaagggggaaaaaaaaagacctcataagtagagtggcttttccctggaaaatctcacatatattatatcagtgaccattttccctctatctggcgtgctggcagcaggttgagttgggtgtcgcagtgagcattgggcccctcgcagcagtggacatactcatccaggggcctgtcctcctgcatttgtatttttaaggagatcagagtgcctgtatttaatgaaaatggccagtagtaaagtggattcctgtgagatgtctcttcccagtgtttttggaaggaaagccagttttttgactttgttcttcatttcctctggttttgtgataaaacaaagtatataaaagcacaatctctggagccagccagacctagctttaagtctggctctgcatggtggtggtagtgagagaggcgtgagtggttgtgaaagtggtagcagtgtttgtgttggtgatgctggtgatggcagcggtggtgacaaaggaggtgaaagcaatgacagcagcagtgctagaggaggtgctggtggtagtggtgatggaggagatgatggtagtggtggaagaggtgatggtggtagtggtgggggtagtggtgatgaaggagataatggtggtagtggtggtggaggtgatggtgatggtggcggaggaggtgatggtggtagtggtgggggtagtggtgttgaaggagatggtggtggtggtggtggaggtgatggtgatggtgatagtggtgggggtagtggtgatgaaggagatggtggttgtggtggtggtggtgatggtggaggaggtgatggtggtagtggtgggggtagtggtgatgaaggagataatggtggtggtggtggtggtggtggtggaggagatggtggtagtggtggaagaggtgatggtggtagtgctgggggtagtggtggtgaaggagatggtggtggtggtggtggtggtggaggtggtgatggtaatagcagtagtgaaagaggtgagtggtagtggtggtggtaagggtgacggtaatggttgtggtggttgttgcgatggtggtggcagtggtgaggataacagccacggtaaaggctccagtaatgacatagtgctggtaatggggatgtacttactatgaattctatagtagatccagaagacaaccatgcgaagcatcaatacaggagagtttgttggggtttctaggttatgttactttctcactctccatttcaccctagattgtcagttttatgtgagtttcacaggtgaggctatgaattgcagtgggacaggaggtctggccagatctcaccccagggtaacccaaccc

SEQ ID NO: 12777 - DNA, 1265 bp, Artificial sequence
  DNA replication origin
aaagcacatcttgcaccgcccttaatccatttaaccctgagtggacacagcacatgtttcagagagcacagagttgggggcaaggtcacagatcaacaggatcccaaggcagaagaatctttcttagtacagaacaaaatgaaaagtctcccatgtctccttccttctacacagacagggcaaccatccgatttctcaatcttttccccacccctcccccatttctattccacaaaaccgccatcgtcatcctggcccgttctcaatgagctgttgggtacacctcccagacggggtggtggccgggcagaggggctcctcacttcccagtaggggcggccgggcagaggcgcccctcacctcccggacggggcggctgccgggcggagatgctcctcacttcccagacggggtggctgccgggcggaggggctcctcacttctcagacggggcggccgggcagagacgctcttcacctcccagatggggtcgcagccggtcagaggcgctccccacatctcagacgatgggcggccgggcagagacgctcctcacttcccagatgggatggcggccgggcagagacgctcctcactttccagactgggcagccaggcagaggggctcctcacatcccagatgatgggcggccaggcggagatgctcctcacttcccagacggggtggcagccgggcagaggctgcaatctcgtcactttgggaggccaaggcaggcagctgggaggtggaggttgtagcgagccgagatgacgcctctgcactccagcctgggcaccattgagcactgagtgaaccagactccatctgcaatcctggcacctcgggaggcggaggctggcggatcactcgcggttaggagctggagaccggcccggccaacacagcgaatccccgtctccaccaaaaaaatagaaaaccagtcaggcgtggcggcgcgcgcctgcaatcgcaggcactgggcaggctgaggcaggagaatcaggcagggaggttgcagtgagccgagatggcagcagtacagtccagcttcggctcggcatcagagggagaccgtggaaagagagggagagggagaccgtggaaagagagggagagggagctgatcatttcttaaaaactaaacatgcaacttttatatgacccaacaattgtactcctaggcatttatcccagggaaaagaaatctctctttctctctctctctctctctctctctctcacacacacacacacacacacgtac

SEQ ID NO: 12778 - DNA, 876 bp, Artificial sequence
  DNA replication origin
ccaaagtgacgagattgcagcctctgcccggctgccaccccgtctgggaagtgaggagcatctccgcctggccgcccatcatctgggatgtgaggagcccctctgcctggctgcccagtctggaaagtgaggagcgtctctgcccggccgccatcccatctgggaagtgaggagcgtctctgcccggccgcccatcgtctgagatgtggggagcgcctctgaccggctgcgaccccatctgggaggtgaagagcgtctctgcccggccgccccgtctgagaagtgaggagcccctccgcccggcagccaccccgtctgggaagtgaggagcatctccgcccggcagccgccccgtccgggaggtgaggggcgcctctgcccggccgcccctactgggaagtgaggagcccctctgcccggccaccaccccgtctgggaggtgtacccaacagctcattgagaacgggccaggatgacgatggcggttttgtggaatagaaatgggggaggggtggggaaaagattgagaaatcggatggttgccctgtctgtgtagaaggaaggagacatgggagacttttcattttgttctgtactaagaaagattcttctgccttgggatcctgttgatctgtgaccttgcccccaactctgtgctctctgaaacatgtgctgtgtccactcagggttaaatggattaagggcggtgcaagatgtgctttgttaaacagatgcttgaaggcagcatgctcgttaagagtcatcaccactccctaatctcaagtacccagggacacaaaagctgcggaaggccgcagggtcctctgcctaggaaaaccagagacctttgttcacttgttaatctgctgaccttcc

SEQ ID NO: 12779 - DNA, 895 bp, Artificial sequence
  DNA replication origin
tcagatgggtctgtagaaaaggaagattagaaagactcagtgacacttggggttgggactgaggggacaggcgggagggaaagaaggaagatttgggatgaattgcactgggcacagagactaggaagggactgatgtgtaaaagaatgcctggacgtcaggcatctcagaccatttgcctattttacgacaagaattatttagatcttgcaggatggaaaaactcaaagtgccattttctgctgtttggaactactgttgagtttgtattggggtcaagcggcactgcagaagaaaataagtcatttaggttttaggtcaggtgtgagttgaagaggttttaaatttttgagaacacaggccaagggagtagaaggaggaatggagggtggaaggttgcccatagtgaaggaagcaagcctagagaaaagagagagtagagaaatggagggaaggggttcgggggttcttaccttccaaaaaagtgggaaaaggggttggggcgcagagataagaggttggggtgtggaaataagggatggggtgcagaaataaggggtcggggcacagaaataaggggttggggcacagaaataaggggtcagggcacggaaataagggattggggtgcagagataagaggtcggggtgtggaaataagggattggggtgcagagatataagaggttggggcacagaaataagggattggggcgcagagatacaaggttggggtacttgcccctcctctagaaaagtgggacatgccgctaagagtgaaggagaaggggttgagtggtacttgccccttccccagaaaagcaggacttgccgctaagggtgaaggaccaaggcaggcgtccctgcatggtctgacacctttgaaacgtgggtg

SEQ ID NO: 12780 - DNA, 977 bp, Artificial sequence
  DNA replication origin
tgaggagcccctcagcccggccagccaccccgtccgggagggagatgggggggtcagcccccccacccggccagccgccccgtcgggtagggaggtaggggggtcagccccccgcctggccagccgccccgtctgggagggaggtgggggggtcagccctccgcccggccagccgccccgtctgggaggtgaggggcgcctctgcccagccgcccctactgggaagtgaggagcccctctgcccggccagccgccccgtccgggagggaggtgggggggtcagccctccgcccggccagccgccccgtctgggaggtgaggggcgcctctgcccggccgcccctactgggaagtgaggagcccctctgcccggccagccgccctgtccgggagggaggtgggggggtcagccctccgcccggccagccgccccgtctgggaggtgaggggcgcctctgcccggccgcccctactgggaagtgaggagcccctctgcctggccaccaccccgtctgggaggtgtgcccaacagctcattgagaacgggccaggatgacaatggcggctttgtggaatagaaaggcgggaaaggtggggaaaagattgagaaatcgggtggttgccgtgtctgtgtagaaagaagtagacatgggagacttttcattttgttctgcactaagaaaaattcctctgccttgggatcctgttgatctgtgaccttacccccaaccctgtgctctctgaaacatgtgctgtgtccactcagggttaaatggattaagggcggtgcaagatgtgctttgttaaacagatgcttgaaggcagcatgctcgttaagagtcatcaccaatccctaatctcaagtaatcagggacacaaacactgcggaaggccgcagggtcctctgcctaggaaaaccagagacctttgttcacttgtttatctgctgaccttccctccactattgtcccatgacc

SEQ ID NO: 12781 - DNA, 705 bp, Artificial sequence
  DNA replication origin
agaagactgcagctgcttcctgtgttacgctgtcgcagacaagcagaagttaaaaactagtaaatgacttaaaggtgataatagtcctggcagtgtatttctgaaccctcagatcctggccctcggttgaaagttcgtcgccacaaagacctttccaacacgccactatcccccgtccctggtcccaaattgcatctttaaaatgtgttttcaatggtcgtgtagctacagataatctttcccactaccccagtcgaattttcatttgtcttttgttttgttttcttcgttgttttttttacccgaaggacttccataggacaggctttgcgggggagggtggggggattgggataaaatgtacactctgaaccctctccaatctcatacgtagcttaaagcattaatcaaatgatcaagcaagtattaataattgggactagaaatcataggagaaggctccaccggaagttacactagctctgaaggaggagcggacattaaccaggtgaaaacggaggatgcaggtgtacagggcggaggtaataacacgtgaaggtctgaagctattgaaaacccgagggagctgtatgaggtctagtgtggctggaaagtaaaagggagagcaaggtggggatcagatctgctgggccaataaccgcttaaacatcatgggttttatgttgagagcttgggaaggttgtg

SEQ ID NO: 12782 - DNA, 866 bp, Artificial sequence
  DNA replication origin
gcgcctccgcctcgccctgcgccgcagccctgccggcgcccgggcgtagcagcagcagcaggagcagcggcagcggcagcggcagcggcagcagctgcaggacgccccggcgcggccccgcagcgccccggctcccggacgcccagcgcctggcttgcagccccatgccgcctgcagccactccagggtccagagccgtagcacgctcggcagggaatttttctccgctcttggaacgtcttttcaaagagtacagaaagcaaagctctttcctgctattgttcgcttcagatgagaaggagggagagcgcgtctaacaccagggaacaatagcgtccgcggtggtggccgtggccgctgccgccgccgccgccgcctctggcggggatgctgctgccgctgccattcctcgcagaatggcaggtcccggcggctccggaggcaactgtcctcagggggccccagctgactgagcaggtctgctaggtctgggaggcagcgcagcccccgccagctggagggggaggaggggggcgtgagcccaaaggagcagagggggctggaggcagagggaggcgagagcgcgagggcgagaaagggggcgagcaaaggggagaggggccagccaggcgacacccacctccgacatacccgcctaaagaactccggtgcacatggtgcgatgaaatatgtttggaaggatgcaccaataaaaagaatcatcacccggcagatttcagaatgacaaataacaggcattgatattcactgtcatccaaggagtcaaatgctagatctagtggcatgctattcttagtacgtatttacacaaagcatcagtgtttattatctatttttaagccatg

SEQ ID NO: 12783 - DNA, 1109 bp, Artificial sequence
  DNA replication origin
actgcttagttcatgactggcttttattctaacagtgcacctcccttattttatatttcatttcgagattcttcccattaattattgcatcattcatccccttcccatctccaccaggcatccacttacatgcagacaatgaacactcttccaaaccacattccacatagttgatggccatttgcaaatacattcttccataaaatttgtttttattaatatgggtgtgctctaaatggtattgtgtccgaattggtgggttcttggtcttacttacttcaagaatgaagccgtggacccgcgcagtgagtgttacagttcttaaaggtggcgtgtctggagtttgttccttctgatgtttggatgtgttcagagtttcttccttctggtgggttcgtggtctcgctggcttcaggagtgaagctgcagaccttcgcggtgagtgttacagctcttaaggcagcacgtctggagttgtttgttcttccccggggggtttgtggtctcgctggcttcaggagtacagacctttgcagtgagtgttacaactcataaaggcagtatggacccaaagagtgagtagcagcaagttttattgcaaagagcaaaagaacaaactttccacagcatggaaggggactggagcgggttgccactgctggcttgggcagcctgctcttagtctctcatctggccccacccacatcctgctgactggtccattttacagagagctgattggtccgttttgacagggtgctgattggcgcatttacaatccctgagctagacacaaaagttctgcaagtccccaatagattagctagacacagagcacagattggtgcatttacaaaccttgagctagacgcagggtgctgattggtgcatttacaaaccttcagctagatacagagtgtattcactctgaatacagccgattggtgtattcacaatcccttagctagacataaagattctccaagtccccaccagactagctagatacagagtgccgattggtgcatccacaaaccccgagctagacacagggtgctgattggtgtgtttacaatcccttagctagacataaagattctccaagtccc

SEQ ID NO: 12784 - DNA, 1106 bp, Artificial sequence
  DNA replication origin
gctttaaagcaggctggccaccctttgactgtgttatctagttgtttagagaggtaagctacaggggcaaaggaaggaggatttcctttctgttgtcctaagacaccgagggctattcctcagctttcagcagtatagagagtgaaaggttgggagatatcaggtaaggacggagctgacgcagtgacaagagcagtttggagtttgtggaagctggggagtatgttatgtgaggggtttaggggttcattgggagggcctttggccacttcatagaggggatgagctaggagggcaaagttggaaatccatattctaaagaagcctgctagccctgggaaggaaaggatttcgcttttggaggagggtgggggtagattttctattaatgctgccctggctggagtcatagcctgggccccaggggaaagttgaattcctaagtaagtcatcatggagatggagagttgggccttggagggggagaccctataccctttgatagcgagaaagtttaagagagcagtggccgtgtgagtttgagagtcttttagagaggggctgcaaagaagaaggtcgtccacatattgaagatgactgggagacaggtttaaggaagtaaggtttcgggctagagcttgtccaaagaaatgagggctatccctgaagccctgagggaggacagtccatgtgagttgttgtgactggagggtgtcagggtcagtccaggtgaaagcaaataggttttgggaatcagggtgtagggaaatggtaaagaaggcatccttcaggtcaattgcagtgtagagggtggtgttggtagcgacgagagagagaagtggataggggttatggactatgggatgaatagggaggacagcttgactgatggctcggaggttgtgaacgagtcggtatgagccatcagactttttaacagggaggataggggtgttatatggagagtgtgttggtctaagaagactgcatgagcagagcttgtttacgatgggctgtaggcccttttggtgggttagagagatggggtattgaggaacattgggaaatttggaagagtcttttaactggattctgatggggtcatg

SEQ ID NO: 12785 - DNA, 1433 bp, Artificial sequence
  DNA replication origin
gttcttgtgtgctggaatgtggctggggtttatctcacagtggaggcaaggaattgcaactcagaaatacatttctacttggctgcctctaccttgaaggcgaggttaattaagtcctgttgtggggtttgagggctagaatctaatttctggagctttttttaaagtcaggagtgggttgggtaataaaatgtatattaagacatatggcccctatgggtctagggtggtagagcgtctaagggttgttgccaaatgggccacggactggctgggtttttaaatttgatgaaaaagagcctaaattctaactgatttgggagaggtcagataaagaaaaaggagcattaaccttgactatgcctttagctccagccacctttttaagaggaaattgttggcaggtgggggaggtctagtcgtggaaagagactgtaagctggacagggtgtgaggaggggaggtgataaaaggattatagggtgggggatcagaggctgaggaagaattgggacctggctcagcctggccaggagcagcctggggaggaggggagaggtcagatgagtccgtagaaaaggaggattcaaaggactcagaacttgggggtggagactgaaggaacagacaggagagaaagaagaaagatttgggatgagtcgcattgggagcagagactagggagggactgatgtgtaaaagaatgcctggacatcaggcatctcagaccatttgcccatttttttgacaaaaatcatctaggtcttgtaaaatggagaaatcaaaagtgctgttttctggctacttggaactattgtcgagtttgtattggggccaagcggtattgcagaagaaaataaggcatttaggttttaggtcaggtgtgagtcgaaggggttttacgtttttaagaacacaggctaagggagaagatgggggaatggagggtggaaacttgcccatagtgaaggaggtaagtttaaagagaaaggtagagacatggagaaggggggtggggagcagccctgggctgcaatgtgggtgagcagccaaagcaggcgtcctcgcaattgactttccaccaacggaatgtgggtgaatgaccaaaacaggcatccctgcggtgatcagacaccaatagagtgtgggtgaatgaccaaaacaggcacccctgcggtgatcagacaccaatggaatgtgggtgaatcatcaggcaggcatccccaccaggattaaacaccaagggaagactgtcttcccgagtctgtgactggcgccagagttttgggtccacggataaaatgtgtctcctttgtctctgctagagaggaaaaagaactggaattagagggacagggggattgaagggtagtgagagaggctggaggagagagtgaaaagactgcttacccaatttgaaattggtgagatgt

SEQ ID NO: 12786 - DNA, 1352 bp, Artificial sequence
  DNA replication origin
ccagtcctctgccatcgcccacgcctccctggtgccagggaacaggtatcagcgcgcctccccagcggctgggagagacgctgaatgaagaagagggaaggacggttagtcaggtgagccgcggcggggtgggcggccggggcggccacgccctgccgagggagaagagccggtcgtgtgcggagggacagggtgaagggatcccacttcggggaggatgggcttatcccggcgggcgcgccaggtgggatctctagcgcctcaggggcccgcgcggcaacagccggcaccctcgggcccgcggacaaagggttaacgcgttggcagtgactgcgggccccggatgtgagagccttggcttgacgccctggctgcgctgcaggtgcgccgggccgaacggagccggcagcctggcggcgacctgaccgcccgaggctccccttcacctgcagcggctgctcggctccctctgggaacgccgccttttctaacttaagggcaacaggtggtgccggtggaccgagagagagctcagctccgccgcgctgggagcggcagttaccctcaccaattagggagcgggggcgggagttgcatggcttccctgatgcgggtgaccaatgggatttgggatcatgagtggaccgggaggagtgggcgtggtcggagtctgagtccaaggtttctcgtgcggcaactgccagagctgcttggagagctaagctggaagggtgcttatccctgcgtagaaacgcctgccaatgctttctcatttggacccagactccagatcgggaggtgagaacgttgttattttgcaaggggtaggaggtaatagtgatcttgggtatgctgttaagcatgtggaattagattccgaagataggactatctgctatgagttttctgccagataggcactttgtggttacggccacttagaccagatactggtgactgggttctttccagaatgaggtctttgaggtttggggacccaggagaaaaacgtacatattactgcaatttaagtaaaccagataatttcaatcactgttattccatcgtttgtcttggactgtgtgtgttttcatgtacgtttcatatctcgtctggtttgtttagcgcagcaagttatagtaagttcttcgtgttgtttattttagcaaagtagagcaaacctgttttaatgtattatttcgggagaataacttattccttcttccgtctcccagcagtcttatagctggatcagctaccaagagaagttgtaaaccaagaagagaaaagcatttcaatttgggacatttatttgcacctggaaatggggaatgggctgtcagaccagactt

SEQ ID NO: 12787 - DNA, 1216 bp, Artificial sequence
  DNA replication origin
tccccacctttcccccctttctattccacaaaactgccattgtcatcatggcccgttctcaatgagctgttgggtacacctcccagacggggtggtggccgggcagaggggctcctcacttcccagtaggggcggccgggcagaggcggccctcacgtcccggacggggtggctggccgggcgggtggctgacccccccacctccctcctggacagggcggctggctgggcggggggctgacccccccacctccctcccggtcggggcggctggccgggcggggggctgacccccccacctccctcctggacggggcgggcggccaggcagaggggctcctcacttcccagtaggggcggccgggcagaggtgcccctcacctcccagagggggcggctggccgggcggggggctgaccccccaacctccctcccggacggggtggctgccgggcggagacgctcctcacttcccagacggggtggctgccgggcggagaggctcctcacttctcagacggggcagctgctgggcggaggggctcctcacttctcagacagggcggttgccaggcagagggtctcctcacttctcagacggggcggccgggcagagacgctcctcacatcccggacggggcgacagggcagaggcactccccacatctcagacgatgggcggccgggcagagacgctcctcacttcctagatgggatggcagccgggaagaggcgctcctcacttcctagatgggatggcggctgggcagagatgctcctcactttccagactgggcagccaggcagaggggctcctcgcatcccagacgatgggcggccaggcagagacgctcctcacttcccagacggggtggcggccgggcagaggctgcaatctcggcactttgggaggccaaggcaggctgctgggaggtggatgttgtagcgagccgagatcacaccactgcactccagcctgggcaccattgagcactgagtgaaggagactccgtctgcaatccgggcacctcgggaggcggaggctggcggatcactcgcggttaggagctggagaccagcccggccaacacagggaaaccccgtctccacccaaaaaatatgaaaaccagtcaggcgtggcgacgcgcgcctgcaatcgcaggcactgggcaggctgaggcaggagaatcaggcagggaggttgcagtgagccgag

SEQ ID NO: 12788 - DNA, 955 bp, Artificial sequence
  DNA replication origin
caaccgccctgtctgagaagtgaggagcccctccgcccagcagctgccccgtctgagaagtgaggagcctctccgcccggcagccaccccgtctgggaagtgaggagcgtctccgcccggcagccaccccgtccgggagggaggttggggggtcagccccccgcccggccagccgccccctctgggaggtgaggggcacctctgcccggccgcccctactgggaagtgaggagcccctctgcctggccgcccgccccgtccaggagggaggtgggggggtcagccccccgcccggccagccgccccgaccgggagggaggtgggggggtcagccccccgcccagccagccgccctgtccaggagggaggtgggggggtcagccacccgcccggccagccaccccgtccgggacgtgagggccgcctctgcccggccgcccctactgggaagtgaggagcccctctgcccggccaccaccccgtctgggaggtgtacccaacagctcattgagaacgggccatgatgacaatggcagttttgtggaatagaaaggggggaaaggtggggaaaagattgagaaatcggatggttgccgtgtctgtgtagaaagaggtagacatgggagacttttcattttgttctgtactaagaaaaattcttctgccttgggatcctgttgatctgtgaccttacccccaaccctgtgctctctgaaacatgtgctgtgtccactcagggttaaatggattaagggcggtgcaagatgtgctttgttaaacagaggcttgaaggcagcatgctccttaagagtcatcaccactccctaatctcaagtacccagggacacaaacactgcggaaggccgcagggtcctctgcctaggaaaaccagagacctttgttcacttgtttatctgctgaccttccctccactattgtcctgtgaccctgccaa

SEQ ID NO: 12789 - DNA, 1366 bp, Artificial sequence
  DNA replication origin
gctccgacggctgaggggggcgccttctgcttgcgcgctctgcgtccctctccgtggtctgcccttcgccccgcgaccccggccgagggtgggagcagcgcggggtcgcatcggcccgaggctagcggggctcgccgttccgcccgcagccatggaggccgggccgccgggcagcgccaggccggcggagccgggtccttgcctgagtggtcagcgcggcgcggaccacacggcttccgcctccctgcagagcgtggccgggaccgagcccgggcgccacccgcaagccgtggcagctgtgttgcctgccggggggtgcggggagaggatgggggtccccaccccgaagcaattctgccccatcctggagaggccgctcatcagctacaccctacaggccctggagaggtaatgcggcgccgggcgcgccccgcggttccctggggcccggcctcccgctccccgccctgccgctgctctagcgctagcaccttcacttgggggactgccgggccgcgctcagttattcaagcttgagctctgttccctcccgcatttcagagatgggaagttctggcctttaacagatgggcacgaaagctgcagctcccccacagagccctttacgtccccaagcagatgaggttgtggggaaggcccgtcgtgtggcgccgattagagagtgcatgggttgggactaggcgatttggggttctagctgtggggcctgaggagaagctgtgcggatagtctcgcggtcctggggctctgcctccgcgcatgcgtggattgagttgtacgtgcacactgaagtttccagggcgtgtgttcgtttttttcattcatttactgagcaccttctgtgagacaggctgcgctaattactaggtgctgcaggaggggagaggagcagaatttaataacctttcaatggtggaaagggctttaagcctgaatttgaggtcataccccctttatcttagaaagggcactgaagttaactagttggggaaatgaaggagacagggaatgggataaggaggactaggggaacagtcgtgaggagctgaggaagtgaaatgaaggggtatgttataatattaacttactttgcttttagcactgagtaatgaggtggagcttggggcgagggtgcaggggtgggaagcagcggcattacaaatatccacataattttgctaaggtgtttgaacttctctgaagccagtggggagctgtggtagtttgtgaagccttgaattgatgcgaaccgtttgcatttccagatagatgtcatcctttagcatacattgcctttgcaggaggttttgaaaaccaagctagtgaggttctagtccaagggaag

SEQ ID NO: 12790 - DNA, 966 bp, Artificial sequence
  DNA replication origin
ggcggggctgcgccgggttccgtgtgtctatgtcaatgtgtctgtccttcactcctccattgtctgccgccactgctgctgctgctgctgctgccgctgctgctgcacgaatcgccgcagcccccagccttgcgcgtcgtcgctacctcctcggacaggtgagaagcagcccaggtgaggcaaggggcgccgtgagggttgcgagagtagcgactgccgccccgccggggtttccatcgggcaggagctggcggggaggaagcatgtgcctcctggggcggcttcctgcctcgcggtggagaagcccccgctccacctcatcatcacggcgcgtacggggtatcagtgccctgggatgaagacctccgactcgcaacgtttggccgcctcgggagaccctgggaccgcgggcgggcgggcgggggccagccacgcggtgggaagtggcgggtgcacatggtctcgtgcgtggcaccgccagatgcggctcccggggaggctggggccggggctctgggctaggtaggggtcgcaaggacagcgccccattactagcgagtcagtgagaacagactcgggagaaggtagtttttacgctggtgatcctcgccctccccactacttgtcatctctttggcctctgtggaagctgtagaagaaaacctgatcgcccaatgttgcttgttaaagatgtttggaaacaatttacacttgcactaatacttcgtttatgagagacagcctgtgggagggggaaggaagggcttctttgctctgctagagttctcggttctctttgtaactcagatcttgagatttatggaaatagggagtggagggtggggaggttggagagggcggagattaaattggtgttgctgcctatatatagccttagattagcctcttaatccaaccttcattcaactgtaatatgtagcctggagcttcgaccataggtagatg

SEQ ID NO: 12791 - DNA, 1313 bp, Artificial sequence
  DNA replication origin
tgcgggggcttcgcgtgttccaagaactgcctgtgcgccctcaacctgctttacaccgtgagtatccccagtccgttcctgctcgcttgggggctttgcacctgcttgggagctctttggcttccctgcctggtcagcgactcactcgttgcatcccgcgcccccttcccggcttcccacgtctgcgcgcccccggcctcaccatccgtccccgccggggaccgggcgccggcgcttgtcgcagtctcttcctttcgttcattgtgaagccgcggtctctcaggctcgctggccgcgtctctgccacattgctccaccccgccccctcacccaccgccttgtttttcaaacattcaaccggacctctccgctttcccaccccgtacccttctgccgctcgctcctgacatccagacgcatctgggccaggcgtggaggcgcgagagccgtcagggcttgcggacagttttgcggaatggcgtggcctgaaactgacgaggcggcatatggctggtgtgcctctgggttagctcttggtaccctcgggattttaattgaggccactgagtaggttcacaggatgtccgctgcttccgaagtttgtttcgtgctcacagtaaagggatgtctttttgtttttgttgttgtcagttttgctagtacttggtgctttttctgtgtgtcttgtccatgatcaatatcctaactccattttaaaccaagtcctccaggaaataagcgagcccccacccaagtcgtttctttccctgccaaccagcttgggcctcttagttttaacgctgcaggctctctttgtgattttttgaggcgcaattctgggtgaacaggaggatgggcaggacagatcgacatttattgaatgcctatcacgtcccaggttttacatacacaatgctcgttcatcattctgacaaccttctgagggaatggggcattatctgcattttatacataaggtaacagaccaaaaaggttttagtaagtttacatagctggtagttgacgagtcaggagtggaacctaggctgtggaatccagatctttccacaggctgtctctaccgggcggaagaaacttcctcttctgtcatcatccctccatagtagtcttgctcccttctataaatatacctggcgctttgcagcacccaccctgaaaacaaacccagcacccctgcattagcagagagctaggccatctgtgcaagcttagattacctccttggaatagagaggctgccttgtggtcaccaacaggagaaggaggttgggtcattttacctttactgttcc

SEQ ID NO: 12792 - DNA, 943 bp, Artificial sequence
  DNA replication origin
cgcccggccagccgccccgtccgggagggaggtgggggggtcagccccccgcccggccagccgccccgtcctggagggaggtgggggggtcagccccctgcccggccagccgccccatccgggaggtgaggggcgcctcggcccggcagcccctactgggaagtgaggagcccctctgcccggccagccgccccgtccgggagggaggtgggggggtcagccccccgcccggccagcggctccgtccgggagggaggtggggggggtcagccccccgccaggcgagacgccccatccgggagggaggtggggggtcagccccctgcccggctagctgctccgccgggagggaggtggggggctcagccccctgcccggccagccgccccatccgggaggtgaggggcgcctctgcccggccgcccctactgggaagtgaggagcccctctgcccggccaccaccccgtctgggaggtgtacccaacagctcattgagaacgggccatgatgacaatggcggttttgtggaatagaaaagggggaaaggtggggaaaagattgagaaatcggatggttgctgtgtctgtgtagaaagaagtagacatgggagacttttcattttgttctgtactaagaaaaattcttctgccttgggatcctgttgatctatgaccttacccccaaccctgtgctctctgaaacatgtgctgtgtccactcagggttaaatggattaagggcggtgcaagatgtgctttgttaaacagatgcttgaaggcagcatgctcgttaagagtcatcaccattccctaatctcaagtacccagggacacacacactctgcctaggaaaaccagagacctttgttcacttgtttatctgctgaccttccctccactattgtcctatgaccctgccaaatccccctctgcgagaaacaccc

SEQ ID NO: 12793 - DNA, 1212 bp, Artificial sequence
  DNA replication origin
ccccccacctccctcccggacggagccgctggccgggcggggggctgacccccccacctccctcccggacggggcggctggccgggcagaggggctcctcacttcccagtaggggctgccgggccgaggcgcccctcacctcccggatggggcggctggccgggcagggggctgacccccccacctccctccaggacggggcggctggccgggcggggggctgacccccccacctccctcccggacggggcggctggccgggcggggggctgactcccccacctcccttccggacggggcggctggccgggcagaggggctcctcacttcccagtaggggcggccgggcagaggcgcccctcacctcccggacggggtggctggccgggtggggggctgaccccccacctccctcccggacggggcggctgccgggcggagacgctcctcacttcccagacggtgtggcagccgggcggaggggctcctcacttctcagatggggcggttgccaggcggagggtctcctcacttctcagacggggcggctgggcagagacgctcctcacctcccagacggggcggcggggcagaggcgctccccacatctcagacgatgggcagccgggcagagaagctcctcacttcctagatgggatggtggccgggaagaggcgctcctcacttcctaggtgggatggcggccaggcagagacgctcctcacttcctagatgggatggcggccgggcagagacgctcctcactttccagactgggcagccaggcagaggggctcctcacatcccagacgatgggcggccaggcagagacgcacctcacttcacagatggggtagcggccgggcagaggctgcaatctcggcactttggggggccaaggcaggcggctgggaggtggaggttgtagccgagatcacaccactgcactccagcctgggcaccattgagcactgagttaacgagactccgtctgcaatcccggcacctcgggaggccgaggctggcggatcactcgcggttaggagctggagaccagcccggccaacacagcgaaaccccatctccaccaaaaaaatacgaaaacccgtcaggcctggcggcgcccgcctgcaatcgcaggcactgggcaggctgaggcaggagaatcaggcagggaggttgcagtgagccgagatggcagcagcacagtcc

SEQ ID NO: 12794 - DNA, 1029 bp, Artificial sequence
  DNA replication origin
cgcgccgcctccgccggtgtagacggcacctgcgccgccttgctcgcgggtctccgcccctcgcccaccctcactgcgccaggcccaggcagctcacctgtactggcgcgggctgcggaagcctgcgtgagccgaggcgttgaggcgcggcgcccacgccactgtcccgagaggacgcaggtggagcgggcgcggcttcgcggaacccggcgccggccgccgcagtggtcccagcctacaccgggttccggggacccggccgccagtgcccggggagtagccgccgccgtcggctgggcaccatgaacagcagcagcgccaacatcacctacgccagtcgcaagcggcggaagccggtgcagaaaacgtgagtgtcccgagcgcgtcctcatcgcgggggctgggcgctcaggcacgcgggtgcgggaggcagccccaccccgcccccaaatccctgcgatcctgggattaggtccattcccggcactgcccgtggaatcgaggtttggaggccggctgggagacagaggacttggattctcccgttttcaatgattgcattttaaaaattgtcctcccacccatcctcttcccccgcaccagtgcatacacaccctctcacatttgcaactttgttctttctgatttggtcctgatttgttgacagctctgatctgccttgggctaatggattagttagtataaacctgtcttgaaatctccttccacttttcatatccgcatgggttaggttagaggacggtcttaattctcattcttcgtagagtttggtaaggcgagatgttttaaagagctaaacacatgctgacttttacgaaggggctgagtgcctctaaaggtactttttggtccccaccaactggctttgtgttgcgctcatatttacttatttggcagcaattttgtagcgctcatcgtgaccatatcggtaaagtggatagaagtggtagcaggtgggagtggatgcaacggacaggatacggtggaggatttgtattcttcagacat

SEQ ID NO: 12795 - DNA, 1368 bp, Artificial sequence
  DNA replication origin
ctcaaatgggctgtaccctgtagcatcctgaggacaggcctgaattctgagaagggcaagtggtaaaagtattgtccagtcctttttaagttggaggctgagcttggtgaggtgtgtttttaaaagaccaatagtccattttacctttcctgaagattgagaacggtaagggttatgacggttccactgaataccaagagcctgagaaactgcttgggtgatttgactaataaaagctggtctgttattggactgtatagacgtgggaaggccaaaccaaggaattatgtctgacagaagggaagaaatgattgcagtggacttctcagaccctgtgggaaaggcctctacccatccagtgaaagtgtctacccagaccaagaggtattttagtttcctgactcggggcatgtgagtaaagtcaatttgtcagtcctgggcaggggcaaaaccctgagcttgatgtgtagggaagggaggggccctgagaaattcctgaggagtagtagaatagcagatggaacactgagaagtgatttccttgaggatagatgtttacgatggaaaggaaaagagaggttttaagaggtgggctagtggcttgtaacttacatggaagaggttatgaaatgacgacagaatagaatgggcctgtgaggatggaaagagatattttccttggtccaagaactatttgccttgtgtgggaggagattgacaagtggaagcttcactgggggagtaggtgggagtgacccacgagaaggaggaaaactggccgtggacagaagttggaacactagctgcttttttagctaccttatctgcataagctttgccccgagtgatgggatctgatgccttttgatggcccttgcagtgaatgactccagcctcctttggaagtaaagcgaccttgagaagagtttttatcaaagagatgttaatgatgaaggacccttgcttagtgaggaaaccccatcagcctatatagcagcatggtggtgcaggatatggaaggcacatttagagtcagtataagtattgatgtgtagtccttttgcaagagtgagggcttgagttaaggcaatgagtttggcttgctgagaggtagtggagggggacagagtggtagcgtcaatgatagatgtggaagatactatagcatagcctgcctttgctggtgagtggtgattaggcctggtggaactgccgtcaataaaccaaatgtgatcagggtgaggaacaggaaagaaggaaatatggggaaatggagtgaatgtcaggtggatcagagagatacattcatgggggtcaggtgtggtatcaggaataatgtgggaggccagattgaagtccaggccagga

SEQ ID NO: 12796 - DNA, 1393 bp, Artificial sequence
  DNA replication origin
tcggggccatccacaccgtcccctccccctcccgcctccctccccgcctcccccgcgcgccctccccgcggaggtccctcccgtccgtcctcctgctctctcctccgcgggccgcatcgcccgggccggcgccgcgcgcgggggaagctggcgggctgaggcgccccgctcttctcctctgccccgggcccgcgaggccacgcgtcgccgctcgagagatgatgcaggacgtgtccagctcgccagtctcgccggccgacgacagcctgagcaacagcgaggaagagccagaccggcagcagccgccgagcggcaagcgcgggggacgcaagcggcgcagcagcaggcgcagcgcgggcggcggcgcggggcccggcggagccgcgggtgggggcgtcggaggcggcgacgagccgggcagcccggcccagggcaagcgcggcaagaagtctgcgggctgtggcggcggcggcggcgcgggcggcggcggcggcagcagcagcggcggcgggagtccgcagtcttacgaggagctgcagacgcagcgggtcatggccaacgtgcgggagcgccagcgcacccagtcgctgaacgaggcgttcgccgcgctgcggaagatcatccccacgctgccctcggacaagctgagcaagattcagaccctcaagctggcggccaggtacatcgacttcctctaccaggtcctccagagcgacgagctggactccaagatggcaagctgcagctatgtggctcacgagcggctcagctacgccttctcggtctggaggatggagggggcctggtccatgtccgcgtcccactagcaggcggagccccccaccccctcagcagggccggagacctaggtaaggaccgcgccgctgcaccccttcgcctctcaggtggcagacggcaggccggccaggccgcggttcccagtccacctcgatttcctcccctctcccactctccgctcagccttcccacctcacttggcaccgttgcctcgcgcccccagcgtccccggaaggccggtctgaccccgctagggagagcagtctccagggggatgcgccctggtgaggggtgtgtgtgcgcgtgagtgtgcgtgacaggaggggagacagagacacccagggtcacgggtaaggaccgttttgtcagcgccaccctttctttcggctttcaatttttgttctccttaaaacaaatgttttaaaacaaattccacctcctcctcctttccacccacccacttcctcttgcccttgggctgaaatccttccaggttgttcagcttaatttctcagtggtggtgataagaacagtgctcactagtcttagaaaacagccgcagagacctaaacaataaccgactcccccccccccc

SEQ ID NO: 12797 - DNA, 855 bp, Artificial sequence
  DNA replication origin
gctcctcgtaagactgcggactcccgccgccgctgctgctgccgccgccgccgcccgcgccgccgccgccgccacagcccgcagacttcttgccgcgcttgccctgggccgggctgcccggctcgtcgccgcctccgacgcccccacccgcggctccgccgggccccgcgccgccgcccgcgctgcgcctgctgctgcgccgcttgcgtcccccgcgcttgccgctcggcggctgctgccggtctggctcttcctcgctgttgctcaggctgtcgtcggccggcgagactggcgagctggacacgtcctgcatcatctctcgagcggcgacgcgtggcctcgcgggcccggggcagaggagaagagcggggcgcctcagcccgccagcttcccccgcgcgcggcgccggcccgggcgatgcggcccgcggaggagagagcaggaggacggacgggagggacctccgcggggagggcgcgcgggggaggcggggagggaggcgggagggggaggggacggtgtggatggccccgaggtccaaaaagaaagcgcccaacggctggacgcacaccccgccaggcctcctggaaacggtgccggtgctgcagagcccgcgaggtgtctgggagttgggcgagagctgcagacttggaggctcttatacctccgtgcaggcggaaagtttgggggcagcagtgtcattggcctgacgtgaggaggagggacttttcgaagttttataggaaagtttccgctttccagtccccctcccccgtcccacctcccttcctcggggtctaacaattcgtcctcccaaaccattcaaaaacgacctggcccgggcggccggcccct

SEQ ID NO: 12798 - DNA, 1038 bp, Artificial sequence
  DNA replication origin
gaggcaaggaattgcaactcagaaacaagttgctacttggccgcctctattctattattgtacaccttgaaggcgagattaattaagtcctgttgtggggtttgagggctggaatttaatttttggagctttatttaatgtcaggagcagattgggtaataaaataaaatgtatattgagaataagatggtattttgacctttcagggtctagggctgtaaagtgtctcagggttactgctaaacgggtcatgaactgggctgggtttttcatatttgatgaaaaaagagctgaaagactaactgattctgggaggggtcagatacagaaaaaggagcattaaccttgactttgcctttagttccagccacctttttaagaggagattgctgggcaggtgggggatggctagtcgtggaacgaaactgtaagctggactgggtgtgaggaggggaggtgataaaaggattatagggtagggggagcagaggctgaggaagaattgggacttggctcggcctggggaggaggggggatgtcagatgggtctgtagaaaaggaagattagaaagagtgatgcttggggttgggactgagaggacaggcgggagggaaagaaggaggatttgggacgagtcacactggggacagagactagggagggaacaatgtgtaaaagaatgcctggacgttaggcacctcagaccatttgcctattttatggtaagaaatatctagatcttgtaagatggaaaaatcaaaagtgctgttttctggctatttggaaccactgtcgagtctgtattggggtcaagcggcattgtagaagcaaataaggcgtttaggtttaggtcaggtgtgaggtgaagaggttttaagttcttgagagcacagactaagggagaagaaggaggaatggaggatggaaggctgcccatagtgaaggaggcaagcccagagaaaagagagagtagagacatggagagaaggggtggggggttcttgccccccagaaaagcggagaaggggtagcaacat

SEQ ID NO: 12799 - DNA, 1135 bp, Artificial sequence
  DNA replication origin
ctgaattctgagaagggcaagtggtaaaagtattgtctagtcctttttaagttgatggctgagcttggtgagctgtgtttttaaaagaccattctttcactgaatactaagagcctgggaaactgcttgggtgatttgactaataaaggccggtctgttataggactatatagaggtgggaaggccaaaccgaggaattatgtctgacagaagggaagaaatgactgtggtggctttctcagactctgtgggaaaggcctctacctatccagtgaaagtgtctacccagaccaagaggtattttagttttctgactcggggcattttgagtaaagccaatttagtagtcctgggcgggggcaaatccccgagcttgatgtgtagggaaggtggtgggcggggggggggtgggtctgaataatccctgaggagtagtagaatagcagatggaacactgagaagttatttccttgagggtagatttctatgatggaaaggaaatgagaagttctaagaggggctagtggcttgtgctgtagcatagcctgcctttgcttgtgtgtggcaattaggcctggtggacctgccatcaataaaccaagtgtgatcagggtgaggaacaggaaagaaggaaatttggggaaatggggtgaatgtcaggtggatcagagagatacagtcatgggggtcaggtgtggtatcaggaataatgtgggaggccggattgaagtccgggccaggaacaatggtaattgtgggagactcaataaagagtgagtacagctgaaagagccggggagcagaaagtatatgtgtcaggtgtgaggaagaaaatagattttggaagttatgagaactttagagagtgagttgagcatagttggtgattttaagggcctctaaaagtattagggtggcagcggccgctgcacatagacttgagagctggggaaaacagtaaggtcaagttgttcggataaaaaggctacagggcatggtcccggttcttgtgtaagaattcttactgcacagccctgcacttcagctgtgggtaatgaaaagggctgggatgagtcagggagagctagggactctagagctagggggcagtctctaaagctgtcttcaagaaatg

SEQ ID NO: 12800 - DNA, 1542 bp, Artificial sequence
  DNA replication origin
cacaggtgggcagggaggccaacaccattagttgcagctttgcagccccgtctgcggagcagcgggcaaagacaagtcggcagcgtcctggctggcaagggaggaagctcgggatgccagcaacagggggaggcggctctgggagcgccctagaagcacccgccgacacccgcaggcacagagcgaggcatcgccgctccctccctggcggggagtggggcctgcggctgcgagcgcaggaggggaggttccgcgaggtgccggagcccggcttcgcggggcgggggctgcgtgcccttgtccttttcgcctcagtgcgcggctcaggcgtcccgcagtccagagcccgagttgctggcgcgctctggggtgcacacggctaggatgcgagagaggcgaggccggcgatgggcgggagaggggtggtcctgctctggccccccggggggctccagacctgcgggtagccgggtgcactcagggcagagagttgctaggaaacctccccacgctaccggagcgcctcgcctcggctgcccgcaggcgcggctgcagcccgggcaggagcagcagtaacagctcggagcagcgtgggcgggacattggtgaggcatgaagtcaccgcggcccacactcgctctttgttttgctcactccagctctttcttttcccccttggctctgatagttgccattcccatcgttcacaagaactcctgaagcgtagccgcgcaacaggaatggcacgcctcgttcccttctccctcctcccccgaatccttgcaccccaacgctcgcgggggtggtgggagactcgctcagcgccagcggcagctgcgagcaaaccccaatctctcacccccgcgctgctcgccgctttgttcggagatactcactgccccgcagctgctgcatacaaagtggagtcaagggacctcccctgcccccaacgccctctactcagcactttgcttgcagttaggagctcgtcctctaccccaccacaaggctgccccggtgtccctagcctttggagagttggaccagtctgcaggggctgttcccggagcgactggccgagatttctcgctgctccttctctgctcaaaaccttaaccctggactggacagccctgtttttccccagcgtctggtggtggctctgggcttttgcaagttacagtgggtcttttgatcttaagcgtcaccttcccagtaaacggaacaaaaagttacagacagcagcaaagcggggagaggggagctaaggagagaaagtggaaggcacttctgcctgcttgcagctcagaaatttaggtgcaagtagggtgcgggtgttatgctgggcaactgcccggaagcagcgcgcctcctcgggtcctgtcattaccacgctaagtcgagggagggaactcagtcccccgcattggaaacaaggcagtgtttccagtttaacacggtgatggttctcttttccctctaggggcaggagcgattcccattcgaggagtttgacctctcattttaatacaacacccgcct

SEQ ID NO: 12801 - DNA, 1812 bp, Artificial sequence
  DNA replication origin
ggccaggcagaggggctcctcacttcccagtaggggcggccgggcagaggcgcccctcacctcctggatagggcggctggccgggcggggggctgacccccccacctccctcccggacggggcggctggccgggcagaggggtcctcacttcctagtaggggcggccgggcagaggcgccccacacctcccggacggggcggccggctgggcggggggctgacccccccacctccctcccggacggggcggctggccgggcagaggggctcctcacttcccagtaggggcggccgggcagaggcgcccctcacctcccggactgggcggctggccgggcggggggctgacccccccacctccctcctggacggggcgactggccgggcagaggggctcctcacttcccagtaggggcggccgggcagaggagtccctcacctcccggacggggcggctggccgggcggggggctgacccccccccccacctccctcccggacggggtggctgccgggcggagacgctcctcatttcccagacggggtggctgccggacggaggggctcctcacttctcagacggggcggttgccaggcagagggtttcctcgcttctcagacggggcggccgggcagagacgctcctcacctcccagacagggttgcggcccagcagaggcgctcctcacatcccagacagggcggcggggcagaggtgctccccacatctcagacgatgggcggccgggcagagacgctcctcacttcctagatgggatggcggcggggaagaggcgctcctcgcttcctagatgggatggcggccgggcagagacgctcctcactttccagactgtgcagccaggcagagaggctcctcatatcccagacgatggggggccaggcagagacgctcctcacttcccagacggggtggcggctgggcaaaggctgcaatctcggcactttgggaggccaaggcaggcggctgggaggtggaggttgtagcgagccgagatcacgccactgcactccagcctgggcaccattgagcactgagtgaacgaactccgtctgcaatcccggcacctcgggaggccgaggctggcggatcactcgcggttaggagctggagaccagcccggccaacagagcaaaaccccgtctccaccaaaaaaaaaacgaaaaccagtcaggcgtggcggcgtgcgcctgcaatcgcaggcactcggcaggctgaggcaggagaatcaggcagggaggttgcagtgagccgagatggcagcagtacagtccaggtttggctcggcatcagagggagacgaggcagaggcagaggcagaggcaggggcaggggcaggggcaggggcaggggcaggggcaggggcaggggcaggggcaggggcagaggcgaatgttattttccaaaagcaaacagatctcaaatcttattcatgaagccacgtgatgtgacccattagctcaatgatttcacaatactctccaacagttctcaaattaatgtgtatggaatttaattagaaaatataaaagagagcattaacacgtcacagtctaaggagaatttgagaggacagaatataaagtcaaacaattaaaaggttgcaactagaaaaggtctgagaattccatgtatccttctgtgcacagaatcagaatcacagggtttcctgatacaggtttatattgttagagaccttcttttcttcacaggggattcacttcacaggtgttttaatatatatctcttctcatatttatttacttatcaagcatttcatctgtgtcat

SEQ ID NO: 12802 - DNA, 929 bp, Artificial sequence
  DNA replication origin
cccctactgggaagtgaggagcccctctgcccggccagtcgccccgtccaggagggaggtgggggggtcagccccccgcccggccagccgcccagtccgggaggtgaggggcgcctctgcccggccgcccctactgggaagtgaggagcccctctgcccggccagccgccccgtccgggagggaggtgggggggtcagccccccgcccagccggccgccccgtccgggaggtgtggggcgcctctgcccggccgcccctactaggaagtgaggacccctctgcccggccagccgccccgtccgggagggaggtgggggggtcagccccccgcccggccagccgccctatccaggaggtgaggggcgcctctgcccggccgcccctactgggaagtgaggagcccctctgcctggccagccgccccgtccgggaggatggtggggggggtcagccccccacccggccagctgccccatccgggaggtgaggggcgcttctgcccggccgcccctactgggaagtgaggagcccctctgcccggccacgaccccgtctgggaggtgtgcccagcggctcattggggatgggccatgatgacaatggcggttttgtggaatagaaaggcgggaagggtggggaaaaaaattgagaaatcggatggttgccgggtctgtgtggatagaagtagacatgggagacttttcattttgttctgtactaagaaaaattcttctgccttgggatcctgttgatctgtgaccttatccccaaccctgtgctctctgaaacatgtgctgtgtccactcagggttaaatggattaagggcggtgcaagatgtgctttgttaaacagatgcttgaaggcagcatgctcgttaagagtcatcaccactccctaatctcaagtacccagggacacaaacactgc

SEQ ID NO: 12803 - DNA, 1401 bp, Artificial sequence
  DNA replication origin
gccgcgctgttcgggttctgcacgtcgatccagccggcccccacgtcccaccagctggaggcgccggccgagcccacctcgcccgcagcacccaggcccgggtgcgagggcttaaaccacgactcgtacgggtgcgccatgcccacccgcgggtagatgccctgcagcccgtccacagaggtgtgcaccttggagatgaacaccggctggtgggagccgtcctgcgagtgcgcggaggagccgccgccgccgcccccgccgccgccgccgctgcccccggaaactccgggggcctggaaaacagagtagtcgttggcgaagggcgagctggaggcggcggctgcggcggcggcggcggcggctgcggcgctgctggaggtgagggagaaggcgctggagccaggcgagccgccgcagctgaacgagtcggacaccagggccgcggcagccgcggctgctgccgcggccgccgcagccgccgaggacgagccgccgttcctggaggccccggacacgccgaagcttgagagactggaacccactacgttgcagctggcggaagaagaggacgaggagcgtttccaggggtggaagcctttgccgaaggaagaagagctgtccgagagggaggagggagacgggctggggctgcctatcttattacaggtagcggcaagcatggccagaggagtcgatcccaacctcggttcttcctgcgaggaggagaggagaaggagtgggggaggggaggtgggcaaagggccggtgggggaggaaaggaagaaatgtgcatcagtccttcggtagcctccaaagcgccccactgcaccccatctctcgctgcggcgcgccgccaccaactcacctggcacccccaacagccccggcgcccggccgcttcctactctacaggaggggacaagtttggctgccggcgtctgattcgggagcaagcaccacgctaaagaagagtttgacaagtattctcacctaaaacaacactctcttgcacacaaagccccagacacttcgtaacaaacaagcaaaaagtccagattggagaggaaggaagttttctttgccgagaagcctgggggaaaaccattggattgcttttaagagcgcttccctgtaatccggagagctttgaaaaacctgttcgggtccccagaaacccatcctgggttgtttctcccaggccaaaagaaatcaaactgtagggctcactctttcttcctgcttttctttctttctttttttaaaagcatatctacagtagtaaaaacgagacgagttcaacgtacctgcgagacaaggcgggctgcagaatttttttttaagggttaggggaagaatctgcactttgcccagaaggaaaaacttgctctctttacccccgaa

SEQ ID NO: 12804 - DNA, 1014 bp, Artificial sequence
  DNA replication origin
aactcacttgtatttaaagaaaaaaaaaaaaagctctcaatagagagactgatagcccgtggcctggccggggcgactttaaccccctccaatcggcaataaaaggaaactaattaaaccagcaagagaaaatcctgagactcacccctagaagtgaagttgccatcacacaaaagtgccctcctcctctcagaggatcttttttatattgataaatcagaggcagtgttttttttagaggtgtgcaatacaatgatcagttccgcccattccaccacaattgtagctccctctccggctttgaagtgccgcggaggcgcggccagccaatctgcggcctcgccgggccgcgcggcgcgcgcgccgtgaggtcatcggcgccgccgcctgccgccgtggtggaagggggagtgggagcggagggggcgggggcggctgcgtgtgttacaaagcgcaaagcgcgcgctcgcgtgtatgagtgtgtgtgtaacaatgtaactgtgtgcgagtgtgaccaggcgtaggagaggacagtgcggagactggagggaggggggatgggggtgtgacaccgtaacagtgacagtgtggtaaaggcggggagtggagagagtgcagaaaagggagggttgtgtgataagataactgcgtgtgcgacaaagcggggtagagggacagagcagttaagtgttgggaagggtgtgagtgtacggtagtgtaactgacaaacctagggagggaagagggactcaactgggtggggggtgagtgtgtttggtgttgggggagaaggagggctgtgaacatgtgtatttgtgcgacagagaagagggaagggtgtgtgtgggcgcttgtgttgtgtgcgcgcaccaaagctggtagtggggaatgggaacaatgcaataaagtgtgtgtttgtaagagagagactgtcgagctgaagagagaaaccgactaagttgatggaggctgagtgaataaatattcacaaacgctgcccctgtcgccaacttc

SEQ ID NO: 12805 - DNA, 1350 bp, Artificial sequence
  DNA replication origin
cccgcggggtgtgcgagccctcggggggtgggagaggaggagggacagggagggaaggaggaggagcggggcgggcggctgagtgcaggggtggggagccgccgtcgcgcacccgactcccgtccctccgggtcagcggagaggggctttgtgaccggcccaggagtcccagcaagacaaccgccccggggcggggtggcgcctcccccttggcgggagccggcgcagccttcccgcccggggagccgcggtggcgagcggcgtacgggccgggcagagcacggagctggcggcggagctcggcgggagagcacggctaagcggaggggagggccggagggtggggcggggcggggctgggccgggctgccacggagcccggcgcctgcgcctccgcctcccgcgcccgcggccgccgcagcccgggccttgcgggccggcgagcaggcggggacgcgtgtgtgccctggccggcgacctgcgccgggtgccgggaggtgcgcagaggcgcgggctggacctgggacggcaggctgtctctcgggtgcggggtgggaggggtgaggaggaaggaaagggaggggttgaaaggccaggaagaaaggggagtgcaaatattgtgactgctggggactgagactgtctgtggcgcagtcggtggagatctgcactccaagctggcggtaggctgcggagaagtccgactgcccctcgtctggaactgtcgctcttccctctgactgctgcacagacaaccgtcactcattgcttttagatcctgcgactggtggggaaagctgcccactactcgccatttattctagattccccaagggcaggatcttaattaagctgactgttttctgaagaagcttcagctccgagaatccctgggacgttgccaacactgggggtgaaggtgaaggggaacctgtccttttcctgctgtgttccccgccttacccctcggccattgcctttcgtttacttctccagtctcctgtcctcgtatcttagatgggtcaaagcattaaaacgggacaaacctgtatggcaacgcatcccaggtatacgtgaaaccggaagcaggagcacttccgaagttcgttggaccatcgcggggaagcgcagctcctcaaggctccgtgggttggtggcagcctcgggggccctgcccatgagccgagcgtggtggatgccgatgcattaagtgatctggagacactcggtcctcgaggttcttcctccaactgagttattatatagactgggacgtgccaggcctttcaaaagtcaatcagcatcggcttgtaatttccttcctcagacttctaaacctacaatcttccc

SEQ ID NO: 12806 - DNA, 1646 bp, Artificial sequence
  DNA replication origin
gttattcctttagcagctcttctcctcctccctggctcctctggcgctctttctctcggcgttctagctcaggagcgctgccggtaggccctccatacagccaaacttgttgtctcaggatatcccgccccctactcatttcccagcgccctccactcaaaaaccccctccagcaatccctccaattgccactaaagaaaaaagtagggcccttgatccaggcaagcgagagcggcggacgtgggcgcgcgcggaccaccaacaggtcggcgcgctgggtgaactgcccgctgcccccgcgcagggagcatggctttcctgaggcgcatccggacccgggcgccctttttccctggctctgtctccattggctgagcccagggtgacgcgcgctgagtggtgggagaaagggggtggggcactaccgcgaaggctgtcggtactcgtagtttccggcggtcgcggtgccttcttcgaggcaccgcctctctcccgcccccgaccgaggcctggctgccgagcggaaagctgcccgagggggcggtggcggcagggcgtggccggggccgagtgggagttgaactgagcgaggaggagggggaatgggtgttgtttgcctgggcctatccgccgcgcggggctgcccaaaccacctctgccgccgcctcctcggctccaagccgctccccgcggggcgagctcacacccggagcgctcggcgattgagcgggcggcggcgtggggaggcggggtttgctgtcctcggggtttgaatgaacccggcttcttgaagcagcgccctcgccttgcctttctttgctcaccttcccctcaggccccctgctttgagtccgaggcctgttttctcacggagaaggatcttccatttttatttgttgtctctctggctggcagctggtgcagagcagtgacccgccttctaagaagggttgcatcgcgttttgcctaaaagcctaagtggttggcggagttctaagccttatctgacaagagtctccgggcgaagaaaagcccagctccataagggtcagccccgcttacggtgtagcgtaagcaagcgtaagggcaagtggaattaacatctggctgcacaaagcatcttactgtcaaatgcacttgagcagtgtcctgcctcagctttcctacaaagtcctgaagtcaggatgatgccatggaacgtaatcagcgcctgattaactgtaccaaaggtggaagtgaccccacatgtaaatactggccttgggaacaaggcatgcttacaccccaggctcaaagccattgtctcacttcttacctgggcttcacactcagccttgggcatttttgtctcctgcctgaggcctgacatgttgcaatggtgaggaggtcccagatgctgaacttgactggcatttcctttgcttgttaaggtaattgcaaaatcagctgatgacaaagccatgcagcaagacaaagcaattcgaataaagaattacatggtattgtctaccccatcttatacaatgagccagagatccctgaacaacgtgctttttccccatcgtgtacaatatagaaagctcaaaagtgcttcttacatttacgtatatactgtctctatcctcaggtcccctcctcctcccagt

SEQ ID NO: 12807 - DNA, 792 bp, Artificial sequence
  DNA replication origin
tccctcccgccctctcctcctccccttaaagcatctcagcggccccgggggaggggggagaaccgagcagggtctggggagggagggagagagggaggcggcgaaggagactgaggggggtggagaatacgtaccgctcatcccgcattaacaggacaaaccctcagacggagacactgggatagaggtgggtgggggtgggggcgaggcgggaggagaggccggtcccgcccgcccgcggtggctcggaggaggctgtagctggcacaggctctgcctctttttccgcgaatggccgccgctgggctgtggcgtagcagctcctctctccgcccgagcccggctgactcgcccttgattgacagcggcggcgcgcggcgcgggcggcggcgcgggtcgggggcggggccagggcggtgcgagcctggccgactccccacccccctcggcctctctccgccggagcctccgactctccaccccttcccccagcggattggccgccgacctgccgggggccggggcgctggggccgcctcctctccaccccctttctcggggttattcctttagcagctcttctcctcctccctggctcctctggcgctctttctctcggcgttctagctcaggagcgctgccggtaggccctccatacagccaaacttgttgtctcaggatatcccgccccctactcatttcccagcgccctccactcaaaaaccccctccagcaatccctccaattgccactaaagaaaaaagtagggcccttgatccaggcaagcgagag

SEQ ID NO: 12808 - DNA, 1207 bp, Artificial sequence
  DNA replication origin
acctgttggtggtccgcgcgcgcccacgtccgccgctctcgcttgcctggatcaagggccctacttttttctttagtggcaattggagggattgctggagggggtttttgagtggagggcgctgggaaatgagtagggggcgggatatcctgagacaacaagtttggctgtatggagggcctaccggcagcgctcctgagctagaacgccgagagaaagagcgccagaggagccagggaggaggagaagagctgctaaaggaataaccccgagaaagggggtggagaggaggcggccccagcgccccggcccccggcaggtcggcggccaatccgctgggggaaggggtggagagtcggaggctccggcggagagaggccgaggggggtggggagtcggccaggctcgcaccgccctggccccgcccccgacccgcgccgccgcccgcgccgcgcgccgccgctgtcaatcaagggcgagtcagccgggctcgggcggagagaggagctgctacgccacagcccagcggcggccattcgcggaaaaagaggcagagcctgtgccagctacagcctcctccgagccaccgcgggcgggcgggaccggcctctcctcccgcctcgcccccacccccacccacctctatcccagtgtctccgtctgagggtttgtcctgttaatgcgggatgagcggtacgtattctccacccccctcagtctccttcgccgcctccctctctccctccctccccagaccctgctcggttctcccccctcccccggggccgctgagatgctttaaggggaggaggagagggcgggagggaatcggggagggaaggagggttgtgttttgtcttaatgtctgagagagaacaacctccttctgggtgttgctctggagccgatgggtcgggtttcaaaccacgttttgtgatatccccctcctcccttccctccttctcccccaccccctgccggtgtgcgtggatcgcgggtttatggagattaatgttcggggggaggggggagaagaggagaggaagaagacgaataataataatcctaataacctgttgtcgtgtgtgtgtggtgggggggtttgttgcagatcagaagaaggaggaggaggaggaggcggcagcggcagcggcgatggctacagaaggagggaaaacctctgagccagagaataacaataaaaaac

SEQ ID NO: 12809 - DNA, 1784 bp, Artificial sequence
  DNA replication origin
gtgataaaggattaattttcttaattactattttttgcaagaatcaatattattatctttaaagcaaaattaggactgcctttattgtccagatatcagggtgtctagacactcctatgtccgggtctgtttagtaaacactattaatttgttccctttgagaggtgacaacgtgctagcaggcctcgctcgctctcagcacctcctcggcctcggcgtccactctggccacgcttgaggagcccttcagcccgctgctgcactgtgggaacccctctctgggctggcggaggccgaagccagctccctctgcttgtggggaggtgtggagggagaggcgtgggcaggaaccagggctgctcgcaggctagcgcgagttctgggtgggtgcgggctcagcaaacccattccagggcgccctgcccttcacaaagaaaactctccccagggatcctgccggcttctccgggatccgttgcgggctcagtgggccccgaactcagagcagccagccggtgccactggccccaggcagtgaggggaaggggattagcacctgggccagcagctaaggagggtgtgccgggtccccagcactgctggcccgcccgcaccatgctcgaattctccgcaggcctcagctgcctccctgcggggcagggctcgggacctgcagcccaccatgcctaagcgccccctctccacccccaccccctgtgggctcccgtgcggcctgagcctccccaacaggcgccaccccgtgctccgcggtgcccagtcccatcgaccacccaagggctgaggagtgcgggcaagtggcgtgggaccggtgggcagctccgcccgtggccctggcgcaggatccactaggtgaagccagctgggctcctcagtcgcgtgaggacttggagaattttatgtctagctggaggattgtaaatgcaccaatcagcactctgtgtctagctcaaggtttgtaaatgcaccaatcagcaccctgtgtctagctcaaggtttgtaaatgcaccaatcagtgctctgtgtctagctaatctagtggggacttggagaacttttatgtctggctaaaggattgtaaatgcaccagtcagcactctgtgtctagctcagggattgtaaatgcaccaatcggcgccccgtcaaaacggaccaaccagctctctgtaaaacagaccaatgagctctctgtaaaatggaccaatcagcaggatgtgggtggggtcagataagggaataaaagcaggctgcccaagctaggggaggcaatctgcctgagttccgtcctattctgtggaagctttgttcttttgcgcttagcaataaatcttgctgcctttatgagctgtaacactcactgcaacagtctgcagcttcacccctgaggccacctgaggccagcgagatcacaagcccaccggaaggaatacacaactccagatgcgccaactttaacagctgtaacactcaccgggaaggtctgcagcttcactcctgaagtcagcgagaccacgaatccaccagaaggaataaactccagacacatctgaacatctgaaggaacaaactccggacacaccatctttaataactgtaacactcactgcgagggtccgcggcttcattcttgaagtcagtgagaccaagaacctaccaattccagacacaccttcaccataaacatctatacaccaggaatgcataaccttctgagaatgcaccccagcaagtcccagcctcgttttcctcgccctcattccaaatgg

SEQ ID NO: 12810 - DNA, 1779 bp, Artificial sequence
  DNA replication origin
agagaggaggggaggggaggcgcgcggggctgagcctcgcgggggccgcggcgcgcgccaatgggcagcggctggcagcgcgccccgcgcccgagccgcagtcgcgccctctcgcttcctggcgaaggcgcggacggcgcgcggaggcgagcgcggtggagaggagcccccggcgccgcagcgccgtcagggcatgaggatggccgtgggctccgtcaagatgcagccgccgtgcgagagcccggccctggccgccgcggcggcggtggtggcggcagacggccccctgcgccgcagccccagcgcccgggagcccgagcgcgagcagccgccggcgtcgctgcggccgcggctgagggacctgcccgcgctgctgcggagcgggctcacgctgcggaggaagcggagcgccgctgggggccgggtgagtggcccggccctgtccgagtgggcacgggcggcgcgcacgtggagcccgcgcccaccccccgggccgctgaggggggcgtctggaagttggggaggtggcggaagggacgcccttctgccggactcggctgaagaggggcccgggacggcgggttttgaggtgccaccccctgagcgacggcttcccccgcccccacacctcccccccaccaggctgcacctgacttaaccccagggcccccagattcaggctgcgggaccgggcatcggctgaagacgagctgtttgcctcttctcggaggggaagctgcaggtgtccagcgtccaacagccagccagccctgtcccaaccgcaagcttcaggccccacgagcggcatccctgtttgcaggacgcatgcgacgtgtgtgcttgttttggaggtgctgttgcaagctctgggcatcgagactggttttggtggtctccaccgccgaggggcagacccaggagtcggaagctcttgggtgagcttccagttcctgggttccggtgtctccagcacttaatactcctggacaccctcttgagcaggagggtgcacgcccccaagaaccttcaatattgacttcctgatggtgtgttcagatacgatttcctggtgaaggagtgtccctcattgagttctaagtgcatctaatgacctgagcaggtcaggcatgttttgtatttttaagagaagcaggaaggtctgctgattgtctcctgggatctttaagaagccacctaggaggccccgccagggcctcaggacacagagctgacttactcagatttccctgctcaccagggtttggcggcacctttggtgggttctactcatcttttaaaaatttattattaagtggtctttaatgagaagctgcatcaatgtggtttttctttcccgtttggctgtaatttttaaaatgcagtcttgtctgacttaaaacaagaccttgctgggagacttctagctctttcagagatgggtttgtgtaaacttgagagtgagggataaccacttgttttcatgcgccctcctttgggtagggaagggtctgaactgatgtcggtcttcagcttctcgaggctgcatctctcttttcctaggcattttccatctcaggtggaaaatggtccatcccaggtccatctcagaagatgttctgaggattctctgtgtgtgatgggacattcttaaagtcggtgacccagagagtttaggaattgcccacaagtgaccttaacatgtgtggcatttaggattgcctgcaaagtaagtgaggaaatgtgtccccaagatgtggtgtcggaataaacaagaactgg

SEQ ID NO: 12811 - DNA, 1199 bp, Artificial sequence
  DNA replication origin
ttcctccgcagcgtgagcccgctccgcagcagcgcgggcaggtccctcagccgcggccgcagcgacgccggcggctgctcgcgctcgggctcccgggcgctggggctgcggcgcagggggccgtctgccgccaccaccgccgccgcggcggccagggccgggctctcgcacggcggctgcatcttgacggagcccacggccatcctcatgccctgacggcgctgcggcgccgggggctcctctccaccgcgctcgcctccgcgcgccgtccgcgccttcgccaggaagcgagagggcgcgactgcggctcgggcgcggggcgcgctgccagccgctgcccattggcgcgcgccgcggcccccgcgaggctcagccccgcgcgcctcccctcccctcctctctcctcccctccccgcccaggtgcgcgggccccgccccgccccgccctttcgcctgcgaaagctgcctgggacctgtccccctcggatctcccactcgggacccgggaggaagagggcaccttgggcaccggctcatccacaggtgcagaattcccagaatctccggcaaacccgctcttctgtcctgtccctgtccccctaccccttaggctgaaaagtcctgcttcacttcttcgaatagccaggggttgacttggacttcaaccaagtgtgctggagagtcgtccgccctcccgcgcgttttgcacagcctggcccctcatcgtaatctttactcctgggaactgttttggccaaggaacttcaaaatagacacgctacaaggcaaacaccatgaggcaaaattgctttgcgccgacccttcttggcacacgcatccttaaaggacgaagggagaaaacttttgttggttatgataggtgttgagcagagtagctgcaagtctggtgacctgaaggtgaatctctgttagcatgtcagaacctgaccttccctgaaagcccgctgctgtgatgaatgtgcttggtgaactgtaaaggcctgccgtggtgtgaatcattgtttacacccttccaggaggcaggaattctggatcattgagagtgaaactattccagcagtgccttaaacgccagggagtgtgaatgttcacatctcagctcaatctgtcttcaacaagggccagccagggtgttgacttctcatcagtggggcgctgggatccccatctttgtctaa

SEQ ID NO: 12812 - DNA, 983 bp, Artificial sequence
  DNA replication origin
ccaccgggggtaggggtgccgagggcgggaagcgctccaccgaggtcccggcgaggatccaggcgtatctgggcggccacaagctcgccggcccccaggcagagggaagggcggcgaggagcgtggggcagcgcctgggggagaggagcttggccggagggcgggggattctgaggtagccttggcgactttcgagactacccaggccgagcacacccagccccctcagacccaggcatttctgcgtcctctggtttggagggaacccagggggctgaggtgaagcaagccaggactgtttctctgactcttctggaagacgacccgctgctcgggccgcctcatcactgcgggccacgaggtgggtaaagctccttccttagctcacctcggaccaccgggcctggtggccacttccaggtttcccgggggtggggggcggagggatccctggaggctgcagcgcccggaggaggcggggaggtgggcgagcggtaggcgtcaggcagtgcttcacaggctgtaggcgcccaaggagccaaccagagaagaacaaaatggcagccatgacgccacacctggcggccgcacacaaacacacacggggcagacgtttgctgatgtttgcacagggcattctcttgttcgtcctgattctttgttgatggtgctgtctttgcccggattggctacttttttccccttttgctgtccagtttcctgtttatcctttaagacttgatcagataactccttccctgggcccccacttccccctcaactcctgcccctctgtctttccgtgactggtgtaaaatgacctgctagggagtcagcctagggccaggaacttcttatgtttcggggtggttttgctcaactttgtccttccagtgcctggctttcaatcactacattgaggtggtgtagagttcctgtgggatgctccgaactacaccgggggtaccacttgtccatgtgaa

SEQ ID NO: 12813 - DNA, 1198 bp, Artificial sequence
  DNA replication origin
acacggcaaccatccgatttctcaatcttttccccacctttgccccctttctattccacaaaaccgccattgtcatcatggcccgctctcaatgagctgttgggtacacctcccagacggggtggtggccgggcagaggggctcctcacttcccagtaggggcggccgggcagaggcgcccctcacctcccggacgaggcggctggccaggcggggggctgacccccaccacctccctcccagacggggcggctggccgggcggggggctgacccccccacctccctcccggactgggcggctggccgggcggggggctgacccccccacctccctcccggacggggctgctggccgggtggggagctgaccccctcacctccctcccggacggggtggctgccgggcggagacgctcctcacttcccagacggggtggctgccgggtggaggggctcctcacttctcagacggggcggctgccgggcggaggggctcctcacttctcagacggggcagttgccaggcggagggtctcctcccttctcagacggggcggctgggcagagacgctcctcacctcccagacggggtcgcggccgggcagaggcgctcctcacatcccagacggggcggtggggcaaaggcgctccccacatctcagacgatgggcggccgggcagagacactcctcactttccagactgggcagccaggcagaggggctcctcacgtcccagacaataggcggccaggcagagacgctcctcacttcccagacggggtggcggccgggcagaggctgcaatctcggcactttgggaggccaaggcaggcggctgggaggtggaggttgtagcgagtggagatcacgccactgcactcccgcctgggcaccattgagcactgagtgaaccagacaccgtctgcaatcccggcacctccggaggccgaggctggcggatcactcgcggctaggagctggagaccagcccagccaacacagcgaaaccccgtctccaccaaaaaaatacgaaaaccagtcaggcgtggcagcgcgcgcctgcaatcgtaggcactgggcaggctgaggcaggagaatcaggcagggaggttgcagtgagccgagatggcagcagtacagtccagcttcggctcggcatcagagggagaccgtggaaagagagagagagggaga

SEQ ID NO: 12814 - DNA, 865 bp, Artificial sequence
  DNA replication origin
ggagcgcctctgcccggccgcgaccccgtctgggaggtgaggagcgtctctgcccagccgccccgtctgagaagggaggagaccctccgcctggcaactgccccgtctgagaagtgaggagcccctccgcccggcagccgccccgtctgagaagtgaggagcccctccacccggcagccaccccgtctgggaagtgaggagcgtctccgcccggcagccaccccgtccgggagggaggtgagggggtcagctccccacccggccagcagccccgtccgggagggaggtgggggggtcagccccccgcccggccagccgcccagtccgggagggaggtgggggggtcagccccccgcccggccagccgccccgtctgggagggaggtggtgggggtcagccccccgcctggccagccgcctcgtccgggaggtgaggggcgcctctgcccggccgcccctactgggaagtgaggagcccctctgcccggccaccaccccgtctgggaggtgtacccaacagctcattgagagcgggccatgatgacaatggcggttttgtggaatagaaagggggcaaaggtggggaaaagattgagaaatcggatggttgccgtgtctgtgtagaaagaagtagacatgggagacttttcattttgttctgtactaagaaaaattcttctgccttgggatcctgttgatctgtgaccttacccccaaccctgtgctctctgaaacatgtgctgtgtccactcagggttaaatggattaagggcagtgcaagatgtgctttgttaaacagatgcttgaaggcagcatgctcgttaagagtcatcaccactccctaatctcaagtacccagggacac

SEQ ID NO: 12815 - DNA, 881 bp, Artificial sequence
  DNA replication origin
ccgcccggccagccgccccgtccgggagggaggtggggggttcagcccccggcccggccagccgccccgtccaggagggaggtggggggggtcagccccccgcccggccagccacctcgtccgggaggtgaggggcacctctgcccggctgcccctactgggaagtgaggagcccctctgcccagccagccgccccgtctgggagggaggtgggggattcagccccccgcccggccagccgccccgtccgggagggaggtgggggggggtcagcccccagcccggccagccgccccgtccgggagatgaggggcgcctctgcccagccgcccctactgggaagtgaggagcccctctgcccggccagccgccccgtctgggaggaaggtgggggggtcagccccccgcccggacagccgccccgtccgggaggtgaggggtgcctctgcccggccgcccctactgggaagtgaggagcccctctgcccggccaccaccccgtctgggaggtgtacccaacagctcattgagaccgggccatgatgacaatggcggttttgtggaatagaaaggggggaaaggtggggaaaagattgagaaatcggatggttgccgtgtctgtgtggaaagaagtagacatgggagactttccattttgttctgtactaagaaaaattcttctgccttgggatcctgttgatctgtgaccttacccccaaccctgtgctctctgaaacatgtgctgtgtccactcagggttaaatggattaagggcggtgcaagatgtgctttgttaaacagatgcttgaaggcagcatgctccttaagagtcatcaccactccctaatctcaagtacccagggacacaaacactgcggaag

SEQ ID NO: 12816 - DNA, 1217 bp, Artificial sequence
  DNA replication origin
acttcccagtaggggcagccgggcagaggtgcccctcacctcccggacgaggtggctggccgggcggggggctgaccccccccacctccctcctggacggggcggctggccgggccgggggctgaaccccccacctccctcccggacggggcggctggccgggcggggtctgacccccccccaacctccctcccggacggagcggctggccgggtagaggggctcctcacttcccagtaggggcggctgggcagaggcgcccctcacctcccggacggggcggctggccgggcggggggctgaccccctgaccttcctcctggatggggcggctggccgggcagggagctgacccccccatctccctcccggacggggcggctggcctggcgggggctgactcccacctccctcccagacggggtggctgccgggcagaggggctcctcacttctcagacggggcaactgccgggcggagggtctcctcccttctcagacagggcggctgggcagagacgctcctcacctcccagacggggtcgcggccgggcagaggcgctcctcacatcccagacagggcagtggggcaaaggctctccccacatctcagaagatgcgcggccgggcagagacgctcctcacttcctagatgtgatggcagccgggaagaggcgctcctcacttcctagatgggatggcggccgggcagagacgctcctcactttccagactgggcagccaggcagagaggctcctcatatcccagacgatgggcggccaggcagagacgctcctcacttcccagacggggtggcggctgggcagaggctgcaatctcggcactttgggaggcccaggcaggcggctgggaggtggaggttgtagcgagccgagatcacgccactgcactccagcctgggcaccattgagcactgagtgaaccagacaccccgtctgcaatcccggcacctccggaggccgaggctggcggatcactcgcggttaggagctggagaccagcccagccaacacagtgaaaccccgtctccaccaaaaaaatacgaaaaccagtcaggcgtggtggtgcgcgcctgcaatcgcaggcactcggcaggctgaggcaggagaatcaggcagggaggttgcagtgagccgagatggcagcagtacagtccagcttcggcttggcatcagagggagaccatggggagaggg

SEQ ID NO: 12817 - DNA, 890 bp, Artificial sequence
  DNA replication origin
gaatcaatttgtgactcctgcattccggcccggcagaaagagctcgaagagacgcagagcgcggcgcgctcccccacggccctccaggccggcgggtgagatggggagatgagctagggggccccggactggctgcgccctctgccctgcagacacggggggccccgctgtggctgcccactggccgggcgcaggcctcgaagccgcggcgaacctctcttccccaccccacctcggtgactgttggcggcggctctccctgcccagaccccgccgccggatcctgcccggcctcgacgaaaccccgccgagccgccgagacgcagtgtctccgggtggcggcgggagaggcgggccgggaagcatggcggccgccccaacaccgcgcggcggagaccgttagggtgtgcagggcccgggaaggcggtctcgcgacgcaggcaagctcggccgcctctttaggccacggagccgcgcgagtccgggcccgggtgaccgctctgttcccactggacgagacctgccgagtcctcaggacaacggacaaaggccttaacgggcttgggaggtgagcgaagtcccgaacgatgacgggtggaacagttagcggccttcgggcggttggtctcgttctaccagagcttgctgtcggaagagagaaatggtggaatgacaagccacgtctggcctcttggaaatgcccaccaccctttgggaagatttactggccgtttatggaaggcctgtgtatttaatatgaaacagctgctctcaacactacccaaaccttttaatagaaaacatttgccacatctagcccttctatgagctagatggaaagaggttgctgatgtatgataaagttagaaaatcacacatcttgtaaattc

SEQ ID NO: 12818 - DNA, 1173 bp, Artificial sequence
  DNA replication origin
ctaaaaataaataaattttaaaaataaaaattagccaggtgtggtggcgcgtgcctgtagtcccagctacttcagaggctgaggcagaagaatcacttgaacccaggaggcagaggttgcagtgaaccaagatcacgccactgcactccagtctgggcgatagagtgagactctctctccaaaaacaacaacaaaaagatagccttgaaagcaatgagcaggagacgggggagggggggtgttggagagtggagtggagaggggaaggaggaagcgaggagagggtagtggaaaggggaaggagggaggagagagtggaaggaggggggagagggggaaggagggaggagagggggaaggagggggaagagaggggggaggaaggggaagagagggggaaggaagggggagagagggggaaggaggggggagaggggggaaggaagggagagagggggaaggaagggagagagagaggggaaggagaggggtggagagagagggagttgggaaaaccatttagaggacgttacttttactggatggaaggtcttgactgtgaatggtccaagttcttggtgtcttggacagagttgaacaaaacacaagaagcaacaaaagataaacaaaacaacgaagtcaggaaatcacagacttattagaacaaaagtacaactcacagaacggaagcaggttagagcaagcggccgaagacttcccgttatgatggtcttcaagggtttttattaagctaaaagtatttggtaacacccctacgtgcccattagagggctccaattggttacactctatgaaggattggcccgtgaccaatcagaggctaaagtagagattcgtccgcgcttaatcagaggccaaagtggaaacttctgtctcatcacaggagtgaggatgtggccggtctgctgcctgtctgctgcctaatcttgcctagaactggctgcacctgctggtcttttgcttctaccttaacccttggttaccctaattccctgttctgcctcattactgtataatccagatctggattgatagccttatggaagaatgttgtcgagaaaagagattttgtttgttaagaaaaacacaacatacaaggacttattacctaaaggtatcataagagtccatcatttaagacaggggtgtcca

SEQ ID NO: 12819 - DNA, 1345 bp, Artificial sequence
  DNA replication origin
atataataagaacaacaaattcaccagctctcagccttaggttttgtgcttgtctcagtgagatccaggcaggagcacagataacatactcggtatttcaccagggagaatcacacaggtgctgaaaggcgaaagaacaaagagaatccagagtagtgactgtaaggagcagccacggcctgagggttggaaggccaaagaggaagttgaggttttggatcctagagacttggagggaagagccctgagcacctgagacttagatttctgagccatgggagctccttggctatggctggcgcctgggatgtggggaggagagaggagttatacatcttgttcagagtgtccagaggagctagaggctgtaaccaactgctgattcagtgacgccggctgacagacagggacctgcggatgcggtgatgccgactgacggacgggacctgcggatgcagtgatgccgactgacggagggggacctgcggatgcggtgatgccgactgacggagggggacctgcggatgcggtgatgccggctgacggagggggacctgcggatgcggtgatgccgactgatggagggggacctggcgatgcggtgatgccgactgatggacgggacctgcggatgcggtgaagccgatgaacggggacctgcggatgtggtgatgctgactgacgtacagggacttggtgatgcggtgatgccgactgatgggtagggacctggtgatgcgttgatgccgactgacggacgggacctggtgttgcagtgaagccgactgacggacgggacctgctgatgtggtgaagctgactgacagacaggacctggtaatgcagtgaagccgactgacggacgggacctgctaatgtggtaaagccgactgacagatggggacctgcgggtggggtgatgctgactgacggatgggacctggtgatgcggtgataccaactgaaggacgggacctgcagatgcagtgatgctgactgacggatggggacctatggatgcagtgatgctgactgacggagagggacttgcagatgtggtgatgccgactgatggacagggacctgcggatgtggggatgccgactgacggacagggcctgctgatgtcgactgatggacgggacctgtgggtgtggggatgccgactgacagacgggcaagagcatgtcatctctatcccgactcctgctttctagtacccctctggtgccttctattggcagaaactaacaggtaacagctggcaaaggagagattagagtccatagtcctagacctggcatcacaaagctgagaagtacatttggaactgagagcttatttt

SEQ ID NO: 12820 - DNA, 1844 bp, Artificial sequence
  DNA replication origin
cgaacgcgctgtcaagaaagccccggcgctggctaaggggggcgcggggctgggggaggcgcgctcccccggcgccccgcccgggcccaggcgcgtgctccaggccccggcacgctgggcctcgggggccgagctagaatgcccgcctgtgcctcgttccttcctgctttcctcggtcgttatttacggcgctgtctgtgctgcgccccgaaacccccggccgtggagaacggaaagtggcctcgaccgtgctgccgagtgagaccgcgaggctggtgcctcgcacaggcggccccgcgcttcctccccaccctgtgggaggagagagtgtgtgcccggtttccccgttccacctcccctggtccgacgagcgataggggcaggtgggcgggggcggctggtcgcctggaagggagtcgccgccacgcaccggccgcccgccgctctccgggccctggcgcggggctgcggcctccgggtatggctccgccagggcgagggacggtgccgggcggagcaggacgcccagggggaaggctgcgttggggtccccatgggagccccgtgcctttcggcttcccttttaatcaattcagacgtggtgcgggcgcctcgccgtccttcgcgcctggttcagcctgtgccgagctgcgcctctgccagttctcccgttcgtggtctcccctgccgtccccgaccctttctcgccactccctgtcttcctcaagcccaccgctgagtgttcccggcgggtctgggctgaagcagagggcagggccagggcgccccctcctgaagaaagccaggggagccccctgccccgagtctgccctgtggagcgtgtccagggcggtgagagggtgggccgcgtccctcttgcgggcctcgtggtgttggtggcccccaggggtgggtgggggaggcttggagactggactgatacccaagtagtgggcccgccagcggaccctgctccccaaccatctgcgagttaaatgcccacgccgctcgagggggtcggcttctccctccgcctggagccgcgtccgggcctcgggggcccttcgagggcctcaggaggccatttgtgtcgccgcttgggctgtgcgggtcttcgggcagggagagccgctgaactcggccgaccgtctcacttcttgtgtgtccgcaggtaaaatagaactgcacgggaaacccatagaagttgagcactcggtcccaaaaaggcaaaggtgagctgctgcttctgtttgccccgattctgttctcactccgttattgggtggagagactcagctgagaacttcttgtcctctggtgcttaccccctgccgtgtggcgtggtgttccggtctttaatccttgcttttaagtttatggcgggggtgtgtgtgttgatgatgctgggcaggaattgaaagcttttctgtggcctctgccgcgggattatggttattggttacaaaatctctcgaaagctcacagctgaatgtcctcggtccgagcgggtcaaattgctcctacgggaaatgggtcccaacaagcagtttggggggtttgcagggcttgggaagcagcggatgattcccccacccctccaggagcaggagaggcgaaagcagctgcggacacgcgggggtccctcctttccttctctgtccggggttgggaggccgtgggcgcggccgagtggagaggaatttgcctctgccctgtgagctcgccaggggtattggaacgcgtgcgtaaacgctggggcctctctggcccagaagtgcctttgagtcactccgaagttctacaggttcctgcagtcagcacctttgtctccccgctttccaccc

SEQ ID NO: 12821 - DNA, 1625 bp, Artificial sequence
  DNA replication origin
cagggtggggaggaagcgcggggccgcctgtgcgaggcaccagcctcgcggtctcactcggcagcacggtcgaggccactttccgttctccacggccgggggtttcggggcgcagcacagacagcgccgtaaataacgaccgaggaaagcaggaaggaacgaggcacaggcgggcattctagctcggcccccgaggcccagcgtgccggggcctggagcacgcgcctgggcccgggcggggcgccgggggagcgcgcctcccccagccccgcgccccccttagccagcgccggggctttcttgacagcgcgttcgccctcacccagcaaaccccggccggggaagcagagccgcgggccggagtgggagccggagctgaggagagccccggcccccacgcgcgtgggtgtgggcgctcaggcctcacccccgctcccccagcgcgccgggcctggggcccgcggagccacccggtgggcctgggcgggcggtgcagggctggggcgagagcccgggtggggccaggcccgggcccacctgaaagcgcctcgatggccttgagggcccagctctcgtccgggcagtccacgaacgcgtagccagtcttcaccaggaagggtcccgacaccgggatcttggcgtccttgaagatactttctaggtccgagggggcggcgttctcgctgaggtttccgatatacagtttgttcattgtgaagagtggttgtttaaaaaaaaataacgagaaaaaacgaaaaattaaaaccacccacggtgatggatggatccagctggttttgttcccctcgtcttctcgcctttaaaatacacaaacacagtaagaaccaagcacaagaacgaggagtgaaaaatcagatccgaggcttgttttttccttgtctagatgtgttttaaaagagaaagaaaagaaaaagcctagctacaacccaaacgcatccaccagtcttcctaagtcttaggaggaggcgggattagcaagagaaaggaggaggaggaggggaaaaaactactttttgtctcttccttcccaacccctttggcttcggccagcggactgtgaaaatatcacactacgtgaggcaggcgccgcctccccataaaaaacccagaagggtgactggcaggagggaggggagaggaggaggaggaggagggaggaaggcgcaggaggcggaaaaaatccgctccgagtgtccggctttttgaatgagccacgtgttcaaactacaaatcaacgtctcacgtgaggaatcccagagcctcaattagagtgggtttcggagaaaaaagcgagcgagaggaagagggggaggggaaacgagattgggagagggactctgagaagggggaggaggaagaaggaaaatgctaaaggaaccgcagccggcaccaagcggggcgctgacggtcacaactcgagtttgtaaagggttatctggtctgggcggatcctgggagggagggctggaatattgatttttttttttttaatgaggaaatgggcagaggtactaacaggcagttcctcagcgctagttaccgtagttttaatcattcgatttttcaaaataggttattaacaacaaaaccagagtcacaatccc

SEQ ID NO: 12822 - DNA, 1049 bp, Artificial sequence
  DNA replication origin
tcgagtttgtaaagggttatctggtctgggcggatcctgggagggagggctggaatattgatttttttttttttaatgaggaaatgggcagaggtactaacaggcagttcctcagcgctagttaccgtagttttaatcattcgatttttcaaaataggttattaacaacaaaaccagagtcacaatcccgaactcgcctggtggctttaatggcattagaagtgtaaccccagcaaagccgcaggcacgtttctaaggctggcatggacggaaatgctgcgaggaggggtgggggagtgggtgaggggggcagggggtgggggcaagacaggcgggcgacgcgccccaccccgtgcgcccttctcgggccctgggcaccgcgcgagtgggggcggcccggccccggagtggtgggggatgggatcccgcagcgtcctgggcgggtgtctgggcgacacctcctccgcctccgcctgcgctcgcggtggctctcggcttcgcgtttgccattggttgcgcgattcagaaaaggctccaggataaatgaggccgggggcgggcttggccactggtgggggaggggagtgcaggggcggaggtttctggctaggggctggggtcgtcgggggcctgggccgctggaggagagaagtcaaagtgggaaaagtcggtaaagggaaaccctctcttcctgtagtttttaaagggggaggagtggagtaggctggtacttttatttaagtaattttagttggagaacttgagacttaaaactggaagaccgtcgtgcattacccctaggtggtattcgcatttgaaaaattgttcgagtctctttctgcctcttttctgcctggatttggccatgagagccatacataattttctctatatgtaatgagtacaatggtggttgtcgggggaggatttgggcccggtggagccttgtgggccaacaaaatgtgaactggagacgagcaatacggaaacgaaggcagtgctggggttctagtggaatctccaactgtcgtttaaagattgtgtactcc

SEQ ID NO: 12823 - DNA, 1518 bp, Artificial sequence
  DNA replication origin
ccgggcggggggctgacccccccacctccctcccggacggggcggctggccgggcagaggggctcctcacttcccagtaggggcggccgggcagaggcgcccctcacctcccggacggggcggctggccgggcggggggctgacccccaccacctccctcccggacggggcggctggccgggcggggggctgaccccccctcccccttcccggacggggcggctggccgggcagaggggctcctcacttcccagtaggggcggccgggcagaggcgcccctcacctcccggactgggcagctggccgggcggggggctgacccccccacctccctcctggacggggcgactggccgggcagaggggctcctcactttccagtaggggcggccgggcagaggagcccctcacctcccggacggggcggctggccgggcggggggctgaccccccccccacctccctcccggacggggtggctgccgggcggagacgctcctcactttccagacggggtggctgccaggcggaggggctcctcacttcccagacgggatggctgccggacggaggggctcctcacttctcagacggggcggttgccaggcagagagtttcctcacttctcagacggggcggccgggcagagacgctcctcacctcccagacagggttgcggcccagcagaggcgctcctcacatcccagacagggcggcggggcagaggtgctccccacatctcagacgatgggcggccgggcagagacgctcctcacttcctagatgggatggcggcggcgaagaggcgctcctcgcttcctagatgggatggcggccgggcagagacgctcctcactttccagactgggcagccaggcagagaggctcctcatatcccagacgatggggggccaggcagagacgctcctcacttcccagacggggtggcggctgggcagaggctgcaatctcggcactttggggggccaaggcaggcggctgggaggtggttgtagcgagccgagatcacgccactgcactccagcctgggcaccattgagcactgagtgaacgagactccgtctgcaatcccggcacctagggaggccgaggctggcggatcactcgcggttaggagctggagaccagcccggccaacacagcaaaaccccgtctccaccaaaaaaaaaacgaaaaccagtcaggcgtggcggcactcggcaggctgaggcaggagaatcaggcagggaggttgcagtgagccgagatggcagcagtaccgtccagctttggctcggcatcagagggagaccgtggaaggagaccgtggggagagggagagggagagggagagggagagcaggggacagtcttaactcattaacaaaatgaagctaaaagcctagaaggtttgacattaaactgaggtgtgagaattataaaggtgcagtctaatcacttatttcagtcagggttagaaattggcaattaaagaaaaagtcaggataaatgagaaac

SEQ ID NO: 12824 - DNA, 920 bp, Artificial sequence
  DNA replication origin
ccagccgccccgtccaggagggaggtggggggggtcagccccccgcccggccagccgccccgtccgggaggtgaggggcgcctctgcccggccagccgcccagtccgggagggaggcggggaggggggggtcggccagccgccctgtccgggagggaggtgggggggtcagccccccgcccggccggccgccccgtccgggaggtgaggggcgcctctgcccggccgcccctactgggaagtgaggacccctctgcccggccagccgccccgtccgggagggaggtgggggggtcagccccccgcccggccagccgccctatccaggaggtgaggagcgcctctgcccggccgcccctactgggaagtgaggagcccctctgcctggccagccgccccgtccgggagggtggtgggggggtcagccccccgcccggccagccgccccatccgggaggagaggggcgcttctgcccggccgcccctactgggaagtgaggagcccctctgcccggccacgaccccgtctgggaggtgtgcctagcgactcattggggatgggccatgatgacaatggcggttttgtggaatagaaaggcgggaagggtggggaaaaaattgagaaatcggatggttgccgggtctgtgtggatagaagtgggcatgggagacttttcattttgttctgtactaagaaaaattcttctgccttgggatcctgttgatctgtgaccttatctccaaccctgtgctctctgaaacatgtgctgtgtccactcagggttaaatggattaagggcggtgcaagatgtgctttgttaaacagatgcttgaaggcagcatgctcgttaagagtcatcaccactccctaatcttaagtacccagggacacaaacactgcggaaggccgcagggtcctct

SEQ ID NO: 12825 - DNA, 883 bp, Artificial sequence
  DNA replication origin
gaaaaaggagcatgaaccttgactatgcctttagctccagccacctttttaagagtaaattgctgggcaggtgggggagggctagtcacagaacgaaactgtaaaccggaccaggtgtgaggaggggaggtgataaaaagattacagggtggaggagcggaggctgaggaagaattgggacctagctcggcctggcgaggagcagcctggggaggaagggagaggtcagatgggtctgtagaaaaggaagattagaaagactcagtgacacttggggttggtactaaggggacaggcgggagggaaagaaggaagatttgggatgagttgcactgggcacagagactaggaagggactgatgtgtaaaagaatgcctggacgtcaggcacctcagaccgtttgcctattttacgacaagaattatttagatcttgcaggatggaaaaattcaaagtgccattttctggctatttggaactactgtcgagtttgtattggggtcaagcggcaatgcagaagaaaataaggcatttaggttttaggtcaggtgtgagttgaagaggttttaagtttttgagaacacaggccaagggagtcgaaggaggaatggagggtggaagtttgcccacagtgaaggaagcaagcctagagaaaagagaaagtagagaaacggagggaaggggttcgggggttcttaccttctagaaaagtgggcaaaggggttggggcacagagataagaggtcggggcgtggaaataagggattggggtgcagagatacgaggttggggctcggaagggattggggtgcagagataagaggttggggtgcggaaataagggattgggggttcttgccccgtagaaaagcgggacttgctg

SEQ ID NO: 12826 - DNA, 949 bp, Artificial sequence
  DNA replication origin
gctgccgccgctcccggtcgctccccgccgccgctgctctccctcagccacaggcgccgccgagcagccccatctgcaaactcgtggctcgtagttgagaactggaaatgcgtctctcactgccctccgcctccctctctctcctccccctccctcgctccccactctgccccagctccggtcgcccccgccgctgcctccgcgcgcgcagccagccgcgcctcagccgccctcctcctcctcctcctcctcctcctcctcctccagccgccgccgccgccgccgcttgggcgcgctcccagccggcctcgcgcgtgcgccggacgtcggggagcgcgcgctcgggcgcgaggaggtgccaccgcctccggaaagccgggccccgcccctcccgccgcggctgggcgcccaggtggagccccctcccagcttctgagcgcccagactgactgcgctctgcgcccggccggctcgcttcaggggtcccggacctgcgcccgcgagagagggctggtcggacccagtccccgccgggtctcctgggccgaagtcgcagctgtctgtcagcatttacgggtgggcaagatactcctcggggcataaaacaggctccgccctgacctttctgagagttttacattcaagaacccagtcgtggggcacaaaagagaaatggaacgagaagaaaagcctctggaaaaatctccccctcccccttcacagactccactggatctgatgtgtatttggcaggttctacggcgctgactgtgtccttcattaattttttcccaaaggcccgaccgggcagtgtgattcacacccgaggaaatgcatggacactggctcttttcatagcaccgaggctcccgtggaactccctgggtcggctttgccagacactccctggacacagttgttcagctcctccccagcacctgggcttccc

SEQ ID NO: 12827 - DNA, 1283 bp, Artificial sequence
  DNA replication origin
agagcagcggcggcggggagcgaccgggagcggcggcagcggcggcgcggaggcggctgaggtgcgagccggtgagttaactggacccccacgccgctcgggtaacggtcgcgccgcgcgccgggccggccgggggcgccctgttgctcggcgcggcgcgccacgcggggaccctggcccgccccgcccccctcggcacctgggcttcggcgggcgcggggaagagggaccggcaggcggcggcggcggcgccgcggtcggggaggctgctggccgcccccagcccggcccgcgcggaaggggcgctcggccgggctcctgcctctctggctgcgggcggctgggcgggccggagctcggcaacgtgtctggcccatgctgcttgccgccgctccccacgcgctccccggcgcggccccgactggggctagggccgcagacgcgcggggccccttcgggcgcggggcttgggtgcctacacctctgcggcgggagtcgcggtggagcctgaatggagagccggcctgggggcggcgttgctgtgactgacacctccggggtctgtcccgagagggggtgattccgccggctcccggttctctcccgagctcggagttggtaggggaggaggctttctccaactaccgccgctacttccgaggtacgagactccagttgtttggccaaagtggctgtgggccgagcacaggctgccgcgggggcgttcgctgctgagatcgtgctcgcggattctcggtacgtttgtctgaaaccaaataggtgctggggcttttttattttggctgggtggagggtcagcaggggagtcgattgaggtatccgaccgtgtggtgacaggatgtggattggttggtagatgtttttttgcagaaggactttttaacactttactgggagtttattctcaatcctaccagtttctgggattgcagctcgagattacatttgttaaacttccatcagttgggtgtgcatctgtgtagggggtgggggtgaagcgagggagagaattgaagactgccggggaagctcagaaaattctccgcattacttataaacagccgggtaaggtcaggctagccacgttttattctttcctacgcctttggagagtgttggaattttactttgtgcttcaagtatattacaagtggtcttgtagtgtagctgagaacgtttggggtgcgttaaaatgcgtttcaattggagtatgatttagcagccatttcttcccgtgaaattttgcaaatcatttgtaaact

SEQ ID NO: 12828 - DNA, 1523 bp, Artificial sequence
  DNA replication origin
ccgtcagcaacccggctcccagagagtcacacgaaggaggggaagcggctctctctggggcttctgggaggtctggcccgggcccctcccgcagcctccggcggccagtcccgcggctctggggcgcccggaccgagcaaaggtcccggcgggcgggccctctctccgccctccccaagcgcccgccccccgccggcccagcgcaggctcctccgactccgccagcgcagggggcgcggctgccggggacccagcagcgggcgcgcgggtaagtgcgcggcgggcgcgggctgcgggatccgctccgggctccactccggatcctctttggtctgtttgggtgtcccgggccgggggcagccgaggccgcgcggcgctttctctctgggccaccctcccctcgctccttcctaggggagacgaatcgattggctgcccggccgccggaacggcaggtcccgtcgctcccctcgcctcccgcattcccggcccggtcccctcccatcaccgcgtcccgccccaactcgcagtcagcatccccttcccatcctctccccgtccccgctgccacttccttccttggatgttggaagcgcagctggtattttcgttctcccaaccccccaaaccccccctccccattcgttcatcctttgtgttccggtctcttctctgggtgctgcggaggctctcccggctcgggggcgtgtgtgcagggaggcggaccgcggaacagatacggagttcagtctctctggacggaaaaaagtccccctccactttgctccggtatctagagagctcctagcttggggaggaggccaagccccactcggtgtgcctggcatgcgctggaatggctctcaagagctgcccgcgtggcttcctttggtctccatttgaggacctctgaccctttccagagccgcttgccgtctgcaccccgaggggaaagactagagggcacctcttagaaaagcgctggttgtggactgaacacaccgaccacccactcctccagagtctactctgtccagaatagtgaatgggataatgaaagggatggatggcttgcggtcgctgtcctcgagacgcaggcaggtggggcaagtccaagtggaatgaaaggagtgctgtggggttggagaagcagctgaagagtgaaattaattgtcttcacaatctaccaccaccaagctctttttctaaaggagaagttgagcccagaccattaggtagatctgagagagaaagggcccaaccccctagccacggtcccttggctaggttctttgttattgttgagagagggtctcgctctgtcaccaaggctggagtgcagtggcactatcctagctcactgcagccttgaattcctgggctcaagggatcctcccatacacccgtagctgagaccgcaggtgcctgccaccacaccgcatcttctctattcttacccagactgccctctgttacccactccacttccccaaagcctttggcgcctcactctccttctcctt

SEQ ID NO: 12829 - DNA, 1040 bp, Artificial sequence
  DNA replication origin
cccggcccgggacacccaaacagaccaaagaggatccggagtggagcccggagcggatcccgcagcccgcgcccgccgcgcacttacccgcgcgcccgctgctgggtccccggcagccgcgccccctgcgctggcggagtcggaggagcctgcgctgggccggcggggggcgggcgcttggggagggcggagagagggcccgcccgccgggacctttgctcggtccgggcgccccagagccgcgggactggccgccggaggctgcgggaggggcccgggccagacctcccagaagccccagagagagccgcttcccctccttcgtgtgactctctgggagccgggttgctgacggcccagcgctcagccggagtccccgcgcgcttttcgggactcacccgggagatgtcggggcctctcgggaagagtgggctgcgcctgccttccgcggccgcctcgcctcttcgctgcgcgggaccgtggggtttgagagcggcgcctcctcgcggggccgaacccgccacccacagtggagtgtggactgacaccgcggcctcacggttcaaccaggaaagtccaaggcctgtccagcctgtgggagcccctaatgcccgtgcctggagtagtatctgggtgtgtggtgcgacagtgcccacacttaggcctgccgctaatcagtgattcattcctgtaaactccactctaagctccttgagggcaaaaccaggcgctctcacacactgggtgctcaacgaatactgaacgagggaatctcagcatagctggtgctcaaacattgctttctgatgaactgacttaaatattagctctttttgtaacattaggaccagctgaaaccgattaaccattacttaagttgttacagcgaggcagagccaaaatctcccgggcgtgtgcaagagggaaagctttctaattgtgaacaccgcgcgccccgcagaaggctgcattggcatcacctgggactggttagaaatgccaaaaacgcctgacccgctcccaggtccagaagacagatt

SEQ ID NO: 12830 - DNA, 1230 bp, Artificial sequence
  DNA replication origin
ccactcacctgagcgctgtgcagccggagacgctccctagttccccggggccgggctccggggttagcgcacagaaccgggagaaggcaaccccggcttctccggtacccccgcaacgtgcagctgacagctcccgcaccggccgcaggagtcgggggcggggatggccacttgcagacagactgcggggccggagccgcgctgcgcaccggccgcgaagcgctcaagtcccctctcccgggccggctggcgggcgccaccagcacgcggccagttctgagtactttgcccagaacttctcggcgcgcgccgcccggcgattagcccgaggagccgcgcaagggcgggagcgcaggggaggggcctgagaggcccaggggcggggccccgagggggcgggagggcggcagagtgatgcacaatctcaccaatcagaagtcgcctttcgggaaggaggtggggcgatgtcctcggaagaagccagcggattccatgacgcggcgggggaactagggaccccggattccggatgggttgggagggcggagggaggcgagtcctgcggcgaggcactgggtggggctcccggtggcccagctcggtgcctgcgcgcggtaggcgttcggtaaatgttcctctagtggcttttccgggccagggaaggaggaaaaagtgagggcagcgcgggaggggcaggtttacggagaaggctccaggggacccttgcggtcgcacaggctaggagaactcgacctcccgagaaagtcagactgtggcagaggagtcgagaacagaggaaatacatagggaggcagcactctaggcacgagatgacaaaggacagcatcagtgtgagacccggggctcggagaccgtgaccctacctccagaggcagtcgtgcagattcgtgccggggtgattttgttctgtgcagtttatgtgcaagggggtaggaggtggggagagcaccgtcgttactattaaatctccctgaaagacggaaaagtccacccgacttgacttcccactagcccaatggccttctttgatcctaggacgaatgcaagcagctgatggtttggggtcagtttgcagactgcaaatgtgtcgagtgccgcaggtggcgggtgggaagggcatgagcatttagtgagcacctagtatatgccaggagcagttgcgagcttgcaactgtgagaaaggcgcaccaggctccagtactcacgggg

SEQ ID NO: 12831 - DNA, 948 bp, Artificial sequence
  DNA replication origin
gggagggaggttggggggggtcggcccccctgcctggccagccgccccgtccgggaggtgaggggcgcctctgcccagccgcccctactgggaagtgaggagcccctctgcccggccagccgccccatccgggagggaggtgggggggtcagccccccacccggccagccgccccgtccgggagggaggtggggggtggtcagcccccccgcccagccagccgccctgtccgggaggtgaggggcgcctctgcccagccgcccctactgggaagtgaggagcccctctgcccggccagccgccccgtccgggagggaggtgggggggtcggccccccgcccggccagccgccccgtccgggagggaggtgggggggtcagcccccctgcccggccagccgccccgtccgggaggtgaggggcgcctctgcccggccgcccctactgggaagtgaggagcccctctgcccggccaccgccccgtctgggaggtgtgcccaacagctcattgagaacaggccaggatgacaatggcggctttgcggaatagaaaggcgggaaaggtggggaaaagattgagaaatcggatggttgccgtgtctgtgtagaaagaaatagacatgggagacttttcattttgttctgcactaagaaaaattcctctgccttgggatcctgttgatctgtgaccttacccccaaccctgtgctctctgaaacatgtgctgtgtccactcagggttaaatggattaagggcggtgcaagatgtgctttattaaacagatgcttgaaggcagcatgctcgttaagagtcatcaccaatccctaatctcaagtaatcagggacacaaacactgcggaaggccgcagggtcctctgcctaggaaaaccagagacctttgttcacttgtttatctgctgaccttccctccactattgtcccatgacc

SEQ ID NO: 12832 - DNA, 1610 bp, Artificial sequence
  DNA replication origin
gggcgaaaacgtgggcagaaggcgggaaaacgccgcagccggcgctcagagcaagcttccagcagacgcgggaagttgaggctcggcgcccccgcccccaccccagcgcccagtctccgctccccttcagggcctcttccgggctgagtcctgggagtgggtttccccggccgcagtgattttgcaagagtgcggccggccggctgtaaatcagcctttctccactcccggggggcagccctcccgagccggggcgggggcgcggaggacgcgggggccgggcccatggccaccctaggccctcggccgcagctggatcggccgcctccggcgaggcggcgggggttaaacgccgtgaatccatcaatcaagcgcaccgccgccctcgcgaaacccggagcaccgcccgcggggcctgctttgtgtctcgcccgcccgcctgcccggggcctgggaagcagggtcgggccgctccagagtccggggggcgcggcgcattcccacgaggggccggggcggcctgaaggctgctccacccagtcccaccctgtaacgggttcactggggcctggaacacaaatctcccaggctgctggtttccttatttgatcactcctttgcgtcttcaacagaataaggccaactcatcacactttcccggccgcctggagccccgaaccctgtcatcccccaaaagcagcatgaccagggttggtgagattagccataaacaaccagatgatgtgactgggcaaatcacatcatctctctgtgcctcagtttctcgtctgtagaaagagggggctgttttaggatctccgcatttttttgtacagctctaatgttcttttgttttaggtggagaagcctgaaccctttttgccggacaaatgtccccaagttcccttttcttccacgtttattttcgtactgccggttccttccctccccacccgcgagtcagccccactgcgtcccagagagcagctccagcccgcagggcaggacacctgagcctcggagctgagccctggccgcgtttgtctcggagaaaccaccagggggcaatagagcccaaggatagaggagcaaggctccacaaggcctttccaaaagtttgtccaatttggcgtgaattcctttttccagtttgtgtgatttgtaaattgcgcagagtgatttcaagatcccccgtttgatcattagcgctaaggtagatggatgcagcccggggttcataaagaatgaggcacaaaagcactaatgaagagcaggctagcgcacccgcaagacctaatggcagaacaaaatggggcgaacgtgaacaaagctcacttgaagtgcaaaactttggttctaaggccatgcatacagtgggttctcaggccatggggcaaaaggcatggaaacagtgggccgcacgccggtgtgtcttttcctaagttttgcaaatatcgggttcgttttgcgatggtgaagtgggaggtagcccgggaggtgagagaatgcagaggaaatcagttaagagagattctcctgataggaagaggaggtggcgaaggtttaggttagagaaccccagttcttcatgcagcagccaccttcgccca

SEQ ID NO: 12833 - DNA, 1355 bp, Artificial sequence
  DNA replication origin
cgcccccagccccgcgcggccgctctatttgcataaggaggcgtctcccgggcccgcccggggcgcacgtgaccccgggggaggcggagggaacctgctgacttgacacgagccgctgtgcggctccccttggcgcggaatagcgagagcagccgtgacctccgaccccgcccgccggcagccaataagagcgcaggtcgtctccaaacccaaaatttccacgtcggcaaaagtcaagatggaagggagcggagcggagcgcgaggggggagccggcccgggaatgcctggcggccggcgctggaggggcaggctggggagcctgcggcgggcgcacgaggggccactcgcgaaggtgtcccggcccagcgcgaccaccgcccccaaccccgggagcctctgggcgccccgcactccgccagccgcccgtgcaccccggcccgggggacgcagcccactgcccctccggccttgtctcttaggggtggcgggggatggaacggtggcgaggggtttgggggaagatgggaaagcactttccagacctgttgcacgcgcgcaacagctgttcaggtgcggtatgtggggggagggggtctgctaggatgggggacagagtggtcgcttatgctgcagggaaaagggggtgccgggagggggagaagagcagtcttggggactgtgtgcaaggttgtgcgcgaacggggtccgcgggaagcactgcctaatggggcagggagaatcccaaagagtgggtgggtggaacggaggggatgggacgacttcgacccgagttcccggggctgggcgcgggcggctggaagaccgggaatagagtactgggaatggctggggaagggggtctcaggggaggccccgcaaagcgggtctttcttgggtcgtcccatcttaggggcttttcccgggcctgtatttgttccccaccgtttaactctttcagctccgaatattcgtcctcgtgcagcgcccccgcccccagctttccagatgggaaggtaaaaagttgccacaagttagagtgagttagctgctggcaaaagtttaaataactaccgagggaggtgagggttcgaccaggaatgggttctaatctgaggacgggtaggaaggaaggagagtgtgcgattcttgcagcccctttgctgtgacattgcgaccagaatttgtcgaatcgggctgttaaaacaccatttctgttgggcatttgctcctgctgactgcggcagtaactttccataattaatgacccgttccattatcggtcgcatcctgaactaaattgcttttaacgagttattcttctttgtcttagctggggggtgggggaacacacc

SEQ ID NO: 12834 - DNA, 1467 bp, Artificial sequence
  DNA replication origin
ctcaatgagctgttgggtacacctcccagacggggtggtggccgggcagaggggctgctcacttctcagaaggggcggccgggcagaggcacccccccctcgtcccggacggggcggctggcggggcggaggcgcccctcacctccctcccggacggggcggctggccgggcgggggctgaccccccagctccctcccggagggggcggctggccgggcgggggctgaccccccagctccctcccggagggggcggctggccgggcgggggctgaccccccagctccctcccggagggggcggctggccgggcgggggctgacccccccacctccctcccggacggggcggctgccgggtggaggggctcctcacttctcagacggggcggctgccgggcggaggggctcctcacttcccagacggggcggccgggcagagacgctcctcacctcccagacggggcggggcggcggggcagaggcgctccccacacctcagacaatgggcggccgggcagacactcctcacttcctagacgggatggcggccgggaagaggcgctcctcactttccagactgggcagccaggcagaggggctcctcacatcccagatgatgggtggccaggcagagacgctcctcacttcccagaaggggtggcggctgggcagaggctgcaatcttggcactttgggaggccaaggcagacggctgggaggtggaggttgtagcgagccgaggtcacgccactgcactccagcctgggcaccgttgagcactgagtgaacgagactccgtctgcaatcctggcacctcgggaggccgaggctggtggatcactcgcgtttaggagctggagaccagcccggccaacacagtgaaaccccgtctccaccaaaaaaatacgaaaaccagtcaggtgtggcagtgcgcgcctgcaatcgcaggcactcgacaggctgaggcgggagaatcaggcagggaggttgcagtgagccgagatggcagcagtacagtccagcttctgctcagcatcagagggagaccgtggaaagagagggagagggagactgtggggagagggagagggagagggagaggcagaggcagaggcagaggccaagctctccctggccaagctggtctcgaactcttgacctcaggtgatccacccaccttggcctcccaaagtcctgggattgcaggcatgagccaccatgcccagcagggaagttaccatgttttaaggagtcctatgtagaggctcatgtggcaaggccaatatccagtgagagagaagctgaggcctgccagcagccacttgagtaggcttagaagctgatccttctccagttgaggcttgaagtgactaagttggcttctagcccatgccaactctttgattgcagctttgtgaaaggccctgagcaagaggactacactgcacatggattcctgacccag

SEQ ID NO: 12835 - DNA, 1055 bp, Artificial sequence
  DNA replication origin
agtgaggagtgtctgcccggccgcccattgtctgaggtgtggggagcgcctctgccccgccgccccgccccgtctgggaggtgaggagcgtctctgcccggccgccccgtctgggaagtgaggagcccctccgcccggcagccgccccgtctgagaagtgaggagcccctccacccggcagccgccccgtccgggagggaggtgggggggtcagcccccgcccggccagccgccccctccgggagggagctggggggtcagcccccgcccggccagccgccccctccgggagggagctggggggtcagcccccgcccggccagccgccccctccgggagggagctggggggtcagcccccgcccggccagccgccccgtccgggagggaggtgaggggcgcctccgccccgccagccgccccgtccgggacgaggggggggtgcctctgcccggccgccccttctgagaagtgagcagcccctctgcccggccaccaccccgtctgggaggtgtacccaacagctcattgagaacgggccatgatgacaatggcggttttgcggaatagaaaagggggaaaggtggggaaaagattgagaaatcggatggttgctgtgtctgtgttgaaagaagtagacgtgggagacttttcattttgttctgtactaagaaaaattcttctgccttgggatcctgttgatctgtgaccttacccccaaccctgtgctctctgaaacatgtgctgtgtcaactcagggttaaatggattaagggcggtgcaagatgtgctttgttaaacagatgcttgaaggcagcatgctcgttaagagtcatcaccactccctaatctcaagtacccagggacacaaacactgcggaaggccgcagcgtcctctgcctaggaaaaccagagacctttgttcacttgtttatctgctgaccttccctccactattgtcttatgaccctgccaaatccccctctgcgagaaacacccaagaatgatcaatttaaaaaaataataataaaattaaaaaaaatacaaaacagctgg

SEQ ID NO: 12836 - DNA, 1268 bp, Artificial sequence
  DNA replication origin
ggccgccgccggccgaccaccaccgcttcaggtgcttcatcgccgccgcgcgcccgggaacgcccctgccggcgcccgcgggtcccggcgccccagccgccggggtgacacgtgcggaccccgcgcgccgcccgcacctgcctggaacccagataagcgaaacaatggaccggggcgcgtggcggccgtcgcgggttcccagcaccgggcacaaaggcgttccctcggcagccggcaccgtgcctggcaccgccggggatcgggagaagcgaagaaggagccacctgagcgccgagcccgttcgcccagccgcccgcagcccggcgcggtggccaagctccgcccccggccgcgggcgcagccgacaggaacacgccccctgccgcccggggcccgcgcccgtgggaggggccgcacggggcggggctccccgagctcaaagcctctttatgtccggggaacgcaaggctttctgggagcagaagttgttctgggcaccaagtggccccttgccaccctgtggccgtgagctgggccatccttgctgaaagccaagggcgggagttggggtggagggctaggtggtgggtagctgggtgggaagggacaggatgtgtagactgggcggagagtgactgggcagctacgaggggcctggcagcttgcaacgggcttccaccccaacgtgaggacacttggcgggcagagtgggcaagagtaacctctctgtctcagttccgctatctgtaaaatggggatcatagagcctgtcaaacagggatgtgttgaggtcagatgaaatatttcgtgtaaagttcggagtttcacatataaattccaccgttgccattgggatcagtcatcccaccactccgcacaccccagtcccagcctcacagacccctctctcttctctgggcgtgctctgcatagtgctagacctcctctcggtatcctttgctccttatccgttgtttccttgagggttgacagcaccagctctacagttaccctgagtgagttcaagtcccccctccacttgaggggcgaccttggacaaatctctccttttctctgtgcctcagttttctcactgtaaaatgagactaataatagcacctccccagcagaccttttgtgagccccaaatgagataatgcatgtaaaccaccgaccacagcactgcatgggtaggaagtgctccctgctacccattgtttgtgttactcaccctcaaggcttagctccaaagctacatcctctgaatt

SEQ ID NO: 12837 - DNA, 1269 bp, Artificial sequence
  DNA replication origin
gcctcctgcacctcaccctcctgctgagcttggcggggctccgcgtagacctagatctttacctgctgctgccgccgcccaccctgctgcaggacgagctgctgttcctgggcggcccggccagctccgcctacgcgctcagccccttctcggcctcgggagggtgggggcgcgcgggccacttgcaccccaagggccgggagctggaccctgccgcgccgcccgagggccagctgctccgggaggtgcgcgcgctcggggtccccttcgtccctcgcaccagcgtggatgcatggctggtgcacagcgtggctgccgggagcgcggacgaggcccacgggctgctcggcgccgccgccgcctcgtccaccggaggagccggcgccagcgtggacggcggcagccaggctgtgcaggggggcggcggggacccccgagcggctcggagtggccccttggacgccggggaagaggagaaggcacccgcggaaccgacggctcaggtgccggacgctggcggatgtgcgagcgaggtaggtgcagagcgggaagcgagcgaagtgcggcgtctacgccgccgggagcccccgaggcttgtgtcggatctgagcaggggccactctcgctgtgtcctggcacccttagcccctggtctttgcaggttcgcagatgctgctgctctgattccgaatgaagggctactagtgctgtcgctgtggtttttaggtgtttaaggaagaagtggacgaaatcatccgtttggttatagagaatacctttccttgtgtgtgatggctggcaagagtagttcggggatggggaggggagaagcaatgcccactgtcttcgctcagtacctcatgtacactggggtgtcgttctctgggacccgtgcccgacctggacgatgtgaaggaggccgtgacctctgggaggatgcatgtttttaagaacgactctcccggcctaacgcaaggaccttcgccctgttttcagcccaattgctgttcgtttttgctgcttccctggattaaggagccatggtcagggtctattcagaggccagccggcaggcggtccccctgtgacctaaccatcccctgcacctagcaatcctccttcctggaatttgtgtaacctcttattagcataacgaaaacaggtaccttggcagtcacttagtgactaacaagttccctttggtttatgggtccaaacccttctctggcttaacttctttctgaaaccaagtttaccaagatctgttgc

SEQ ID NO: 12838 - DNA, 1306 bp, Artificial sequence
  DNA replication origin
gggagtggtgatgactcttaatgagcatgctgccttcaagcatctgtttaacaaagcacatcttgcaccgcccttaatccatttaaccctgagttgacacagcacatgtttcagagagcagggggttgggagtaaggttatagattaacagcatcccaaggcagaagaatttttcttagtacagaacaaaatggagtctcctgtgtctacttctttctacacagacacagtaacaatctgatctctcgttcttttccccacatttcccccttttctttttgacaaaaccgccatcgtcatcatggcccattctcgatggtcactgtctcttcggagctgttgggtacacctgcagaaaggctgtcacttcacacttggaagattgcacagcagccaggcagaggcgctcctcacttcccagacggggcggccgggcagaggcgctcctcacatcccagacgatgggcagccgggcagaggcgctcctcacatcccagacggggtggccaggcagaggcgctcctcacttcccagacggggtggccaggcagaggcgctcctcacatcccagacgatgggcagccgggcagaggcgctcctcacatcccagacggggtggccaggcagaggcgctcctcacttcccagacggggtggccaggcagaggcgctcctcacatcccagacgatgggcagccgggcagaggcgctcctcacttcccagacggggtggccaggcagaggcgctcctcacttcccagacggggtggccaggcagaggcgctcctcacttcccagacgatgggtggccgggcagaggcactcctcacctcccagacggggcggccgggcagaggcgctcctcacatcccagacgatgggcggccaggcagagatgctcctcacttcctagacggggtggcagccgggcagaggcgctcctcacatcccagacggggtggccgggcagaggcgctcctcacatcccagacgatgggcggccaggcagagatgctcctcacttcctagacggggtggcagccgggcagaggcgctcctcacatcccagacggggtggccgggcagaggcgctccttacatcccagacgatgggtggccaggcagagacgctcctcacttcctagacagggtggcggctgggcagaagctgtaattttagcactttgggaggccaaggcaggcagctgggaggtggaggttgtagcgagccgagatcatgccactgcactccagcctgggcaacattgagcattgagtgagcgagactccctctgcaatcccagcac

SEQ ID NO: 12839 - DNA, 1703 bp, Artificial sequence
  DNA replication origin
cagtccccccactaactaccggcgctggccgcgcgccaggccagccgcgaggccaccgcccgaccctccactccttcccgcagctcccggcgcggggtccggcgagaaggggaggggaggggagcggagaaccgggcccccgggacgcgtgtggcatctgaagcaccaccagcgagcgagagctagagagaaggaaagccaccgacttcaccgcctccgagctgctccgggtcgcgggtctgcagcgtctccggccctccgcgcctacagctcaagccacatccgaagggggagggagccgggagctgcgcgcggggccgccggggggaggggtggcaccgcccacgccgggcggccacgaagggcggggcagcgggcgcgcgcccggcggggggaggggccgcgcgccgcgcccgctgggaattggggccctagggggagggcggaggcgccgacgaccgcggcacttaccgttcgcggcgtggcgcccggtggtccccaaggggagggaagggggaggcggggcgaggacagtgaccggagtctcctcagcggtggcttttctgcttggcagcctcagcggctggcgccaaaaccggactccgcccacttcctcgcccctgcggtgcgagggtgtggaatcctccagacgctgggggagggggagttgggagcttaaaaactagtacccctttgggaccactttcagcagcgaactctcctgtacaccaggggtcagttccacagacgcgggccaggggtgggtcattgcggcgtgaacaataatttgactagaagttgattcgggtgtttccggaaggggccgagtcaatccgccgagttggggcacggaaaacaaaaagggaaggctactaagatttttctggcgggggttatcattggcgtaactgcagggaccacctcccgggttgagggggctggatctccaggctgcggattaagcccctcccgtcggcgttaatttcaaactgcgcgaccgtttctcacctgccttgcgccaaggcagggggcgggaccctattccaagaggtagtaactagcaggactctagccttccgcaattcattgagcgcatttacggaagtaacgtcgggtactgtctctggccgcaagggtgggaggagtacgcatttggcgtaaggtggggcgtagagccttcccgccattggcggcggatagggcgtttacgcgacggcctgacgtagcggaagacgcgttagtgggggggaaggttctagaaaagcggcggcagcggctctagcggcagtagcagcagcgccgggtcccgtgcggaggtgctcctcgcagagttgtttctcgagcagcggcagttctcactacagcgccaggacgagtccggttcgtgttcgtccgcggagatctctctcatctcgctcggctgcgggaaatcgggctgaagcgactgagtccgcgatggaggtaacgggtttgaaatcaatgagttattgaaaagggcatggcgaggccgttggcgcctcagtggaagtcggccagccgcctccgtgggagagaggcaggaaatcggaccaattcagtagcagtggggcttaaggtttatgaacggggtcttgagcggaggcctgagcgtacaaacagcttccccaccctcagcctcccggcgccatttcccttcactgggggtgggggatggggagctttca

SEQ ID NO: 12840 - DNA, 965 bp, Artificial sequence
  DNA replication origin
ggggcatccgttccagggcaccgtcagtcttcagcagcaaggccaatgagatccaagtaggccagctcaggaagggatgggggcggtcctcgcaggggctgctcacagtccgacttccagtggggtcctccgcagagggggcatggcctggtgggcttacctggctttgggcattgtctggaccagtggccttcattgccgcacttgaaacaggcaccaggtggaggtggagtgttaggaggcttccgtgcggagctgccgccccgtgggcctgcagggctcctgatggcggaggcaagcatttgaaactctgccggtttttgccttttacttttctcatcacgattgttaaagactttgatggctaaattaagaaggtctctttgtggggtttgagggccgtcatcaagcttctgaagcttgcgccgaatatcggggtggattgggagatgaaccgaaggtttaagctagtgtttcctgctgagggtttgaagggagaaggggggttgtgttaacaggcagtggaggatagataggggcgtaaggtggcgggatgggtttacaagcctcaggagagggcagttgtggacgagaatacgtgcaagcaatactagaattgtcctgaggggggatggtgtaggaaaagaagtggatacagctgactgggaagatggcggctgggaagatggcaactgagaagacaatgaggaggctttcggggttaaagaaggcagttgagaggaaaaggtaggggctgggaggggtggacagcagtcagctggattaaacgaggaaaaagaggtaggcttgggaggagaaaggcgatctgggccatgggaatgaaggaggaggatttgaacagttgagcaagaaccgcagaggtcgggttgtgatctgagtgcaaaaaggcctggacataaggaatttcttcccatttctccagtcgtcggcaataagtacttaaa

SEQ ID NO: 12841 - DNA, 985 bp, Artificial sequence
  DNA replication origin
gttcgcggggtaagagctaggcctagataggtgacttgagggggtgtatatttgtgctttttaaggggagacctgatacccccgttctgccaagaagtttaaaagagatggtatgggcgttgcagtctctttgagaggggctacacaggagtagattattaacatattgaaggagagtggactgtttagaaataaggtacagaggttgcgagcaagggcctgtccaaaaagttgggggctgtctctgaaaccttgaggtagtacgcaccaggtgagctgacgtgaaaggtgggtgccagggttttcccacacaaaggcaaagaggttttgggaattagggtgtaaaggaattgtgaaaaaaaagcatcctttaggtttagaacagaaaaatgggtagtattggagggaattgtggaaagtaaagtatatgggttcgacatactgggagtacagcttggttaatgagcctgaggtcctggactaaacgataagttccatttggctttttaacaggtagaattggtgtgttaaaaggagagtctgttgggcggagtaggtgactggcgaggaggtgagaaatgataggctgtaggcctacgagagctgcttgggggatgggatactgcttctgtgataggaactgggtgggctctttaagggtaatgcggatgggggtatggtgttctgcgactgagggtgtggaagtatcccaaacagcagggttaactatggatggaggacaaggaaaggctgcacgttttagggtgggaggttgaaagggtagaagaaagctagaagtactggaggggtctgggtggatggattgggtactgtggggaatgtggaagtggagagtagtgtggagttttgaaaggatatttctgcctaggagcggagttgggcatgagggcaggactaagaaagagtgagtgaaggaaaaagtgtgcagggagcagaaaagtggaggggtggctcggggtttgga

SEQ ID NO: 12842 - DNA, 1326 bp, Artificial sequence
  DNA replication origin
ttcccccctttctattccacaaaaccgccattgtcatcctggcccgttctcaatgagctgttgggtacacctcccagacggggtggtggccgggcagaggggatcctcacttcccagtaggggcggccgggcagaggcgcccctcacctcccggacggggcggctggccgggcaggggctgacccccccacctccctccggacggggcggctggccgggcaggggctgacccccccacctccctcccggacggggcggctggccgggtggggggctgacccccccacctccctcccagacggggcggctggccgggcagaggggctcctcacttcccagtagggacggccaggcagaggcgcccctcacctcccggacggggcggctggcccggcagggggctgacccccccacctccctcccggacggggcggctggccgggcagaggggctcctcacttcccagtaggggcggctgccgggcggggaggctcctcacttctcagacggggcggctgtgggcggaggggctcctcacttctcagacgggtcagttgccagtcagagggtctcctcacttctcagatggggcggccgggtagagacgctcttcccctcccagacggggtcgcagccgggcagaggtgctcctcacatcccagacggggcggcggggcagaggcgctccccacatctcagaagatgggcggccgggcagagacgctcctcacttcctagatgtgatggcggccgggaagaggcgctcctcacttcctagatgggatggcggccgggcagagatgctcctcactttccagactgggcagccaggcagaggggctcctcacatcccagacgatgggtggccaggcagagacgctcctcacttcccagacggggtggcggccgggcagaggctgcaatctcggcactttgggaggccaaggcaggcggctgggaggtggagtttgtagcgagtggagatcacgccactgcactccagcctgggcaccattgagcactgagtgaacaagactccgtctgcaatcccggcacctcgggaggccgaggctggcggatcactcgcggttaggagctggagaccggcccggccaacacagcgaaaccccgtctccaccaaaaaaatacgaaaaccagtcaggcgtagcagtgcgcgcctgcaatcgcaggcactgggcaggctgaggcaggataatcaggcagggaggctgcagtgagccgagatggcagcagtacagtccagcttcggctcggcatcagagggagaccgtggaaagagggagaggggagaccgtggaaagggga

SEQ ID NO: 12843 - DNA, 989 bp, Artificial sequence
  DNA replication origin
tacccggccgccccatctgagaagtgaggagaccctctgactggcaactgacccgtctgagaagtgaggagcccctccgcccacagccgccccgtctgagaagtgaggagcctccccgcccggcagccgcccctactgggaagtgaggagcccctctgcccggccagccgccccgtccgggagggaggtgggggggtcagccccctgccgggccagccgccccgtccgggaggtgaggggcgcctctgcctggccgtccctactgggaagtgaggagcccctctgcccggccagccgccccgtctgggagggaggtgggggggtcagccccccacccggccagccgccccgtccgggagggaggtgggggggtcagcccctgcccggccagccgccccgtccggagggaggtgggggggtcagcccctgcccggccagccgccccgtccgggaggtgaggggcgcctctgcccggccgcccctactgggaagtgaggatcccctctgcccggccaccaccccgtctgggaggtgtacccaacagctcattgagaacgggccaggatgacaatggcggttttgtggaatagaaaggggggaaaggtggggaaaagattgagaaatcggatggttgccgtgtctgtgtagaaagaagtagacatgggagacttttcattttgttctgtactaagaaaaattcttctgccttgggatcctgttgatctgtgaccttacccccaaccctgtgctctctgaaacatgtgctgtgtccactcagggttaaatggattaagggcggtgcaagatgtgctttgttaaacagatgcctgaaggcagcatgctcgttaagagtcatcaccactccctaatctcaagtacccagggacacaaacacagcggaaggccgcagggtcctctgcctaggaaaaccagagacctttgttcacttgttgatctgctgaccttccctccactattgtcctatgacc

SEQ ID NO: 12844 - DNA, 997 bp, Artificial sequence
  DNA replication origin
gtgcgctcctgggcgctcgccgccgccgctgccgccgcgcgcctttgagtcagcaaactccgcggcccgcaagcccggctcggcccggccctgctctgttctgcccggaggagccgcccgtaagtgacaagagacccgctgagggggcctcccctgcaccgcccaggtggggacggcggcccttctttccagaggcgcgggcccttcccgctgttcccaggtgcccgcacccttgcgggctggaaagaggtttgggtcccttgggcttggagcagaggagccgcctccttttcagccgaggtgtgccgggcagggagaaatgatcagcgcggtagagcggggagatggagcgcgtcgatccagggattcttggctaaaaagacaccccggggagagggtggggcagaggtggattctagattacggaagaagtgctgtggcaccttacaccaggccgggtagaagggggtggggaggtggtttttaaaatttatttatttatttttttattcattcattaacgggtagccttgagttgaggaattgggaggggtaggcaggtttattcgtgggattgtgggattgagggagaaggcccaggggaaaatccatataattgactgattatcagatttggtgaccaggaaagcaacagcctgtttttcagttccgatgcatcatacttttctcaaattacacggattattgagggggatcgtcacggaatggggagcaacatgtcctgctgaaaggaagggcttctatctctacaagacacgttaaaaatgatggtatcagaaaattagaacggggaggaggcttgcacatgatctccatcaaacctttcattttacagacagggaggctaaggccgagggacgctgagtgttgggaccaggatcattcagccagatgggagcagaaccaggcctacaacctggcaggcttctgacttccaccccggagttatgtccacctctggggcctgggaactggg

SEQ ID NO: 12845 - DNA, 749 bp, Artificial sequence
  DNA replication origin
gggagatgggaagggtgggtcagggctctagtggtttcattcaagtggaacagccgattgggtgagaatgaggaagtgcgatcaggaagggcaggccctggtggtcagagggaacttctagccttacatttcatggccagggctgtggccacatgggggttggtaagcagagggttaggtaacaggaatgaaggaggtaggctaaggcaagagcccggaatgttagggctttactcatgatcaaggccctccttgtaggaggtcagaaaaagtggggaagtcagtgtggaggggtcggcaaagccacaggcatgaggagcaggaagctggagagaagcaggtcttgctaggaaatgagggggaggaggttggtcacattcctaggttctaggtacttcttggtaggttattgtctggagataacagtgaccaggacaatttgggttctgctggtcctgggatagaggggagcacatgaggattgagcagccggtacttgggagagttaccagggaggggcgggtggagaagccggggtgcagctaagatgaagctgctgagatgggtgtgaattggggcatttgcagccctggcatgagttcccgaggcatagtggaaggaagggttagaagaggagagggcagaggaaggacggagtcagatccaggtagagatgagagaaccccagaggatggatgttgcttggaggcccttcagcctgggcagacattgtggctcataggaggagg

SEQ ID NO: 12846 - DNA, 879 bp, Artificial sequence
  DNA replication origin
ttgtctcgtttcaaaaaggagttaactttaaatatgtccctgaataaacacgaggcagcatgactccatcgcaggtagagataggactaaaacatgattctcctaaactttaaccctggagttagctcacttaatcctgtaaatctctgcaaagactaactttgttccctggctcctccgtggttgccaggtggtggatatacattctacaacagaagaaactggaatcgctagaggtgtctttttttagggcaaggaagcatttcccagaaaaccccaacagatgtcccctggcttggccttggccaggactggtcacatgctcttttctaagccagtgcctgggcaagggaaggggttggtcataacggatttagactacttaggatttacttctgggccaaggagagggagggggtgagggagggggtgagggagggggtgagggagggggtgagggtgggggcggggggctggcccggcctaagatggctgggggtgatgcgttcgggggacaaaggagtgctggacagttgtgtgagctgtaagaaggacccggaaaatactgcagagtgattgagagtgtagaggggcctgggttctcacctgtgctccctcccaccttagctgggttatgctgggaacctttcaaggctttgctaagcctgggtttccaggagtgcaataagatcgctgtgataaacatgtaggtaaagcagttggcatagtaccttgcgtagaatagtcctcagcatatgtttactactgtcgttgttgctattaataaaagtgacctagctcctctcctcgagaagttcacaaggggcccaaatgtgacagggggagctatcagaaggcgggaggtgacttcttgccagg

SEQ ID NO: 12847 - DNA, 1154 bp, Artificial sequence
  DNA replication origin
aaatcaacaagtaaaacctggtttaacagacagcaataagctgaatggagaaaagtaaagtacaataagcgagcttgagggctgatgcagatgtgttttgtatagggttgtcagggaaggcttcactaatatggcgacaccaagcaggatctaaaggaacagaaggagcaaggcatgtaactattgggaaattgtatttcagcagaaggaacagtaagtgcaaagatcacaaggcagggtgtgcgtggtgtgtttgaggcacagcaaggggccagtgtgtctgagcaaaaggaaagagggagaagacaggaggaaatgggtcagagcggtagctggggccggagaccatagggctttaggccttgtgagaatgatggcttttatgctgaggttgtcagggaaatcataagaagtacagcatttgagtggagcaacgacatgatctgacttttattttaaaagagttgctctgctgctgtgttaagaatagcctgtactgggacaagggtggaggcatagaggccagttaggaggctgttgcagccagcctggcgagggatggtcgtttggagcagggagatggcagtggaggtggtgaggagtagtcagagtctggataatttgaaaatagagtcagttgggtttgctggtggattgcaatatggagtatgccaggggccaagaaggagtaagcttgcatttctgagcaaagggtaggaggagctgacattggttgagagggctgctgcaggtgcaggcctgggtgcatgggtatttatgttgggatgggaagtggggctggaatcaggaggtcaggtttggaactactaagtttgggatgcctattgacatccaagtagtgatctctctggaatctggggcagtggtctaggctggagatataaatttgggacttgttagcaaatagatggtgtttatagccatgagactgggtgagatcaactggggatataatttggagggaaaagaggaccgagaactcagccctgggcactgtaatttttagaggctgaaaaaatgagaaggaaacagttggagatagagaaggagcaaagtccagggaacccagtgaagaaaagactgagagttcaatccatatgaggatggaagcttggccactgcatttacaacac

SEQ ID NO: 12848 - DNA, 1244 bp, Artificial sequence
  DNA replication origin
ctccctcccggacggagcggctggccgggcagggggctgatccccccacctccctcccggacggggtggctggccgggtggggggctgacccccccacctccctcccggacggggcggctggccaggcagaggggttcctcacttcccagtaggggcggccgggcagaggcgcccctcgcctcccagaaggggcagctggccgggcgggggggctgacccccccacctccctcccagacggggtggctggccgggcagggggctgacccccccacctccctccctgacggggcggctggccgggcagaggggctcctcacttcccagtagaggcggcagggcagaggcgcccctcacctcccggatggggcggctggccgggcggggggctgacccccccacctccctcctggacggggcggctggtctggcgggggctgacccccacctccctcccggacggggtggctgctgggcggagacgctcctcacttcccagacggggtgactgccgggcggaggggctcctcacttctcagatgggcggttgccaggcggagggtctcctcacttctcagacggggcggccgggcagagacgctcctcacctcccagacggggtcgcggccgggtagaggcgctcctcacatcccaggcggggcggcggggcagaggctctccccacatctcagacgatgggcggccgggcagagacgctcctcacttcctagatgggatggcgaccgggaagaggcgctcgtcacttcctagatgggatggcggccgggcagagacgctcctcactttccagactgggcagccaggcagaggggctcctcacgtcccaggtgatgggcggccaggcagagacgctcctcccttcccagacggggtggcggccgggcagaggctgcaatctcggcactttgggaggccaaggcaggcggctgggaggtggaggttgtagcgagccgagatcacgccactgcactccagcctgggcaccattgagcattgagtgaaccagactccgtctgcaatcccggcaccccgggaggccgaggctggcggatcactcgcggctaggagctggagaccagcccggccaacacagcgaaaccccgtctccaccaaaaaaatacgaaaaccagtgaggcgtggcgtcgcgtgcctgcaattgcaggcactgggcaggctgaggcaggagaatcaggcagggaggttgcagtgagccgagatggcag

SEQ ID NO: 12849 - DNA, 855 bp, Artificial sequence
  DNA replication origin
cagccaccccgtctgggagggaggtgggggggtcagcccccccgcccggccagctgccccttctgggaggcgaggggcgcctctgcccggccgcccctactgggaagtgaggaacccctctgcctggccagccgccccgtccgggagggaggtgggggggtcagccccccacccggccagccaccccgtccgggagggaggtggggggatcagccccctgcccggccagccgctccgtccgggagggaggtggggggggtcagcccgccgcccggccagctgccccgtccgggaggtgaggggtgcctctgcccggccgcccctactgggaagtgaggagcccctctgcccggccagccgcccgtccgggagggaggtgggggggtcagccccctgcccggccagccgccccatccgggaggtgaggggcgcctctgcccagccgcccctactgggaagtgaggagcccctctgcccggccaccaccccgtctgggaggtgtacccaacagctcattgagaacgggccatgatgacaatggcggttttgtggaatagaaagggggaaaggtggggaaaagattgaggaatcggatggttgctgtgtctgtgtagaaagaggtagacatgggagacttttcattttgttctgtactaagaaaaattcttatcctgttgatctgtgaccttacccccaaccctgtgctctctgaatcatgtgctgtgtccactcagggttaaatggattaagggcggtgcaagatgtgctttgttaaacagatgcttgaaggcagcatgctcattaagagtcatcaccactccctaatctcaagtacccagggacacaaacacggcg

SEQ ID NO: 12850 - DNA, 799 bp, Artificial sequence
  DNA replication origin
ggaatggagggggaagagcgcagagggctggctgggaggaactcgggtgggcgtgaaggagacgagggcaagaaaagaaacttcccttcttccaggagggtcttcgaaaccctctccccacagcccctctcgtcattagcatggcaatgaggagtttctgtaattcgacttggaggggcggatgagccctggaaactcagagctcgccggaaaaggccgggggcggccgggctcttcttccccaccttccctctctcgtcgctctccgcccctttctctttcccactcagttttgcaccgggagccctccgggatgcggagctactcgaccgccggatttttaggggtaggaggcgggggagagagatgacgctggcggacgtggccagcgcgggggccgggcggtgcgctgcaggccatctgccggcgccctgagacccaggagcctccgcgctcccgcgtgggcctcacagggccggtccacagctccaacatagtagctgaactcccttcgttgcgttcctctttttctggaggggaatgttagaagagagagagagcttccttttataaccttcctcattctgctgcacgtctagagtgggtgtgggggctggcaggtgggaggggcggtggacaaatggctgatggtggacgggacactttaccccaacgacacctcctcccctttccaactggctgtgtagttgcttatgagaaccttcaagtccttccctagagagacacatgcaaatctgagcctcatcccaggccaggggtcctgttcctcatcacccta

SEQ ID NO: 12851 - DNA, 1514 bp, Artificial sequence
  DNA replication origin
ccaaaagagggaactttttctctgagggggctccaaggagaaggccatgaattacgaatttgagcgagagattggttttatcaatagccagccgtcgctcgctgagtgcctgacatcttttccccctgtcgctgatacatttcaaagttcatcaatcaagacctcgacgctttcacactcgacactgattcctcctccttttgagcagaccattcccagcctgaaccccggcagtcaccctcgccacggcgctggcggccgccccaagccgagccccgcgggcagccgcggcagcccggtgcccgccggcgccctgcagccgcccgagtacccctggatgaaggagaagaaggcggccaagaaaaccgcacttctgccggccgccgccgccgccgccaccgccgcagccaccggccctgcttgcctcagccacaaaggtcagtccaaagacttggccccaggtctctgggaccctcttccttctccgggctgccccgagagtggctgtggggggaggggagagtgggctgggagagaaggaggagagggagagatgcttggttgccttgtccctgcccctgtgggttcaggagtgggtttgatggagaggaaaggggatcctgcgctctacaatgagacatatatatttttaggaagtggggggaaactttcccgaacttgtgtaatgtgggatgatttatttgagttggaactgacctcctcctgtctagttgtcctagagtttggctttttgacagtaatgaagagtgatagatcgctcttgctcagctaagcagctgacgcattaattataaattgtgttgtggctaatataaagtttgctcccggatgaagaggttggggggagccacaggcatgaattcgatagagatggaggagacggggtctgcccaggctgggctcccaggaaaggcagcacaatagctctactgcatccaggggcggccattttgttgcagttgatcttttctgctatatttattctccagtggaataaccccgctcggacccctccacctccaactgtgcgtgtgtctcttgttggtttccctttccgcagaatccctggaaatcgccgatggcagcggcgggggatcgcggcgcctgagaactgcttacaccaacacacagcttctagagctggaaaaagaatttcatttcaacaagtacctttgcagaccccgaagggtggagattgcagcgctgctggatttgactgagagacaagtgaaagtgtggtttcagaaccggaggatgaagcacaagaggcagacccagtgcaaggaaaaccaaaacagcgaagggaaatgtaaaagccttgaggactccgagaaagtagaggaggacgaggaagagaagacgctctttgagcaagcccttagcgtctctggggcccttctggagagggaaggctacacttttcagcaaaatgccctctctcagcagcaggctcccaatggacacaatggcgactcccaaagtttcccagtctc

SEQ ID NO: 12852 - DNA, 1216 bp, Artificial sequence
  DNA replication origin
tgaaatgtgggaaacctaatgtacacactcatttccctcccacactgtctgacaataattaggcagtagcttcaactggccacttttttctctctacccagaggagatgggcagactggaaacctcaaactggaaggccttctctgcccaaagaagagatcccattgaaggtatttctggtggggaggcctaggcccttcatgctaggtcctattctttagggttccctatgtcatcaagcagccagccccagcttttgtccactaatcttgtacccttctgtcttccctggccccccagatcctagctctggaagtcccagatgctcaggctcagagcagggcactggcaactggagaaggcaggggcaaaggtaaccaaaatgctaggaagcctaaagcctggggcctttcctctactggagcccgctttcaggaggcccatgtggttcccattaggatgataagtctgcatccccctcccccaggagatctttggctgctttcattgtactaagtctgagtagggtcttcccagaggtaaggcagccactccatctgctggagcaaaaattggctctgattataggcaaagcattgattctgtcttggagggtgattaggcctgtttttattctgccacatttcagtaaggggaggatgtcactgtttcattagaagagctgtgctaaaaagatagacagtggagctcaggttgtttctgcacagaggtcctaactccaagagtggagcaagaagagattccaactgcactagaccctacttgcccttggagaagtccagagggactcccagcaggtctctggtgttttccagcctacagaggcctatcacctccctaagttgcaaagactatgaaaacctttttggtgggcagtggtgtgggagcagtgaattccagacatgctccatcgctcctaggctgtgctggatgtcgtgggcagtagcttggggaccaggagccaggccagaggaccctcttccagaaggcactcctttacctgagctggagctgctggttttctgctttgtgttttgtcgagactctttcatccaggggaagatttgtttggccactgtgggtgagttgagcagggggctcttggccgcgttggcaggggtagggttgttgctggcattctgaggaggggaggcagaagagggaggcgggggcgcggcaggggtaggtgcagggg

SEQ ID NO: 12853 - DNA, 967 bp, Artificial sequence
  DNA replication origin
tggtctcccctcccgcccgccccaacaccccccaccgcacccccggaccagacgctgctccgcgtgtaatattcataagaaacatacccaagtcggtgccactagcccaggcagagcccggcgccgcactagcgcttatctccgggccgcggctgctgccctcgggaagggcagggggcgggggtgtgggggaggggtgggtgggtggggtgggtgggaggggggtccaagccgccccagtcggccctgggcgagccgtgctggagcagcgaggcggccacgctctgcgcggcggtgaccgggcctcggggtctccagcccgcctgccatctcggctgatgctgagggtccgtgcccatcccgcgccgaggggacccggccgggccgccaagccaggccgggggccagagcccgtgtcggagcctgagcccgagcctgcgctcgtcagaagttaaggtaagcagggccgcaaccggccgctcccggcgctgaatggcggagtttacgtctcggtgatttatggctgcagacttaaatctcggttcaagaagagttcacaagccggagcttccttcccggcagtgactgatacccttacacttcgagttcaggccgctttcccatccccgcccccacctcttgcctctcccctagcccagccttaacttttctgggttgcagagggaaggagaggtgggcaggggactcggggctcctatccgacgaacccgctcagatttggggtgagggaaggctaagaaagaggagggaatgggaagagggagcgatgtctgaaggacggaggttgaatttgggcacatcttccagagagacaatagggcttgcttcttgcactcaatttagcctcttcaactctctttcggctcttgcacctggggattattgtccagaaacagatctttgtggaggaatctcccctcatccccagcccttgcttggcggtaca

SEQ ID NO: 12854 - DNA, 1203 bp, Artificial sequence
  DNA replication origin
ggttgcggccctgcttaccttaacttctgacgagcgcaggctcgggctcaggctccgacacgggctctggcccccggcctggcttggcggcccggccgggtcccctcggcgcgggatgggcacggaccctcagcatcagccgagatggcaggcgggctggagaccccgaggcccggtcaccgccgcgcagagcgtggccgcctcgctgctccagcacggctcgcccagggccgactggggcggcttggacccccctcccacccaccccacccacccacccctcccccacacccccgccccctgcccttcccgagggcagcagccgcggcccggagataagcgctagtgcggcgccgggctctgcctgggctagtggcaccgacttgggtatgtttcttatgaatattacacgcggagcagcgtctggtccgggggtgcggtggggggtgttggggcgggcgggaggggagaccaaggcggctggggaagcgcgggctggtgtgggggatggggctgaggcgaggggagggaccggagggagaaggggagctcggcggtggcgggaggagggcagcctccccccaccccccaacgccctccctctcctgctcccaggcgtcacgaaagtccaggaaaattatgctaatgaggacaaacggctctcacaaaggggctctcttgctgggctctatttcttaggaattcgtttgagaaacttcgtattcctctgccctggacacttccaattgtggggtgaggggaaagagaaccaagaaaagtgagtttcccagactttgcccagtttacttcacctgcaactcccaaacagatctttgggtgggggtgtggggagctgggataaggcttttctctagagaccctcaagagccaactgggctctctttggttaaattttcaggcagaaactgctgacatcctagcagccaggagaaaaatgtcctgggagagacaggtacttgttccagcagtgaaatgggatgctctgggctcaggtacaaacaagggtgtttagaaacgcggatctccagggctcatgtgcccatttcagagtgcagacacgcagctcacccacagggaagacagagaaagctctgaccccaagagaaaccgacatcatacacacacacacacacacacacacgcagggcagaggaatatgtggtttctcaaacggattcctaa

SEQ ID NO: 12855 - DNA, 1034 bp, Artificial sequence
  DNA replication origin
acaactgttctctcttgggtggcaaccagcacagactcttaaccggataatgtcttctttttgattattcttttcaccaatttgggtttgttttggtgtctattatggtccagatggggaggggtggatgaggaacggagcaggagaagagaagagaaaagcaggtaagggatagaaactggttaagatctctagaagattatatggaggagggaacgggtgtggaggtgctcgggtgggggtggggatggaggtgtgggctctgagtttgtgctttccctggtgggccggcagaggccgaggccgaattggaggatcgcatcttggtgttgggcagtttgtggtctttcttccacttcatcctccggttctgaaaccagatcttgacctggcgctcagacaaacagagcgtgtgggcgatctcgatgcggcgccgccgggtcaggtatcgattgaagtggaactccttctccagctccaagacctgctgccgggtgtaggcggttcgagagcgcttaggctcccctccgttataactggggttaactgaaaacccagaaccccgaaatagaaggccaaggaggagggagcggaagagagggaaaggaggaggagagagaaggtggggtggggaagagcaattggacatcatcattatataataacctgacaccaagttcacgcaagatacataaaacggcaaagaaaatgtttcacaggctattgacaacgggaaacacccgagagccataaagaatggtgctgggcattggggctgaagaaaagcttcaaagacacatggcctgaagcctctgccagggcaattaaatttatgggggctataattactgccctaacagtttggcgtctcgtaaatctcctgataaagggaccctgggtacaaaagggttctcatgttgggatcaggcggctggctggcgcgcacatacccacatctcaccgcagcccgggtcagatgggggctcccctcccgaggcccccttcccctgagcctctccctcctgaccccgacc

SEQ ID NO: 12856 - DNA, 884 bp, Artificial sequence
  DNA replication origin
gcgtagtaggaggcagtgggctctcggccgccgcccgcgtgagggagctggggctgctgcagcggcaggtgctgggtcgggggcgctgggggctgctggtagccggggcccccgcccgggccgccgtctgcgccgcccgagccgctgtgctgcgcgtactcctcgaagggagggaacttgggctcgatgtagttggagtttatcaaaaacgagctcatggtcattaatttgtgaagtgcaaaaatactaatttttctcgcgttgtcgttttttctgggcttgccgaggcccctccccctcctgcctcgcttcccatccccctttcctctgcgcccttcccctccccccgctgtcaagtgcccactcctccccctcccgcagacgccgccaccaaagttcgagccgctcctccccagcccagcgcgcgccccgccccgtgccccacgtgcagcgcccccaccaatgggcgcaccgcgcgcgcggacccggatcaggaaacgcgcgggtgcgtgatggatgctgctgtccggcccctgggctgggggagggagcaggagctttggaccccagccccccagctttggttcccgctgggaattcaggccctgtcaggctgtaggtcctctcgggagccctctgcctgccctactgctggcctaggcctcgggctgtctggcggccgcgactcagcgctgacctcgggcgcaacccagtcaggcttcgtgtccttcaggggttctaggctaacaggcgaaaggaagggcgttgggaccgaggggcatcctggtttttatgtacgccactgagaggccaccagacacattttctcaaccgcagatcccccttccccacaccctgctccttgcgtgtcagcctgagagccc

SEQ ID NO: 12857 - DNA, 1282 bp, Artificial sequence
  DNA replication origin
tctgttccaaaatgccgagccgacttcttgctcctttgctcccaactcacagagaagcggctacggggcgggcgccggcgccttcgcctcgaccgttccgggcttatacaatgtcaacagccccctttatcagagcccctttgcgtccggctacggcctgggcgccgacgcctacggcaacctgccctgcgcctcctacgaccaaaacatccccgggctctgcagtgacctcgccaaaggcgcctgcgacaagacggacgagggcgcgctgcatggcgcggctgaggccaatttccgcatctacccctggatgcggtcttcaggtaggcgcagtcgctaggcgggccaggctggcggagcgggaccgggagcggggagcgcagcgctggggagcgcggagcgcggggcgcggggccggaagagcggagccaggctgttgcgagccggtagccccgtgactcccggcgcagcctttctggttttaattggagcggaggcgccattgcgtggagcccatagcattgtatgtaaatgaggctcataaaactttttatggcccaattaatgggttcgatcctcgtaaatttatttaactccatttgtcttggaattttaacattaagtttgttcgctattctgtctctctttctccctcctctgtcaccctccctccctttcttcttctctctctcctcattttccttgctgcctgacatttctttctcaaaagctaggagagccaagccctccagggcctctcacccgaccctgtgccagggtccatttcaagatgggggcgagggaatgaggacagagggtcggggtgccctaggaaggtcctggggatgagggctcaggctgctgggaagagtcgcccacttgcctagcaaggcaggggaatggccgggctcatctttgaatggcaaaagtgcagcgtttcccacttgctcacactctatatttacagttttcctttgtcagaggaagcaggacattgtggaagcttagccggctggaaaggtcggttgtaaagttgagattctgtgcctttgctcattacagagctgcctgcgcgtctggcactgcagttggggtctttccctaacactccccctcctcccctagctcagttcggggcctggggcagagggggatgctcgctggggactaggccaggaggaaggtgcgggctctgggacagcagcctaacgagtgccctgtctacttgtctgtccttgtgttcatgtgtctgcatgtctgttctcaggacctgacaggaagc

SEQ ID NO: 12858 - DNA, 1347 bp, Artificial sequence
  DNA replication origin
gtcctcgctggaagcctctcgagttggggccaggagccagaagttggtgtttgggacgcctcagatagggccccaagtctggagagcagtgaagagcggcccgcagggctacgggagaggaggcggctgctgcagcgagagggggcggggcgggcacttcgggacgagccaagactggccgcccctctccttggctgcccaggcccaggaccgagatactttgggccgttcttcgaaagcagtgcagcccagagagccttttgtacaactagattgtccgtgagcggcggcagccagggcagccggagctgggacgctgggggagacggccgattccttccacttcttgccttcggccagtggcggcgtaaatcctgccaagatgaggctgcgggcgacccgggccacaagggtccccatgacagattattcaaataagccacagacgtgatcagcggccttagggcgccctgacggcttgcccagctccgaaggccttccaggaaggttaaataaggagtggggggcgtagagggacaggttgggaaagaaagacgaagtcagtgaacgggacagaggaatcctaatcttgctacagaacacaaggcagcatgctttccctctgcgtggcaaggagacctgtttccaaatttcattctatacagcgttttgagagtgggaggaaggagaagggggacaagaggacagagtaggagaaaggaaggtctcggaggggagggcgagccaaagttttactgcgtgcaattttaagtgactgtctgtgcgtctgtctgccagggttccattgtgtccgaggcctgactgcctttcctaaccagttcagcagagttctgcacttcggccagagaccccatgcaggaggctcatttgccccagcgggatgtgcgtcttctgctcctaaacccagtgtttctcttccccgcagataacccagcagccaactggcttcatgcgcgctccactcggaaaaagcggtgcccctatacaaaacaccagaccctggaactggagaaagagtttctgttcaacatgtacctcaccagggaccgcaggtacgaggtggctcgactgctcaacctcaccgagaggcaggtcaagatctggttccagaaccgcaggatgaaaatgaagaaaatcaacaaagaccgagcaaaagacgagtgatgccatttgggcttatttagaaaaaagggtaagctagagagaaaaagaaagaactgtccgtcccccttccgccttctcccttctctcacccccaccctagcctccaccatccccgcacaaagcggctctaaacctcaggccacatcttttccaaggcaaacc

SEQ ID NO: 12859 - DNA, 1100 bp, Artificial sequence
  DNA replication origin
caccccattcccttcaactcctccctgccattttctggaccagggcattggatttatttcagagatcacagtttcagaaatctcagtcgagaaggggccgctttaaattatactcatttattatttctttatgcatacgcaatctctttcacttcgaaaataaaagcagacaaaaaagtcagactattctggctccaaacctttgggctgaaggaagacaatatttggttttctgatttttctccgctttctaggcaccagtaacatctgcttaacactcaacgcctgctaattgttcagtaactctcttattttggggctaaggctgtttaaaggaacagcttttttacttaaaaaatactgaaataatcagtgtcttctcaggcataaaacgtggaaaaggcatccagacatgcccagcccatttgcagacacttaaaattgggagccagggtttcctccagggttaattttttaaatgaaaatctcagaggcctggcggactgcggggtatttaggacacggtggactgtggtgggggtgggcatgacctagaggaatttatggggcaaggaaaatattagggggagggagatgaggcggacaggacggggccatttcggagttcattgtgtcggccacttccctcttccaggcgcgggtgcaggaaggggcacccagtcggtatccgcgcggcttggcagcctcgctggtatttgggagtcccagccggaagtgtgtcagggtgtttgagggggggattactggaactgctggtgaggatgaaggcaaaagagagagagagagatggaagcgcccgaggccgccagcctcgccgccagggaagtgggctaatgaaaaacacactgttgcaggcacagtatccacacgtgaatttgattacccctgttctaggagtcgctgctttctgttaggaattgggggcagggggagtttccttccaattaacggagtggcggcgaccttttaatttacccccaacgggtgagaaataaacttccccaacgtggccaggcccaggaatgggactggagtcgatgcccttttacccctccccgttctaatttccagccctggcc

SEQ ID NO: 12860 - DNA, 803 bp, Artificial sequence
  DNA replication origin
tatttaaatattacctagacggtcgtaatttgtctgggccctatagccctggtgccgtaaggtttgtcggcttttgttcagttttatggcttgctagtatatctggattgtggctgtcttggaccagtgatttcagttgagaggggagctacatagacagaggaagccaaacaggatttctttcgggagccccagggaggcttgcagaggccggttattttgcgggtgtctgggtcacagatgaccctcaatctgaatcggggagcaggcctggcccacagcgcatctctagccgctggaggcagcggttaggtggacccgggctggactgcatgggggcctccccctcccccagtacggcctcccccacctggcggcactccttagggccacgcgtttcctgcttgccagagtggggggggcgggggctaaggggagggggcgcaggagcgcgcgccccggcgggcgggcagctaggagggagagggggagagcgagaggcgggaggccggggccagacagggagccgggatctgtaccgtccctggcgctttcgagccttccacggctaccgcctcttggcgccggctcgctgggctgcaagatttgggaaagcggcgcgcacactgcttctcggagctgctctcgtctcgcctgctccccgcctttattcctctctccctgcctttcctccctctcttttcctccctctccctcccaggaataccttactggggcctgtggcttccccttccttgacgcatttgcggccgcctggggcactctgttgcactggcgggcgc

SEQ ID NO: 12861 - DNA, 1163 bp, Artificial sequence
  DNA replication origin
cgccgctgccgccgccgccaaggagagaaccctgccatcgcgcctggcccggcccagcccagcccctaggcaacctgcgcccgccagtgcaacagagtgccccaggcggccgcaaatgcgtcaaggaaggggaagccacaggccccagtaaggtattcctgggagggagagggaggaaaagagagggaggaaaggcagggagagaggaataaaggcggggagcaggcgagacgagagcagctccgagaagcagtgtgcgcgccgctttcccaaatcttgcagcccagcgagccggcgccaagaggcggtagccgtggaaggctcgaaagcgccagggacggtacagatcccggctccctgtctggccccggcctcccgcctctcgctctccccctctccctcctagctgcccgcccgccggggcgcgcgctcctgcgccccctccccttagcccccgccccccccactctggcaagcaggaaacgcgtggccctaaggagtgccgccaggtgggggaggccgtactgggggagggggaggcccccatgcagtccagcccgggtccacctaaccgctgcctccagcggctagagatgcgctgtgggccaggcctgctccccgattcagattgagggtcatctgtgacccagacacccgcaaaataaccggcctctgcaagcctccctggggctcccgaaagaaatcctgtttggcttcctctgtctatgtagctcccctctcaactgaaatcactggtccaagacagccacaatccagatatactagcaagccataaaactgaacaaaagccgacaaaccttacggcaccagggctatagggcccagacaaattacgaccgtctaggtaatatttaaatagatgcctaaagtaattgcaggggctcgggttagtcctcctgttgtaaaagtggtgaacgggataaagtggaaggtgaagataagaagtcaaaaaagaggtaaaattaaaaagcttcattccacagcttttattctataagaacataaacatcgtctttttccacgcacagcagcaatacaatattaatttattctgatttaagattagaagtaaatagagctagaactaacatttataataacgatagaatgcatttgcttaaaacaagattggcaattcttca

SEQ ID NO: 12862 - DNA, 1476 bp, Artificial sequence
  DNA replication origin
cgagccctcgattcgccgccgccccccacgctggcttgcggcagcggcgggggctcgcagggcgacgaggaggcgcacgcgtcgtcctcggccgcggaggagctctccccggccccttccgagagcagcaaagcctcgccggagaaggattccctgggtaagcagggctgcagagggctgcagtcaggcgggcagacaggcagacacaaggaggagaaggatcagaaaactaggagcccgcgcagcagccggccggccttggcccaagctgcaggcaggctgaccttgtgaacttgctttttaatatttgggcgtggggacgcagtaaaattcatgtccggcttagcgccccacagcaagacgtcctcggcgctggcctcagctccccctgactagggacgaggacaccagcgagcaggccccctcctgtgcgctctttcctgtggccgggaggacccagagccctggtccctgcccagcctgcgcggcgcggcccacgcggggggagggggagggagggaaagtagctcgcccgcagatagcgcggatgtttgtaaggcatccaaaataagcagccgccagcgccaataaataagcccattaaccggcgaagttcgagtttacgatcccccatgcttttttcaaagttgctgaggggcgggaatcttcgttgcgggaagaagaaaaggcaaatccggcctggaagcggggggccctgagctgagagccagagaagggccatttcccttcccctggacctcggaatcgcccagctatctatccctggctcctggagaaacttgagggagggcccttgacccccgaatcggtttttcctgccttccccattggaccaatgatgcccttctttctccccttatcgagtcttgggcaatcagggccctggggtgagacagccaagctgcctggcccatcttccaagtaagcaccccgcgctcctagcctgggggctacaggaaatgcttgtctgccatatggcaagaggcaaagaaaagcgttaagttcaagatgtacagcctgccctcccaggcctttccttctgcaagcatctacggcttagcgctaaaacaggtgtttggaaaagtgggggaaatgtaaattggaagggtcatgtagattgaaggcccactcaatttttgtcatgacttttggaggaactgcttgctctcagcaagccaaaaacgggggcacgactctcttctctgtgacttgggacatctctcttatgggagaaacggaggcaattcacccccgcgggcagcccgtgtggcctcgacttaatcatcccctctttattctcttacatgccaggcaattccaaaggtgaaaacgcagccaactggctcacggcaaagagtggtcggaagaagcgctgcccctacacgaagcaccagacactggagctggagaaggagtttctgttcaatatgtaccttactcgagagcggcgcctag

SEQ ID NO: 12863 - DNA, 772 bp, Artificial sequence
  DNA replication origin
cggaagtagccaggcactggcaccccgctggaggtgcccagggcgcagccgtcgggcggcgggccccgcgggaagggagccagttcggcggcggtggccgagactttggggcatttgtccgccgagtcgtagaggcagtaggagctctcttctttgatgttctgcgcgaaagagcacgaggtggcctgcggcgctggctggggtggttgcggcgggggcggcggctgctgctggggcggcggcggcggcccgtcaggcggctccatccggcaagaccggggcgcgtctagccacaggtctatgggcgagggcccgtagccgtgcgccccgggacctagacccccgccaccgccaccgctgcccggcgacgctgcctcattgcgcttgccgcccagcgtggggaagagcccgcagctctgcagcccgtagggcaggtcggcggcgggcggcaggtagaccccgccgtgggcgtagtaaccgccaccgccgccgccccccgcgccaccaccaccgccgcctgcctcgcctctgcccgagctgatgagcgagtcgaccaaaaaagagttcgcggcggggctctccgagcatgacattgttgtgggataatttggcgaagggagcagatagccctttctggctgacatttcttgtgcaaaacatgctgaatacgattagcaatccccccgcaccgcggcgggcgcccgcagccaatcccgagccagagtttccgcgcgaccactcccagtttggtttcgtaggcgcggggccgctc

SEQ ID NO: 12864 - DNA, 1816 bp, Artificial sequence
  DNA replication origin
agatagggccactggctgcggtgctctgaagcttttctgcactcaggttcgtccgtctcatgggcctagagggtagagaatttgccttggccttgggcgcaggagcatgcgaagagcgaaggagagttaatgatctcttggcacagaccctgtcttgatccctctaaagccgctgctgcagcttcaagaccctgtcaggctggagagaactggctttcttattctctctcccctcctgtttctctctcttttctctccctctgtccgtctctccttctatctctctctttttctctccatcctcctcctccgcaccctgatgctcagtccttacggccgggtcaccgtggggcgccgaggttgaagtggctggagcgccgcgctagcggtggagcggccttctgggcccggagctcggagcagccactgcccgcagcgaccgcagctgcttgaatctcagaagccagagctggagctctacctagccagctctctctgcgctttcagggtcctctcaggctcctcttccaccttgggctggattcacactgggaggaaggaggcaaagtgccgcgtatgacccggatgcaagagtctttcccagctgaaggcagcggcctgagcggtctatttcctgggatgccggcgttcagtaatgccagctccgactggggccggaggggcgggcaggcctagagtatcctggagacctgtagcccacgggccaggggcaaggcagcgacctcccgggctccactggatctggccggaaaaggttgcatttcctgagactagcatgaggctcacacttgggggctagcaccccaggccggccatttccagttggctaaaacagagcccctgagcctgctgagcaaagggcctgacctccacatgctcttataacaggaccatgagcccagcccggccttgcagggaaaggatttcctcaccgaggcctcgttaaaatgcacacactgcaggagcaaggactgccctagctgagggtatgggagggaggggaagaggggaggggacagagaggtaggagtgtagtgacactggttcttgttgtagcctccaggagcatatgagtgccaaagctaacaggagagcaggaacataaagcagcggaggtgtacaccgggcacacccctccaagtctctcactttgggccagccaaggaccccaaggccagcattttacttccccgaaatgactgtgggcttagagtcttccctaggtgatgaggggatgcttggatctggctctggccttgggagtgggagtggggccgtctttccatcaaggctggcagccgcttcccacccccagtcccgccagcccaccaaagtccactgacaggagttgtagagaaggcaagccgggtgagcacaacaccagaggagaagatcctaactggatcaacggactaggggagaaaagtgttgggggttaggggctagggaacaaccactgcattttggggaaaaatctgtggatactggaagtagaggcaagtcagcttctagttcactctgggctcctgacactctgaggatcctgacggccatagggccaggttcgccacttttgaggaggcagaattcagacaaggggccagttccagatccagagctgaatgggaagcgcgtgagtccccgacacggccgcttcagtggttagagtacaccggggactagtggcagcttctgcgacagggatggtgagcacccaaggcagactgggcgcgcaccataaacaccccacttgttaactgcgcggggcccaagggcccttctaagggaccccggt

SEQ ID NO: 12865 - DNA, 948 bp, Artificial sequence
  DNA replication origin
ttccaactcccctttcataaagcgcagggcgctgcctttatacgtactggagccgccggccttgtcctcagtgtggccggaagacgactcggggctgctgctgctctcggggcgccgccgccgctctttctcctctgctgccgccgccgtctcccggcagccgccgccgccgccgctgtccgaacttgaagttgccggcgcgcccgttgcagccgccgccgccgccgcggaggtcgccgtggccgccgggggccccttctcggcgctcttgtccccggggtagtcggaggaggcgaggttttccggggtgccgtaggctgtctcgaaaaactggtcgaaagcctgtggcaggacgccgttcctgcccacggtgctatagaaattggacgagactgcgggggtggggtggtggtagacgttggccgagctcttggccagcacgtcgccaggcacgccggccgcgctgggcgcctgcaggcagtctctgtgcacgagctcctccgcggagtagcagtgggccagattgccgcgggggtgccatttagtggcgggctcaatggcgtactctctgaaggtcacttcgcgcacgggttggacctggggcaggttggaggagtaggagtatgtcattgggcgcgaagacggggtctggggcagaaaagaagggaggctggagaaatctggacccgagacgtagtaagtacaacttggcaaatacatgttagaggagcagggaccacgctcatcaaaatccattattgggctaccttgggctctccgcagtagccgagcttaacatgattctccactgcagctgcctctttgaagcggatccgtgaagtagaaatttggagacgtaagctgacgtggaaatctatccccatccttagcagggaggtgctggtcatgtgacccgatgttgaaattgacaagctgctagctagtccg

SEQ ID NO: 12866 - DNA, 1364 bp, Artificial sequence
  DNA replication origin
ctaaatctccccaagatatgtaaataactttggctatttcctggagagggaaaaacaaaaggttatctttttacatatttttttattttccttcagcaacatcccagatccttccaagaagagagttgttgggaggcctcaggtctgggcccttctcagctcctggctctgcctggctgctctgtgctctgtgtcctctcctttctttcgcttcctccaaacattgctccttcaatcctgcaggatggggagcatattttgccttcttaatttattttttttcctcttctcaagaaagctagactcagagtattgctatggcctctctctatccttagcacaaacctagctttttaaagacatccctgtttccccaggtgcagggagttcgggaagcacctctcctttctctggtattgtattcctcctgtggaatgagcagtaggaaaggcacagagctctctgagtttttgccctgcacatcccttgctttcactctcacacattgcaaggaaggagagtaggagagtaggtgggttacccctttctcagccacctctccttggccctcagcccgtcctttccacctccattctccccacacccctggagctctgtaagcagcctgatgggccccccacgaagatgcagcatacccaggagaagtctcctcggatgtcagcgcctctaaagcagcccaaggcttgcctcaattgcatggtttcccgagtcctcagctccagaagaccaggcagatgggtggaccggtgagcagcagggcagcccctgtgcctctgtctctgccgagtcactccgaagcccggcaggcagcgaggaggagggagtttctccaaggacagaaggtgggatgaagaggtaggcagggaagatgaggggagaggtggatcccgggtaagacgaaggcccttccgggccctgcggatcagtgacaaaccgcggggagaagccgttctggctgttggcggtttagggacggaaggcactaaagcgcttcggaagtgaccatgaatgagagagtgtaatcaagtcaccgtgcaaatcggacaagccaccaggcaggcacatccacggcttcaaactctggccccgaaggggttccggctagggtcggaggcagaggcgcttcccagagcaagtctatgggagggggactgcgaagaagggggtgcaaatgcgagactccaggagaacagactccgagaccacaggccacacagcgacggactcccacctggctatccccagtccagggcatccctcacccacccggggagctgcgggtgggaggtggggacgagagttgagctctcaccgccctctgcacactcgagaacgaggaccct

SEQ ID NO: 12867 - DNA, 2046 bp, Artificial sequence
  DNA replication origin
tcaggacaagcctacttcaaggaatgtttggtgtgggtgcccacttcccggccccgccccgccctccccaggagaataatcgggtatttaatctctcccggtcttaattcttggcagcgtggaaggtggtttgcaacgggaaataaaacttgacaggagcattttctctaaaagggattttgagacgagctgaaaagaaaccgtgtttttctctaccaaatacttccgctttctgagcccggagccgagcggtgggagctatccgagggaacggagagcgagccgggcacgcggggctacgctgtgcaccccagcggccgcgccgtccgcccgggcgggaggcagcctcgggctgcgctgcgccccgcgcctctgccacgctccgcgccgctgggctgtaggccccgaagccgcccgcagcccgaggccgggacccggcgcacgggaccgtggcaccggcaggtcccggttggcacccagagtggtacccaggagctggctgagggcggctggggtcaggagctggctgagggcggctggcgagagaagagggccctggagagggccttaaggggcttagcgttagctctgagcctctggtctggggggttggcgacagcagcttgcaagaagggtggtgagagcagggctgggggctttgtttccggccgcgggtctgcggacactgcacaaaatggagggggaaagggggtgagcgcgcagctggcgtgggtcgagcggactgctattgggtggaggaggctggagagagcagcgtccccctccctgcggctcagccagcgccctcctctcgtgccgtaaaggtcaagtcctccgcgccacggccgcctctatggtcagggccgatcgctgccgccgcctcaagaaggcacaggacgcacagttaccttgctgcaagcgggttctggtagcctgggctctgggctcgtgcactggaggcagaggttctttcttgatttccaactctcccatccccagccctgttggaaaggagtcccggcagccacgggtggcccaggccgtgtccccgtcccagaagagcggggtttgccccagtccagcagacttcggagcccgctaaggcctagcgggggcgagagggagcgcctgcaagcccaggggaaaggacgtggctggatcggagttctgggtcctggtaggaacatagggccgacttggcagggaagaggataggggagccaagaccctgctggagagactctcctggggtcccagaatccaggcctctccctcagtgagtggcaagcctttggtgagacccttgatgctcttctcctgcctaaaatccacacagatgtgaggcgcactcttccaaggtaaaaactcctgactcccagcccccaagaatccttcactgcgctctgcgagggagagagccccttaccccctgcctatagcctgcctccagcagatcagagcatcaggccctgcggtaaacgttagcttaagcgtgatctgccgctgagcctatctctccaggtgaaccaaagaggacatgcaaaggatttcttttcgcggaagccaaaaatctggattgtacccctagggctgcgtggatgggctgggctgggctgtgggggcatatatagcagaaacaatgatctgtgaatgggtcccatcgcagaactgcctggaagggtgtgtaggggaggagggctggatggggtgatggctcttctcaagcctggaatgtgagccaacatgagcactgagtggaaatggagctgccctaggaagcagttggagctttgtggcgtgggggcttcctgtgagctacggctgtagagaccgagacccaaggaccagagccaaccttcgggttgggccacccccttttgtcttctttatctcagacacactctgctgggaaacctgtttgggccaaagctgcatggggaatggaaggcagacactgagaactagggcttcgcccttcaaagtctcccccaccccatttgttcccatgctataggaaaaagaagtctaataattggcaacaataaa

SEQ ID NO: 12868 - DNA, 1588 bp, Artificial sequence
  DNA replication origin
acgcagtgtcctaaaatgtaacgatcacttaaatacttacaagatttcagtaactgcgtaacttatctgaaattgcgtattttgggggttgacgtttgacatttaacgggctgggctgatggggttggcggaagaactggcagtctttacctttcttaaagttttaaaacagttgtagattccattaaagagaaagagatctccttcgggagaggaaaatgccagtctctgtctctttctctttcccattcttcaattattattaagcattattatcattatctgggcaaagcaacgagttctgaagcgtttcttcaagttgccttcttgctctatttttaatccattaactagtggttttcagtttgttgatgacttttttctctttaaccctcctgttctggaaccagattgtgacctgccgctcagagagattcgtcgtggctgatatccgcctccgtttgtccttagtaatgaatttattcgtggcgtattcccgttcaagttcttttaattgcaccttggtataaggcacgcgcttctttctccccctcctataggagctggcatccgagggatgggagaccacgtctagaagacaagggagaaggcaagttacacagggatcggaccccagccagggcataggcgacagctcgatctgagccacccgccttgcagcgcccggctgctctttgccacccgctgtacaatcctgtcttctgctaaagcctagagggtcagtggggaaggtagttagttctgaactgaaatgaaatcacccagggctccagtgacttccccaacccggccatcctgcaggagcagcgcgtaggcagcctcgagtgatagcctggtccaacggcccacaccttagcgccaggctcaaggtacaacacttctgtgcctgcctcctttctgggtgcccgtcccaatactcgaagcttctacactgaagccatttttgagagaatgaatagggaggggcaatttggggagctgttttctggtcaatttctcatccttaaattggtgtcaggggctggggagggcggggcgcagagggagagggaagctagccgaggtctccacaagccacccctcacccagggagagccagggaccagctcaactcgaggcagtgcaggcagacccagccagccatgctcgggctcccaggggtgcagagccgctagggcagaccaggaagagaacagaaacgcacccgggatcgcccgggtgcgagcggagaagaagctggagcagagccggaagaccagggctgggaataggtcgtcatttaccgggcagagtggacttccagaggtggggaggctgcgcctgctctttggggcagtacatttggccgttccagccgttgggcagcgcccagggctggtagctttccatgggaagacccaagggttcgtggcgcgactcgccggggcccccgaggcccggcaccactggcatatccaggtagccaggcatgggctgatggtggtggtaaggcccggctgcgtagccctggtggtagaaggcgaactccttagcgcgggagctgaactcctcggcagctgggccggcg

SEQ ID NO: 12869 - DNA, 1225 bp, Artificial sequence
  DNA replication origin
cccctgccgccgcagccgccgggtgggggaagcccccgcccccggccccggcagccgccgccgctgcagccgctgctgcagccgccgccgccccttccatgttcttgttgagctcgtcggccaccaggccgccgccgttgtcgtagagaaacatgacggtgggctcgatccagcgggggtggaggagcacggaggctgtcatagcccgagccgcatggagaagaccccagtggcgctgttttaaaaagcccccaagaagtgaagagcgcgcggcgcggggccggggcccgagcgaggggggcggatcgcgccccgcggggtcgcgccaggcggccgcccattggcccggcccccccgctccgcccacggcgtatgcaaagcgggcggctccgactccagctctgcacggtgcacccgtcgtccccgccgcggcccgcgccgtccccagcgccagccgcgcggccgcgcaccattcacccgggggagaggcggaggaacgtgcgggtggggcagggaaggaaggcggccccatctccgccccccttcccttcctttatcccagtggggcccagacccgcgcaaccaggcggggaggggaggtgggcgcgcgattgggttgcgatctggagcagtggggacaggtcaggtaattctgccggcggtcagggatgggagagtggggaggacgggaccagcctagctcagaatgggtgtttcttggagcctctgggactgttttctttccaggaaccggcgcgtatttctgcagtgagaccacaggacggacatcggcgccttcggcttcgatggagttgcgattttgctctttccagggaaacagtggcagggtgtttgctgcttatcggttcctgcggatatgcctgggtcccaggacattccactggaggcttggactgcatttaggagcccctatcccttccctgtccacactgttagtgagcaatttcatatgtttgcatttagacccatagactcagaacgactcatcacacacacacacagtgtacactgacacactcacattcgcacacttaggtatacagcctgatccttgctctgacctggtaacaacgcttcctcctccagagactttgagatagagcgagcgatccctgtgcaccattcatccatgctcccacctcgccagtatggctggcttagttctggaaggggcttaagaggaacaagccccagctgtgcttct

SEQ ID NO: 12870 - DNA, 1028 bp, Artificial sequence
  DNA replication origin
aggtgagctggcacaggcgccggctagtgggggctccccaagctgtgttttcgtttttccgggtctggccggaaaaccgaagaggctcaaagccctggctgagcagggcggaggcagagaagagtcggtaaacaccgccccaaaaaccccacgaaggcaccaaaaaattctgggcagccgaacagagtcagaggcgagaattttaaaaagagagagaaaattaagagtgaggggatgtgggcaatgggccttttgctgctgcctgtgtctctacgctcgcatggcagttctcatgctggctggactgcaactttcaacttgaccttggcctccagccgtgtctgaccagtatgtaaaaccgccttcaagtccccaggaacaggggcctagaaccctactctgtctctttgtcactgtgagttttacaatgccacttggagggaggaaggggggtggtgaaacggccagaaagtaacagaaaaatcaagtccctacagaggctagttcctgagtctgcaaatggccagtcagggagaaggtaaactgggggcaaatcaatatttacccagaactgctaaaaagtcaagaaggaaagggcacacttggtgggggggtggctggtgtgggggtcatagaaggttttattgggcgacacttacattggtcaggacaaatccaggatcaggacagataaaagcccaagcccagccacattggtctggatcctgcaggaagcccaggggccttagacagcagatggtggggtgtgtgtgaggggtggtatgcgtgctgctctgagtttagggctgagtgtgcaagctaggagcagaggacaggtccaagcctggcttctcaccagtccgcctggggtggaaaagaatccagcactctccccagcactattccggtaatgtgcccactttcactttgaacgcttgttcctcttctaggcatctgaccagctcacagtagtgaatcaggaagtggaagtatgtggctctaaagcagcaggacccccagaacccctc

SEQ ID NO: 12871 - DNA, 1206 bp, Artificial sequence
  DNA replication origin
ctattaatataagcctttctgataattgaaagtaagttatgggaaatgtaatatatatccccggtatttactgcctcgggaacaagggagacataatgaaggagggaagtttgtaattgcagaaaaacatcagttctaggaacagaaatcagtggcagccagagacgttctccccaggtttccggccctgctggtggcccctccaccaggctccatacaggcaggaacccccagaagaggaaaggggcctgtaataggagtcatcaacctgtcaccacggctagggtgaatatggcctctgagttgggggaaggggggaggtttactctttagcaccaccagctgcagggatggggaggggctgtggagggtggggtggggaggggaggctggaggtggagctggccttctctatccacagcccacagcctcctcagaacagacactgggctagtaacgtgcgatgctgcggtctaggtccctggccccacttggcactaaggtgagcatggtggtccttaccctcaggcagccttcacatctataagaatgtgcatacatgcgtgggtttgcgtgtgaaggaaacatggagggtgacacagctacataaatgattgcaccaaaggctgagataagaacctagggatggagcagtatgaaccgggtgccaagtggtgtggggtgtcagggtctggctgagggtgggcagcaaggaggctgagataatgacctggacaggtggagaggggccgtcccaggtggagatgcaaggaggatgctgggaacaaactctggctcttgggctagaggggaagggagggtaaaggaggcattgtctggcacctaccaggtgctgtgctttgcagggatgatctcatcgaaccctcacaatatccccatgtggtaggtacttgtgttacccaaattctacagatgaggaaacaggcagagagggtcagtgacttgggcaaggtcccgtggctgggtggcagagagcctctgtgagttgctctgaaccggtccataggaggaagcccagcacctgcagtgaagccctggtaaaggggaaacttagttgggaggctttgattttgaattgaggccttgcttgctttaagaaggttctcataaggaaaagctgcatgcgtcttacatttctgtatttcccccgtgccactgccagccccatcttataagttatccgcg

SEQ ID NO: 12872 - DNA, 1246 bp, Artificial sequence
  DNA replication origin
cgccgcggtcgcggtccagaccgcgctccagcagctccgcgccctcccaggcacccggcctttctttctccctcttgcaaccaagatccgtccggccgctggagacccagggagccggggttaggaactcacttggggctttcccctcccccaccggagagccccgggatggagagccgaaaggacatggttgtgtttctggatgggggtcagcttggcactctggttggcaagagagtctcaaatttgtccgaagccgtgggcagcccgctgccggagccgcccgagaaaatggtgccccgtggttgcctgagccctcgggccgtccctccggccacccgggagcgcggcgggggaggcccggaggaggagccggtagatggactcgcaggcagcgcggcggggccgggcgccgagccccaggtagctggggcggccatgctcggcccaggacccccggccccctcagtcgacagcctctccggacaggggcaacccagtagctcggacaccgagtcggatttctatgaagaaatcgaggtgagctgcaccccggactgcgccaccgggaacgccgagtaccagcacagcaaaggtagccaccgtgcccctccgctccccgggcctcccactgcgcccacccttcacttcggcgcaggccaggaggaagacactcccttcccctagggcaggatggctggggggacccacctgagcaactctctctgctatctgcgttctggcgggggtctcctactgtgttctggcattggcgggactgagggtgacagcagtgccttgagtgcggggtgctgagggggcggatgcaagtcctggacttgggggattcgaagctcaccccaagcacccagtgtttcaactgctcggggaatgcttcaattgctcggggaagacactttccccaggcgagggcaagatcaaacgccgatccgggcagtttgtggctggcagggtgtaagaggcatggaggcgcggaagccaggagtccataaaggaccgtaaaattgcggcccacttgggcagcccgggtgctgcagccctccgaccagtttgcacgtcggtcagaggtccaaattaccttgtcacttcccgggcttcgcggcgccaggtcggaaatggtcccaatggtctaattgcctttggtctccggttgcatttgaaaaggcagagatcgggtcctccccccttcccctttccttcctagtcccacttctccacccaaagg

SEQ ID NO: 12873 - DNA, 835 bp, Artificial sequence
  DNA replication origin
ccttctccagccgcgcaatctgctctcgggtgaaggcggtgcggtaacgacgcatctggtcactggcgctgcacgccagggtgccttgcgagccgcccccaccactgccgccgttgctcttgggggtctcgctccctccgttcggactgccgaccagcgcctcggagccggaccctgcacagcgagtccagagcacaggcgtgtacagacacagacacacaaacgccattgaagtggggctgtaggcctaaggtgggagggtgatttgggaagggacaccctgtcagccacctcagtaactgtttctgctagggtactgcggcctctggggaacccaagaagggaaaataagggcctgcccttgattgggtaggtagaggtctttggggaggccttcccttcctctaaggcatcctgggtacaggggttcccagccgcccttcccacctgccctggagcataggtgagatttctgcctcccgttggcagggcgtgcacttctgacaggcacatgagttgagatgcacctttgtgctagagggttgtaaactctgggtcaagtgcattgtagtatgctgggcattcagagagtttccttgctcttatgtgtgacgggctgccagaacaggtgtgggaatgtgtactaggttccgtgtattgcagggctggagtgagaatgcatgttgagtatcttatttattaccttagtatatgtgagtggagtccaggttgttctgagggttatgggaaggaggctgggtgaaatcggtgataagatagtaaggggtaggtgcaggtattcaacaaggcgttggctgccaagaccagggggtgg

SEQ ID NO: 12874 - DNA, 1191 bp, Artificial sequence
  DNA replication origin
gtgcctgtcagaagtgcacgccctgccaacgggaggcagaaatctcacctatgctccagggcaggtgggaagggcggctgggaacccctgtacccaggatgccttagaggaagggaaggcctccccaaagacctctacctacccaatcaagggcaggcccttattttcccttcttgggttccccagaggccgcagtaccctagcagaaacagttactgaggtggctgacagggtgtcccttcccaaatcaccctcccaccttaggcctacagccccacttcaatggcgtttgtgtgtctgtgtctgtacacgcctgtgctctggactcgctgtgcagggtccggctccgaggcgctggtcggcagtccgaacggagggagcgagacccccaagagcaacggcggcagtggtgggggcggctcgcaaggcaccctggcgtgcagcgccagtgaccagatgcgtcgttaccgcaccgccttcacccgagagcagattgcgcggctggagaaggaattctaccgggagaactacgtatccaggccgcggagatgtgagctggcggccgccctaaacctgccggaaaccaccatcaaggtatgcggggtccaggctggggaggcgggtgtgcacctatttagcgggaagtaaatgccaactgccaactccctgaaacgcaggccaggaatctgggcctggggtctccctgcccggcgcgtgcagattgaccctcgtgacagctcctaggcaggcattgctgccatgtggctgactctgtccctttcctggttaaatagacaaggggtgggcgtgggggaaggggatagagtgcctgtgcgggtgacaaggaagtttctggggacacgctctctgcggccgcagaccaattgagtccatgtcctttcactgctcctcccatacacacactggcctctggcaccccgggggcctggccacctgggcagaaggaaggagggagcgggctggagtcactccccaaacctctctcggagggattccagctccaggtggtggtggtggggtcggtctctacccggctggtgtctgctttggctgttcctgccctgcgaacactgtccccggagcgggaccagactactggcctctgagcatcgggccaagtccagctactgaacctgctccgctcctctccccaggtgtggttccagaacc

SEQ ID NO: 12875 - DNA, 1415 bp, Artificial sequence
  DNA replication origin
cccctgccctactactcgccggtgggcctgggcgccgcatccgccgcctccgccgccgcctcgcccttcagcggctcgctgcgcccgctcgacacgttccgcgtgctgtcgcagccctacccgcggcccgaactgctgtgcgccttccgccacccgccgctctaccccgggcccgcgcacggactgggcgcctctgccggcggcccctgctcctgcctcgcctgtcacagcggcccggccaacgggctggcgccccgggctgccgccgcctcggacttcacctgtgcctccacctcccgctcggactccttcctcaccttcgcgccctcggtgctcagcaaggcctcctccgtcgcgctggaccagagggaggaggtgcccctcactagataaggggccgccggctggctgccggctccatgacgcccgtggggtcaccccccggccccgggactcagccagcctcgctcctcgctcctcgctcctcgcccctaggacgccaagggggaaaggagagggcggaaaaggaccagcgggatccggccgcaagaattggaaagcctaggaagtggcggtggctggcgcgtttggggagcaggagtggggatagggaagcagagcttgagagaccttcctccggggcagcctccggacccaccgccccccaccagggtcgaggctgtagctccaaagctaaacaaaacttagcagcaacagcaaccaatatccagtccctcggcccctcggcccctcaccctccacctcacactcccttctcaccgggccccctctccccagccaaggcccaagcactggaaagggaaattgctgtctctctgaacaaaatgctgtgtatgcagagcaggtagagattaatctttgccagcttttccaaggcatgacaaggggctggtggatggcaacataccagtcatttggaggagagagtgagagatgatttactaccagggagaatccagccccttggcatgggacctggagcctcgactacacagcatcttctgggtctggcgtctgccagcacctgatctctttcctcattcccagctttgtgacacttctcaacttgcggctccatctctccctgcccccacttttttgttggccagggaggctgcagatgccccaggagccctttgccgcttctatgaggccaagccttttttccctgggcccagcacacaccctgattagcaagtgatgtgtgcgaggagggtttgtgaatgttgaatgtgtaataatgatcaccatggagctggccactgaccccagagctgagctgttaacaaggcgcccagggaagagcttagggagtgggaacttcacctccctctctcggtatctggcggtaaattagaggcaattttcatcctttgcttgttcaccttcacttc

SEQ ID NO: 12876 - DNA, 1174 bp, Artificial sequence
  DNA replication origin
ttatagattaacagcatcccaaggcagaagaatttttcttagtacagaacaaaatggagtctcctatggctacttctttctacacagacacagtaacaatctgatctctctttcttttcccatttcccccttttctattcaacaaaaccgccatcgtcatcatggcccgttctcaatgagctgttgggtacacctcccagatggggtggcagccgggcagaggggctcctcacttcccagatggggcagccgggcagaggcaccccccatctccctcccggacggggcggctggccgggcgggggctgccccccacctccctcccggacagggcggctggccgggcaggggctgcccccgacctcccgtactgggtggctggccgggtgggggctgcccccaacctcctggacggggcggctgccaggcggaaatgctcctcacttcccagacggggcggctgccgggtggaggggctcctcacttctcagacggggcggccgggcagagacgctcctcacctcccagatggggtggcggtcgggcagagacactcctcagatcccagacggggtcgcagccgggcagaggcactcctcacatcccagacggggcgtcggggcagaggcgctccccacatctcagacgatgggcggccaggcagagacgctcctcacctcctagatgggatggcggccgggaagaggcgctcctcacttcccagactgggcggccaggcagaggggctcctcacatcccagacgatgggtggccaggcagagacgctcctcacttcccagatggggtggcggccgggcagaggctgcaatctcagcactttgggaggccaaggcaggcggctgggaggtggaggttgtagcgagccgagatcacgccactgcactccagcctgggcaagattgagcactgagtgatcgagactccgtctgcaatcctggcacctcgggaggcccaggcgggcagatcactcacagtcaggagctggagaccagcccggccaacacggcgaaaccccgtctccaccaaaaaatacaaaaaccagtcaggcatggcagcgcgcgcctgcaatcccaggcactgggcaggctgaggcaggagaatcaggcagggaggttgcagtgagccgagatggcagcagtacagtccagcctca

SEQ ID NO: 12877 - DNA, 1099 bp, Artificial sequence
  DNA replication origin
agtagttacatttacattccttattttgtgggcttcttatgtaactcagacatgtaagggcaggttgttaaatcctatttgtttattcagtaaacatttattgagtgcctagtatttgccaggccctgtcctaggtacaaaggatacaattgggaacaaaacaataaagaaatcctgtttttgtggaatttatgtgttagctgtagggagacagaccacaaataaatgaagtgagtgaaacaaaagttatgttgggaaatgaaactgccatggagaaaagtaagataaggaaagtggagagggggagtgtggggttgtcacagtactacctagggtggctggggagtcgccccagggagaagacatttgagtaatgacctgcaggaagtgggaaggtggccagctgggagaacagcattccaagtagagggaacagctcggactggggccctgaggtgggagcctgcccggtgtgctggaggaactgcagggaggccagtggggctggagtgagtgagaaagagggcagggggagataaggtcgtggtgggcacccacgtaggccagtttgcgcttttgaggcatttactctctgggagatggggagccagtggcccttgagaagaggaggacaggatggatgaatgggtgctttcatagtgtgactctggctgcagtgtctcgagtagactggaggggacaagggtggaagcagggagactgattaagaggggattgcaatagtccagtaacaagataaccagtggtcctggtccaggtggtagttgtgaaggtggtgggaagtggtagagttctgggtagattttagagataaggtcaacaggtttggtttaggtatgagagaaagaaagaaaccaaggatgactccagagtggttgacctgaacaactggaaggatttggttggcattcgctaagatgagggtgactggctggaggaagttttggaggaagatggaaatcaggatctctgttttggccaggttaagtttgcgatgcctgttggatgccaaatgataatcttcagtgggcaattaaaaaaaaatattttagagatggatcttgctctgcttcccatg

SEQ ID NO: 12878 - DNA, 1136 bp, Artificial sequence
  DNA replication origin
ggcagccattccgcttcctcctcccgccgccgccgccgccactgcgtcctgtcagcgccggttgctaggtgtggtgcgtcgggagggggccggggccggcggccgcgggcgggggccggggagcttgccctctccctgggaggcggccgaggggcccgggcggggccggggacgcgggcccgggggctctgggtgccctcccctgccccggcctggcgcggacgcccgggcgctgcgggctgaggtcttgggtgcgcccgcgggccgcgcccagcgccccggggtcgacgcgccctggaggcccctgcggcggcgcccgctggagagacacccccagggcccatggccgggcatttaaatgcaccccggctctgcgatttgcctttctaatggtgctaggcccgaggtgcgctggctgcgccctgggatcggcggcggcctgcgcagcgccccgggcccgggagacgccggggagggggcgccccgcagggtggctgctttcccttcacgcctggacccctggacctttcaacaagtcctctgatttgcagaagtcattgcacacattttcacacttctattcggaacccctgctaagggaggtgggccgggtgcatctggcttaggcggtccaaccacctgcggaaggtgtgaccgacgccagcgagttgtcctgcgtgggctagaaggtgaagggtccgagcgatgtcccaatggggctgtctaatccagagaacctgtaaattgcccccaggaagtccaaatgaatgccatggattcagccatgtggatgcagctcacgtttctacaaagttgagagaataaatcacgactgctgtgtatttatgcaggaataaaatgaggcagaaccctatgctcctttgcttagtatagtgctgtctctgcacacagtggctgcttaataagtgttgaatgcctgtttagaatgtgatttgatgggccatccggaataggagataatcatgggaaacgtctacaaaatgtctttcagaggaaaatgctgttgagtaattgtccaggttttgaaacttttcaagttttcaggcgtccttgtaatagcttcttccatttcctctgctaaaggtatgacagaagagctgggcaagttttggtag

SEQ ID NO: 12879 - DNA, 1342 bp, Artificial sequence
  DNA replication origin
ccccgccctgccgcctccctccccgccggccacccctggccattccggggctccccgcccgggcaggagtttccgcgcgcctggcacccccgcccacccccgggccatttaccgatgtggttgtcctcgatgtgctcgatgaggtcggccagggtggggaagtggagtccgcagcccccgaatcggcaggtattggagaagaaggaggcggcggcgatgcctgtcatggtgctacatcgagagcccccctggtgtcggctctgcgagcgccgggcgggcgagggagggagggaggccgggtggggtgaggagaggaggggctgggggagggggagagaggcggggtgaggggagcggcgaggacgggacggagggagagggggcgagagagatggaaggagagcgaggagccaccgggaggcagaggggaggcggcggctgcggcggcggcgtcgggagcggcggggggagggcgggggcgggggcggggggggaaggccgccgcagctgggaggagggaccagggcgcgcggctacagctgtgcggccccaacctcagcgcgcggacccaggcctcacctgcgagccctgccaccaactttatctcgctaggcctgccctttacggcttgccatccgtgccatctgtttggagcctccttggttatgtatatgacgttcttaatacacccacatcgattaattacacctacctccctgcgaggagaactcagggagttaccctggtccctctcagggacatttttttgtactcagccacctgtctaggtgtgacacattcacaggggacccaggaaaggtaattgtgtgcaccttcttctttaaaccttctttagaaaaagtacacattctccggaggtttgtactaactaattgattttaatgaagctttccctctaggccagaaaaaaatcttagctttatttaaatttcaaaatagagtgcttggttgtcaagtgcatttgcctgtgttttacatatgtgccacgttttttatactccctgctccttctaggaaaacaaaaactaaaataatttcatcacccgaaattacagcaccctactgcacccactccaccatctcaggtctggtaattaacccatcctcgtttcagccactgcagaaaggacagtgcattggttaaggctagaaggagcggaaacaacggcaagggacatagtgactcttcatttaaaaaggaagcgatttcatcctgtgagcatttaaagcataatgttgaccaggtaaccacttaaggtgaatttagtagcttccctgaaaaccagcattttgctgagaatcaattactttcttgtcccca

SEQ ID NO: 12880 - DNA, 958 bp, Artificial sequence
  DNA replication origin
agtgcaacaaaagtggctaaatgcaaaagccccagaagtggccgagccgtatttttaggaacttaccaaacaagtgtggagaaggcaagagcggagcccgggtgaagggaccacgttggactgagcaaagattacaatacattctatttagagtgcattacatcacccccccggtgacgtcacgtgggattcctgaacttctaaatcattgcggtccgctggggagggacggagcgaggggcggggccggcgcgtcgagggggcaggccccgccccggtcccgccccgaccccgccccgcccgcgcggaccctggtgcacccgcccgggagcggcagcggcgggggcgactgcgcaagcaacagcttgcagagcccagcgccgtgtgacacggctccctgacattagtggtgtgagtcagcttggaaacaatccttatggtttcagacaagaccacggaggaggcgcgggcgtgggctcttctgcggggagggcctgatggggtttgaaaggtgtagggatgggggtaggggagaggtggggagggggatgctgaaggatgtgggaaaagactttgcaaacagaaatgcaggacgctcctccctcccccaccggaggatgtccagctcctttttgcttgcgacagtcatgacctcatttcagtgctccctgcatcctggcttttcagagcactcacttgtcaccccttcttcaccgccccctcatctcacctcctccaggagaataacttccttatggtgcacactctcatgaaatacacagccccacccttcgcgggacccctgcttcatgcgtctgagaagctgtagggagagttgctcctaaggcgaaaggtgaatcacagctagagccaagtgatgagcctgatttagacacggcgtcagagccgaaagggcccttggctgtcacttccagagcctcttcggtaactggcccaa

SEQ ID NO: 12881 - DNA, 919 bp, Artificial sequence
  DNA replication origin
ttcttcctggaattgattgtacagtgaactggaaatagtagtaataacaatcgcacattgtgaaacatgctataggtgaaaggactggggtgctgagtagaagataacaggtggaatacctttagttagggaggtgacgtttaagatgaacctgaaaaggggagaggaagctaatcattctaagaataagaggatgtcagagcagagaagagcagggctgtaagataatatgtatgttactaaagctcttttcaaaccattgctttatctttactttgtaggtcaaaggaagcaaaggtacatgatcctcattttgtacttgagaaaatgtcattgattgatcaatcaacagatttattgcttagaggacaggatttagctaggcagagagaaggagaggaaattctaggcctggggcatgtacaggcaaaggtatgaaggtgaaaatttgaagtcactagttgcgtaatgaatagaccagtgtggctggagtttagggtttgcacaggggatagtggtaggagatgaggctggaaatatagggtcttgaaggcaaggctaagtgtgggcttttactgatggtaatggggagctatagcaggtttcagagctggagagtagcattaggaaagtgctgaattacatcaattaattggagaacagggtctggagtgttctgggagggactaaaaggattggaagccaggaaccaggctcctatatcagtaggaagcaattgtatgatcaggacaggaggtgacagacctctaaagctagtgggatggtcaagaagaggcaaggcagatgtgggaaccatgaagacaaaatcgacagactggagaagttcagcaggatcatgtgtttagtggtggagtttggatgaaaacacagacctgctgaccagccctttgcccttcag

SEQ ID NO: 12882 - DNA, 1414 bp, Artificial sequence
  DNA replication origin
tcccaggcgatgggcggccaggcagagacgctcctcacttcccagacggggtggcggccgggcagaggctgcaatctcggcactttgggaggccaaggcaggcggctgggaggtggaggttgtagcgagccgagatcacgccaatgcactccagcctgggcaccattgagcactgagtgaaggagactccgtctgcaatcccggcacctcgggaggccgaggctggcggatcactcgcggttaggagctggagaccagcccggccaacacagcgaaaccccatctccacccaaaaaatacgaaaaccagtcaggcgtggcggcgcgcgcctgcaatcgcaggcactcggcaggctgaggcaggagaatcaggcagggaggttgcagtgagccgagatggcagcagtacagtccagcttcggctcggcatcagaggggggttgggttatattaaattagcaatgttaaaagaacgagtctgtagaagcagtatgtttatgagtggatgaaacatgtaccgcatcagtgaatatctgtggtcttcttaggcccttcggtcctgtttctactacgtcctttgtataattaaggtttccaaaccaaggccacctgatggagaaactctaaaggatatcaaacttgaaagtgctcatggatgacctgggttcttattaaaatgcagattctggtacattacgtctggggcagggcctgagactctgcatggctaaccagctcctaggtgatgccagtgaggctggtccatgaccaccaggaccagcttcatgggcatgcaccagtgcagttgtgcagaattgggtcctaaaccatcacattaatttcttctgatcattgctttatcctcttatcttacagccatgacatcaaatatttggtcggcttgtataactactgccacatactaagctaggggttttatgtttctctccccttgatctaagtgatcctgacacttgctagtttgtagctggagattatttagcaaatgctctgctttgctatttttcagatctctctctgagacaggcttctttctcctgtgctaaattgttagtttgttttcatttttcagataaatctcattaactgagttttgggttttgaagtcaactgtagttttctgaaccttccccttgcctctgggccctgaagatgattaggaaaaagcaggcagtgacccccatggctgcctctgaatcaccactgtgtcagggataagtagctcccagcccaaggaatggatgatatctggtggttctttttacatgaatatgtcagctaccttcatttgtataatttcaattcttttcaatgccagatgcatattcaatcccagtgagctgctgagcgggcagtctaataaattttcattaagcatcctctgtatttaaggc

SEQ ID NO: 12883 - DNA, 1146 bp, Artificial sequence
  DNA replication origin
ctgggtacttgagattagggagtggtgatgactcttaacgagcatgctgccttcaagcgtctgtttaacaaagcacatcttgcaccgcccttaatccatttaaccctgagtggacacagcacatgtttcagagagcacagggttgggggtaaggtcacagatcaacaggatcccaaggcagaagaatttttcttagtacagaacaaaatgaaaagtctcccatgtctacctctttctacacagacacggcaaccatccgatttctcaatcttttccccacctttcccccctttctattccacaaaactgccattgtcatcatggcccgttctcaatgagctgttgggtacacctcccagacggggtggtggccgggcagaggggctcctcacttcccagtaggggcggccgggcagaggcgcccctcacctcccggacggggcggctggccgggcggggggctgaccccccaacctccctcccggacggggcggctggccgggcagacggtctcctcacttctcagacggggcggccgggcagagacgctcctcacatcccggacggggcgacagggcagaggcgctccccacatctcagacgatgggcggccgggcagagacgctcctcacttcctagatgggatggcggccgggcagagacgctcctcactttccagactgggcagccaggcagaggggctcctcacgtcccaggcgatgggcggccaggcagagacgctcctcacttcccagacggggtggcggccgggcagaggctgcaatctcggcactttgggaggccaaggcaggcggctgggaggtggaggttgtagcgagccgagatcacgccaatgcactccagcctgggcaccattgagcactgagtgaaggagactccgtctgcaatcccggcacctcgggaggccgaggctggcggatcactcgcggttaggagctggagaccagcccggccaacacagcgaaaccccatctccacccaaaaaatacgaaaaccagtcaggcgtggcggcgcgcgcctgcaatcgcaggcactcggcaggctgaggcaggagaatcaggcagggaggttgcagtgagccgagatggcagcagtacagtccagcttcggctcggcatcagaggg

SEQ ID NO: 12884 - DNA, 902 bp, Artificial sequence
  DNA replication origin
agtgccgagattgcagcctctgcccggccgccaccccgtctgggaagtgaggagcgtctctgcctggccgcccatcgcctgggacgtgaggagcccctctgcctggctgcccagtctggaaagtgaggagcgtctctgcccggccgccatcccatctaggaagtgaggagcgtctctgcccggccgcccatcgtctgagatgtggggagcgcctctgccctgtcgccccgtccgggatgtgaggagcgtctctgcccggccgccccgtctgagaagtgaggagaccgtctgcccggccagccgccccgtccgggagggaggttggggggtcagccccccgcccggccagccgccccgtccgggaggtgaggggcgcctctgcccggccgcccctactgggaagtgaggagcccctctgcccggccaccaccccgtctgggaggtgtacccaacagctcattgagaacgggccatgatgacaatggcagttttgtggaatagaaaggggggaaaggtggggaaaagattgagaaatcggatggttgccgtgtctgtgtagaaagaggtagacatgggagacttttcattttgttctgtactaagaaaaattcttctgccttgggatcctgttgatctgtgaccttacccccaaccctgtgctctctgaaacatgtgctgtgtccactcagggttaaatggattaagggcggtgcaagatgtgctttgttaaacagacgcttgaaggcagcatgctcgttaagagtcatcaccactccctaatctcaagtacccagggacacaaacactgcggaaggccgcagggtcctctgcctaggaaaaccagagacctttgttcacttgtttatctgctgaccttccctccactattgtcctgtgaccct

SEQ ID NO: 12885 - DNA, 1312 bp, Artificial sequence
  DNA replication origin
cctgcacaagaagccccagcggggccgtccgactcgggcagatcccgccctcgcggagcccaccccaacggcctctcctggctctgcgccatcgcccgccggcgacccctggcagcgcgcgacgaagcatcgtctgggcacggagcaccaggagcgtgccgcccagtccgacggtggggccgggctgccgccgctggtgtccgacccatgcgacttcaacaagttcattctgtgcaacctgacggtggaggcggtgggcgcagacagcgcctcggtgcgctgggccgtgcgcgagcaccgcagtccccggccgctgggcggcgcgcgcttccgcctgctctttgaccgctttggccagcagcccaagttccaccgcttcgtctacctgcctgagagcagcgactcggccacgctgcgcgagctgcgcggggacaccccctacctggtgtgcgtggagggcgtgcttgggggccgtgtctgccctgtggctccccgggaccactgcgcggggctggtcaccctaccggaggccgggagccggggcggcgtcgactaccagctgctgaccttggccctgctgacggtcaacgcgctgctggtgctcctggccttggcggcctgggcgtctcgctggctgcgtaggaaactgcgggctaggcggaagggcggggccccggtccacgttcggcacatgtactccacccgacggcccctgcgctccatgggcaccggcgtgtccgccgacttctcgggattccagtcgcaccggccacgcaccaccgtgtgcgcgctcagtgaggcggacctcatcgaattcccctgcgaccgcttcatggacagtgcgggcggcggcgcgggcggcagcctgagacgggaggaccgtctcctgcagcgatttgccgactaggtccagggcatatagagaccatctcattggccctaaggagccgcctctccgtgaggcccaccagcccacctcaggggaagtgccgttttgtgcacttgccagagaggccggtggggacagagggccaattcgggcaccatcccccaattcccaatactcgagaagtaaatggatggtacttggtggtcagagccagagtaggggacaaatggatggtgggatgctgaggtcggaggcttcgcttggaggctttgacacagctatgcgaatggcttttgtagcactgcaatgcagaagccaggctttgggggtagaaagggggtgcttgtgcccccaacatggccagaaatatttgggtgcatgctttttgtttgctcagtgtcaaacagagaagttttgtttcta

SEQ ID NO: 12886 - DNA, 1021 bp, Artificial sequence
  DNA replication origin
ccgccgactcagccttagggcgctgcggttgcctaccagctccctggcggccccatcccaggccaccccagctagaaatcgcccctgctgctggagctgcggctgcggcggcagctcctccgcgagacctgcaggtggcgtcatctcctcccctgcggccgtgggtaggggctgccgcctgcggtcagcggtcagggaagctgagggcgagggatccgcgcaggatccattttgcagctgctggtcatccaggtaatccaggtatttgcctcgcagggccggggggtggcgacactgcacgaagacagtgaggagccggccctgcgagtgccagtcgcccatccagcgcttcaggcctcgcagccggcagtcgcaggtccagccgttgccgtctagatccagccgataaagggctgggctggcggcgaagatgtccccggatagggcgctgagcgcgttgttgcgcaggctgagctcgcgcagccggcccaggtggccgaaggtggccgggtgcagggcggacagctcattgccgctcaggtccagcgcctccaggctgtgcagaggctccagcagcgcagttggcagctggctcagccgattaccctccaggcgcagctcgcgcagggcctccaagccccaaaaggcctcaggcgcgaggtgcgtgagctggttgcccctgagcgagagcaggccgagacgtggcaggtgctggaagatgcgcggcccgaggtgctgcaggttgttggccgagaggatgagggaggagagggagcgcagcggtgcgaaggtggccgcgtggcgcagggagggctgtagctcgttggcagagaggttgaggaagcgcagcttgcctagctgggcgaaggcgttcttgcccagaaagcggatccggttggactccagatgtaggtagagcaggttgcccaagggagcgaagaccgcgtccggcagcgcccccagggcgttcccgtccagccgcagcttgactagactctccaggccctcgaaggagccgcgg

SEQ ID NO: 12887 - DNA, 1300 bp, Artificial sequence
  DNA replication origin
agcggccggatcgtcctcttggcccgccggctctgtgtctcctctgcattccccttagcctggccagagtcgctaaatggcctctttcggacttcgcagcgccgtccagcccctcctccgtcctttgtccggaggccggcccgggtctctgcaggcgggcttcgcccggccaagtcaggcggcgcggggcgctctgcagaccccgggtactacttgttgcatttctgtataaaactgtttctccgggtgcgcgtcggcgggcgggaggagggagcaagacccggcgctttttgtttgcagctgagtccggagagctggattccctggcgcggattctcccagccgagtggattccccagctgcaggcgggagccgttccaagagcttcgcggggcgcggcttggcagcagagccccggctgctcggcccccgcagacggcaccttctcgctcgcggtcccggacggggagggcggctccagtgcaatagctcggggagcacgcgggctgcgtccggaagggacccaagtctgcgagcggagagcaaacggggcggaaattcgttcttcccacactctgcccgcggggacgcaggcggagaaagaggagacggcagagggaggacagaccccggcagggggaggaggaaacactaagtggctccgcgtctggtcagcccgggcccgggatgccaagtgagaaaagtagggattaaaaacagctgtacgggccggacacgctaggccgggggcgggggaggattaccgggctagcaaacgggatttgcagacagagacctttttattttagacgagtacaccagccgcttctgagcagtgggagcgcgcctggccttcctcgttgttaagtcacttgctcttccaggtgccaccctgcgggaagtttgggcagcacggagtccgccagcattctacaggaagtttgggggagcacaaggttgcctgcagaaggccatcagaagggggtaggtgaacccagtctgacagttgctgcttgggttttgacgtcgttggactagtagctgaggagaggcaccacccccttttaggtgtctgaagggagtatttactccatcctgctgtgggctagaacatgaagaaatcacagaactggttctgccaacatgaaagtgtctctgccacattttggtgattcagtcgcattaactctcctacagtaatagagcccctggggtaggctctgctcgtgtgcacatacataataaccttcacagatcctaaggtaaacgttccttgcagggccctcctgctttacgcctg

SEQ ID NO: 12888 - DNA, 1015 bp, Artificial sequence
  DNA replication origin
gggacgggcggatctcggctcccgccgagcccctctgccgtccacgctcccctgtgcgcggctgggaccagggcgtcctggcagctccgagccgccccgccagctcccgcaccctctcctgggctcccgcctctcccgccgcacttcgagtagaccgggcagaggcggcgggagacggacagacagagcgacctcccccttctccctccgccccaactccgctcgcgcacacacaaaggaagaagaggagacgcggtcgctcggggggtggttcggctgctgcgggcttgacagctcccgccactggggctggagggggaggctgcggactgctggacagggggaggcgggacgggggaccgggtccccggggtgctggggaggccggggccgggcgcggggcgagcgcggctgctgcgcgcagcgctgctcctaggatttgaaggggatggggagggagggtgtgggggaaggtggtggggctcaccgcgccccgccgggctctcgagcagcgagacagtgggggtgggggatccagagggcgaaggcgggatcactagggccacggtgctaggcagaagggaacctgggatgacagagccactatggagcgctccttccactcctctccaaattgtcctttgttgctctggagctgacggtccctgccctgcaagaaggtgcgtttcctaaaacacccgggaagccaacccagctacacttaagtaacccagccacggacagtgcccgacgcgtccgtgggcctctgaggttggccttcaaagaaatagagccgtccaaacgtgtcatcaggcccacacaaagctggtgtcaaagagaaagaggttctccgtgccttgcaaaaaaagattctcacaaaagacttaagacttggcagcaggtccgactgtgccctttcaggataggaactgctcaggtgtgtgagagaaagagactcgagcacaaggtgtgtcccttccccctgtatttaaacctaaattaatttcactgggag

SEQ ID NO: 12889 - DNA, 1325 bp, Artificial sequence
  DNA replication origin
gggagcgtggacggcagaggggctcggcgggagccgagatccgcccgtcccggctgcccctcggcctccctctgctcccacctaccccctgacacccatagaaaagcgtgcaaaggcgcggagcgggacggaaaccacaaataaatagcggcggcggcagcgcgtcatctggtggagcaggaagtgcaggcagagtccggaggctggtgctttctgcgcgtccccaggactttgccatgggctgggggccgcggaggctgcgagcggccgggcgagggcagcggcggcggcgtccgcaccggggctgagcgagcagcgacgcgaggggcgcgcggagatggcagcgtccagcaactccagcctgtccggctcgtcggtgtcctccggtgagtttcagcccgtcgggcgctgctgccgcgccgggtctcgccccactgccctcgccccgcagcctgggatggacagagcctacctgtggccatcccgcccgctctctcggaatgggggcaggcgtccggggtgatacttgtttggttcgccagcacctcggtgcccagagcacctccgcgcctgacatctgacagcgcagaggtgggagagcggtggtgcccttagtgtgcggacgcgggtgttccggggcttggagtgcagcgagcgaaaagcgaaaggagcgggcaggctcgcactttctggcgcagctggagcgggggctggcggggcggagaaggttggggtgaagcagagcgccccgacctgtttgccgtgccgcgcccgctaccctggacacccaaatccggagcagaggggagcaaaccctcgctcctcgcagacttgattttctttgtttgtttcagaaattagctctatggagacactcgcttgggcatgggttttagacagcagcaatgaagggatgtatctttctgatcctgattgaagtgggttaggggaagagaggtcgagcccatcctctgactcttggcacatttacgagagagagagagagagagagagagagagagagagtgtgtgtgtgtgtgtgtgtgagagagagagagagagagactccttagagattttctgataatagtggctgtaatttcactagcaaggcatgcattttttttccttttaagaatggttgagcaaagggaaggcttctttcagcttttctatggttgatcatcgggtctaattgaagagaaaaaaattgctaatgaatctgaaggagtaggaatcaatagaggcagacccactggtttctgagtatgacaggtttctaatcagaatgatgcattaggtagaattcctgtacctctctggtc

SEQ ID NO: 12890 - DNA, 934 bp, Artificial sequence
  DNA replication origin
tttagacagcagcaatgaagggatgtatctttctgatcctgattgaagtgggttaggggaagagaggtcgagcccatcctctgactcttggcacatttacgagagagagagagagagagagagagagagagagagtgtgtgtgtgtgtgtgtgtgagagagagagagagagagactccttagagattttctgataatagtggctgtaatttcactagcaaggcatgcattttttttccttttaagaatggttgagcaaagggaaggcttctttcagcttttctatggttgatcatcgggtctaattgaagagaaaaaaattgctaatgaatctgaaggagtaggaatcaatagaggcagacccactggtttctgagtatgacaggtttctaatcagaatgatgcattaggtagaattcctgtacctctctggtcattgaaaactttaatgacaaacccaaagggatagctgataagacatttagggtagtatacagtatttaagggtcaagaaggtcatgaagtcctaatggaagtgcttcaatatattaatattgtattaagtcccattgggctgtttttattattattcgcgaattaaactcaaaggaagaaacacctttttggaggcattggatagcaagcagggcaaaaaggcaaccacagctttagatgtgtaactcactaaatcataaatgcaaggtgaatttgactaaggtgcaattgtgatgtggcacaaggtgatcacttgaaagccatctgttatctttcttggcagatttacttcctgggaaatggcacttcctttctcgatcactgccaactaattgaaaacacgttgttgttaggtgtgtgatatagttcaagtttctagtagtggcagccaatggggcagaagtcatatcttattaagagcagcaacaagttgaccgccg

SEQ ID NO: 12891 - DNA, 1493 bp, Artificial sequence
  DNA replication origin
cccgctctcaatgagctgttgggtacacctcccagacggggttacggccgggcagaggggctcctcacttcccagacggggctgctgggcagaggggccccccacctcccagacggggtggtggccgggcagaggggctcctcacttcccagacagggcggccaggcagagggggccccccacctcccagacggggtggcggccgggcagaggggctcctcacttcccagacggggcagccaggcagaggcgccccccacctcccggacggggcggcggccggatgggggctgccccccaccccccacccggggcctgccccccagctcccggatggggcggctggctgggcgggggctgcccccccacctcccagacggggcggctggccgggcgggggctgccccccagctcccggacagggaggctgccgggcggagacgctcctcacttcccagatggggcggctgccgggcggaggggctcctcacttctcagacgaggcggccggtcagagacgcccctcacctcccagacggggtcgcagccgggcagaggcactcttcacatctcagatggggcggcggggcagaggcgctccccacatcccagatgatgggcggccgggcagagacactcctcacttcctagacgggatgacggccgggaagaggcgctcctcacttcccatactgggcggccgggcagaggggctcctcacatcccagataatgggcagcgaggcagagacgctcctcacttcctagacagggtggcggctggaaagaggcgctcctcacttcccggactgggcggccaggcagaggggctcctcacatcccagacgatgggcggccaggcagagacgctcctcacttcctatacggggtggcggccgggcagaggctgcaatctcagcaccttgggaggccaaggcaggcggctgggaggtggaggttgtagcgatccgagatcacgccactgcactccagcctgggcaacattgagcactgagtgagcgagactccgtctgcaatcccggcacctcgggaggccgaggcgggcagaccactcgcagtcaggagctggagaccagcccggccaacacggcgaaaccccgtctccaccaaaaaatacgaaaaccagtcaggcgtggcggcgcgtgcctgcaatcccaggcactcggcaggctgaggcaggagagtcaggcagggaggctgcagtgagccgagatggcggcagtacagtccagcctcggctcggcatcagagggagaccatgcaaaggggagacgaggaccgtgcaaaggggagggggagaggggagaggggagaagggattcttattttaaattgtggtaaaatacatataacataaattttaccatcttcacgatttattttaagttccggggtatatgtgcaggatgtgcaggtttattacataggtaaacgtgtgccacggtggtttgctgcacctgtcaacccatcatc

SEQ ID NO: 12892 - DNA, 881 bp, Artificial sequence
  DNA replication origin
ccgtctgggaggtgaggggcgtctctgaccggccgcctcgtctgagaagtgaggagcccctccgcccggcagccgccccatctgggaagtgaggagcgtctccgcccggcagcctccctgtccgggagctggggggcagcccccgcccggccagccgccccgtctgggaggtgggggggcagcccccgcccagccagccgccccatccgggagctggggggcaggccccgggtggggggtggggggcagcccccatccggccgccgccccgtccgggaggtggggggcgcctctgcctggctgccccgtctgggaagtgaggagcccctctgcccggccgccaccccgtctgggaggtggggggccccctctgcctggccgccctgtctgggaagtgaggagcccctctgcccggccaccaccccgtctgggaggtggggggcccctctgcccagcagccccgtctgggaagtgaggagcccctctgcccggccgtaaccccgtctgggaggtgtacccaacagctcattgagagcgggccatgatgacaatggcggttttgtggaatagaaaagggagaaatgtggggaaaagaaagagagatcagattgttattgtgtctgtgtagaaagaagtagacctgggagactccattttgttctgtactaggaaaaattcttctgccttgggatgctattaatctatgaccttacgcccaaccccgtgctctctgaaacatgtgctgtgtccactaagggttgaatggattaagggcggtgcaagttgtgctttgttgaacagatgcttgaaggcagcatactcgttaagggtcatcaccactccctaatctcaactacccagggacacaaacactgcggaag

SEQ ID NO: 12893 - DNA, 1825 bp, Artificial sequence
  DNA replication origin
cccggcgggggttccccggccctcccacgccctcaggatctctgtcccgggccgggccactctgctccgggaccgaccagggcggcggccgccacaccgcccgttccttccaccctcgggcaccgacccgcacccgcgcgggaagccgctacctgcaggtggcggagccgggggctggactggactcgagctccggccgacgtctccgccgccgccgcctccggctccgggctccgtcccgcagcgcccgtgctccaagcggcgccgctaccgccgagctgcgctcggtgcgcccggctcgctccccggccaccggctctggtgctgccgggacgcggaggcggggccgccgcccccacctgctcgcaggctcctgcctgggagccgccgccgccccgcggcagggacacggccccggcgggcggggtcgctctgggaccctggaggcgggtcccaagtcggcgggcgcgcctcccgggtacagagtcccaagtctcagctgcggagagactgaggcctaaggctggaattccccaaataggagctgttgcgcgggcggcacacggcccagcacagctactctggggacacgccactccttgaatttattccaaaatgttgagcccttactaagctccaggcggtgtcataagcgatggggacgagagaacaagattacctcttgccctcgtggagttcacagtctagaaaaggaaagcgaccaatgggcgattacagcacaaccaagaggaggcagaggcctcctgagccggctcccagagggagcacctgatctaaacttggggtggggagtaggtcagggagggcttcttgaggagctgacgtcgacgagaaaaactgaagactgagtgtgaattagccaggtgatgagagaattatccgggtagcctggggaggtagattgatgtcccaggtagagtcgaagggaggagaaagcagactgaaaactgaaatagggccgggcgcggtggctcaagcctggaatccaaggactttgggaggccgaggtggacggatcacttgaggtcaggagttactagcctggccaacatggtgaagccctgtctctaccaaaaaatacaaaagttagccgggtgtggtggcgctctctagtcctagctactcgggaggctgaggtggaaggatctcttgaacccaggaggcaaaagttgcaatgaaccactgcactccagcctgggcgatagagtgagaccctgtctcaaaaaaccaaaccaaaccaaacaaagaaacaaacaaaaacaaacctgaaataagcttgaagaacggaaaaccttgcttctgtcacatttcttgttcaggcccttggaggatgcagaaagtttgtgtccgaggctgaatgcattgctgtaggtgctgagatcattgggtgaggattctgtattgcccatgtcctgggcattcctgctagtggaggagctaagcgggtactcgtggactgttcactcagcctcggtgtttgagtatctgccatgagccagacactctgcagggcctcagggcaaggtgtctaactctaaagttgctgctggtctggaatagaggagaaacctggcgctcagcgctgtgctgaggcttgtgtgaaatgttggggacccaggtgagggagcagccaatgccagcagggaagatctcacacgtggattgcagcctgtattcaggttcaagttctgtagtggctgctgtcaaagtatgttccccaagcagcccttagctgatctcttaattactcatgtttgtagctgggcaatgtgtcgaaagcaaggattaataatacacttttgat

SEQ ID NO: 12894 - DNA, 880 bp, Artificial sequence
  DNA replication origin
agcacgggcgctgcgggacggagcccggagccggaggcggcggcggcggagacgtcggccggagctcgagtccagtccagcccccggctccgccacctgcaggtagcggcttcccgcgcgggtgcgggtcggtgcccgagggtggaaggaacgggcggtgtggcggccgccgccctggtcggtcccggagcagagtggcccggcccgggacagagatcctgagggcgtgggagggccggggaacccccgccgggctgcagccccgggcccaggaggttgtcgacgtgccgcgcggcgctcacgccccccacccgcaccctgccacgccgccccggccgggccgggccgggccgggcggaaacaaaccgcggggtggggagcgaggtcaccacggggttgcttggtgacttctccggactggactccccggtgagcagcccctggcaccgaggccgcctcggcctggtccttcgcgacgctctctcttctccgcttcgcccccggaacaaaaggctggggtctcgctggggagggggctgtcgcgggaagggctggggcggagtaaaagagagctaggaaattgcagagccggaggtggcttggggaatacagaaggagccccctagtgaggaagccaactccagagatgtgaagtgacttgtccaaggtcacacagctcatggggacagagcgcaggtctctggacacccctcccgtgctcatctccaagcccctggggtcagtagtcagactgtgctccagcaatgtacatttggccacaaatgggtttagggtcctttggaggattaggtggtgggtaggtaggtggcagagcagatttcccccagcccctgacacgcactctctgaaggtggcgggg

SEQ ID NO: 12895 - DNA, 1173 bp, Artificial sequence
  DNA replication origin
ggctggggcggagtaaaagagagctaggaaattgcagagccggaggtggcttggggaatacagaaggagccccctagtgaggaagccaactccagagatgtgaagtgacttgtccaaggtcacacagctcatggggacagagcgcaggtctctggacacccctcccgtgctcatctccaagcccctggggtcagtagtcagactgtgctccagcaatgtacatttggccacaaatgggtttagggtcctttggaggattaggtggtgggtaggtaggtggcagagcagatttcccccagcccctgacacgcactctctgaaggtggcggggagggcgggcacccggccgccctggacctggaggagcgccgcccgggccccgtgggcaggcaggcaccggctctcaggaacagcgcctttggagggtggcgtgccagccgcgtgggtgtgcccgtggcgggcgccggggcggcgtggggaccgtgtgtgcgcctccctctggaaagaagtttctgcagggaaaggccaggagagcggttccatgcgccctgggacagtgtggccaatccctgacactcagggcgctttgtaactggctgtattggggaggaaagttactctgtagcaggaagttaggctgtctcttcgcctctgtgcctggggtccttggctgtaaatgagggccttgtttggcatgaccagtgtgatttagaaggtttgtgcccctccgcctcctcctttccagaatcttttctcacttcacagggaggactgggagtgcacttcttgtgcccagcattaatagttatcactgggactcctgcctcccttcaattttttttaactttatcattacgaaagaggtcagaggagaggttgtttttgggccttgcaaggagataaactccaggtcaatacctggacaggacatgagggaggcttctgggatgctagaaatgcttctcaccttgacctaagaattactgaagttatacccttgagacttgtgcacttaacgtaaattctacctcagtgaaaaagtaaataaaaatgtgatgctaaagtccactcattgtggtaacacacagattgctgcagttttccagctaatgcatttcaaagatacatttaaaaaccacaaaaaccaaatcagaaaagaagtggcgaggaggg

SEQ ID NO: 12896 - DNA, 992 bp, Artificial sequence
  DNA replication origin
tggcaaagggggcgcgggcaaagaagccctcggggagcaagaagcataaggggggagcgggggcggcggggcgggaggctcctgcgcatcttgcgcagggctggcgggctccgctttgagccccggatacccacaaggtgggagcagagggagcgggggcgggatgggcgggaggtgcaagggagccagctgaggcttcactgccttgtcactaagaaccgaggccgggggcagcgggggtggcgttgggggaggtggcggaggtggaggtggtggcgcacaggggacggggggtgcaaccaccgggaggttccctttggtcagtgggccgggtggggacacaagcggagttttgatgggggaggaagagggaaggggcgggggtaagggtggaggcggagggggtggggtgggagggggcggggcaggcacgttggggcgaggcggggctgtcctggcagcgccatgcgcctcggaggtattgcctagcctgggagaggcaggcgggataagcgggccgctgatggttttgttgggaagcctgggagagggcgcgcgggagccagggccctgccctgtcttgccacctggaagtgaaagagattctgggttagctcggcaataaagaaggagaaagcccccgcaggtaggcggcactcaggacactcaagcctgcccgcagtgagctgcactgtagaccgctttttctgcacgtgtccactgagaggcctcaggtgccacagctgtcacccagaaggaccaactggaccagatccaaagtccttgccagcattaatgacaagcccaggtcaggcctccagccctcctatccatgccacctgtgctgtcatctgccttgggcctctagtatcccagccagggccaggactgcccgggtgtcttttgcccttcctaatcaaggccacactcacgaactcattcactgacacccgctaggtccatcagcccttatgctctaatttggaccctca

SEQ ID NO: 12897 - DNA, 1391 bp, Artificial sequence
  DNA replication origin
ataaaacacagaacacaaaactgtatgtgaaaaatggtattaaccatgtaaacgtgtacatatattcagaaaaaagaattgaagaaacctatccaaatggcagttttcatctctgggtgatgttattatgggtgattgaattacttaatttactcagagacagcagcatctggctctgtcatccaatctggagtacaatggcacaatcatagctccccacagccttgaacacctagattcaaacgatcctcctgccttagcctcccaagtagctgggactatagttgtctgccaccatgcccagccaattttttatttttattttctgtagagatggggtttcgctgtgttacccaggctggcctagaactcctgacctcaagccatcttcatgcatgggcctcccaaagcagtgggattaccggtgtgagccatccgtacctggccagtttgaatttccgtctattagctctgcaacaagcttgcgttatttttaagtcaagaaaatacttttaagaagctttctgcatcaaaagattttctaaaagacaaaggaatatgtgtgttgggggtgtgcatgtggatgtgtgtgttatgagtgtgcatatgtttgagtgtgtctgcctgtgtggatgtgggtgtatctgtggacgtgtggaggtactttccattcacaggggcactaaaactgaatgaagcctcctactagcgggatcaaggaaatcagccatggggcatgaacgctcaattcaaataacctgtgctgcatatgtgaaggaattatttttaatatttggctcaaaatacaggccctcagttttcttgagtcagccggagaacctgcgaaaactaaggcagagtgggaatccagtttactgagggccggcgaagattctggctgggatccagataggaaaacgcgggcaaatataaaaggaggcctggttctggaaacaagccacactcacgccccctccacctcagggaggagattgggagttggaaggttggtagtaagaataaataatccctctcaagctcactgttgccctgttccaagcacctcaaacctaagaactcacttaatccttaacaacaaacccaggaggtaacaactattgccatctatccccattttacagatgaatagaagggagaacagagaggccaagtggtcgcccagggccacagagctagtaagggcaggggatcaaggccgggatcccttgcttacatgcagcatgattttgggcaagtctctctgcctccctcacccctggtgtccatctctgaaacgaatacctccaacaataaagtcctgtgcaacgacgagattttatcgcactccaccaggggcactgggccaggcagcgctccttacctggtcggcc

SEQ ID NO: 12898 - DNA, 1100 bp, Artificial sequence
  DNA replication origin
accgcagccgggttccccgcgctgctcttcctgggtttccttttcctggcagccaacctgctgcccactgggatgtgcctgtgggcccctggcctcgccaccctggggtctggggcgagccgggcaccttccccgaggtgccgtacctgctgcgcgggcgggcgccgcgaacatggctgcccggagacgcccgccgccttcggcccggctctgccagcgcgtccaactcgcccgcggccgccgcaccgtgtcccggagcagccctccccgctaggccgacgcgcgcgggccgcccctgggttctccgcgggccgcgcgtgggacttgacacaacttccctcgagccgcacccgggcgttctccgcggggcgccgggcggggctgccgagaggccggcttggtcggcctctgcctcctcggctcgctcttgaggcgtcgagtatttggcgacctcactcgcgagggccgagagaaatgtggtctgcaaagcaggaggggcgcttgaactttagagaattggcgagaactcggatttgggaataaaaatgtccatgaaaacatcgaaggaaactgttacctgctttgactcaaagctgaccttgtagggttctgttaaataacgtggcttttctggattttctgtctgattctagcatgcaagtccttgacttacgcttgcgtccggcagccgggtggggtgggtgcgtgcgtgtgtgtgtgcgcgtgtgcgcgtgttgtgttcccagcctggttagaagatgcatcagttgcggaggaaacctatgctaattcaaaatggcagcatgaaaaataggccaggcggaagcagcacagaccacaaccatcagctgccccctgacttaagcctcagggagggaattagtgtgagtcaaggctcatccgggtatggagtagagagtgattcttggagctggctagattttagggtgctgcagggtcctgggagttgttaagtgggaagtttggagagctgtaattatttttcctaacttatcaaaagatgatacaaaacctagttaaaactctacggttttgtatgattttctccaggctcaactaaagttgactctgtggctgct

SEQ ID NO: 12899 - DNA, 985 bp, Artificial sequence
  DNA replication origin
gcccgcggccactcggcccacgcccgccggccccctcactgccccaggccccaagaggcgaggagcaccagcagcagggccatcgcctggcgctgcccagacgcccactcccggcgcccgggcccggtgtggggacgcccggcccgcctcacatcctcggcccgggggcggggtcactgcggcggcctcggcgcttgaagcccagccagccggtgaacccgtggggcgaagccggcacgctgttcacaaggaggcccgggtccgggccctacgtgggtcggaggggcagccgaagcctccaaagtgcggcgaacgagctgccggtcgcaggcggcgccacggcgcaccacctgaaccctcgactcgccgggcccgggacgcgctcgcgcatgcccagggcgccgctcgcgcgccccttcccaaaatccactccgggatttcgcggcagcggcggcggggcggagtttgcgggaacggcccgcagggaaattgagtcccgagacgcggactgcggactaggcgacgggaggagggaggcccctgagacaagtgtggagcgcagttctgactgtaaatggtgcccgccgtttgagggtctacgtgacctctcacgatacctcctgagttctagtccctattcttgttccaaagctgcctaattgatctcacacacttgaggtaaccaataacagggcgtaaagagattattggaatttcagggtagaatactatgaggccagtgtaaacagatgttgtccagactctaaggtctcactatggaagtgttgatctactgacccggagcactgacatcacctaagagcttgttagaaatgcagaatcttgcacccaccccagacctccagatcaaaatctgcattttaaacaagatcttcagggggattcctatgcacatagagtgcggatatgcactgtgttaaggttattagaccagaaaaaatgttaactacagattaagtggaaa

SEQ ID NO: 12900 - DNA, 1096 bp, Artificial sequence
  DNA replication origin
gcgagcggcgccctgggcatgcgcgagcgcgtcccgggcccggcgagtcgagggttcaggtggtgcgccgtggcgccgcctgcgaccggcagctcgttcgccgcactttggaggcttcggctgcccctccgacccacgtagggcccggacccgggcctccttgtgaacagcgtgccggcttcgccccacgggttcaccggctggctgggcttcaagcgccgaggccgccgcagtgaccccgcccccgggccgaggatgtgaggcgggccgggcgtccccacaccgggcccgggcgccgggagtgggcgtctgggcagcgccaggcgatggccctgctgctggtgctcctcgcctcttggggcctggggcagtgagggggccggcgggcgtgggccgagtggccgcgggcgccatggagggggtgctgtacaagtggaccaactatctgagcggtgagtggccgtgccgggccgggggcgcgccgggggccggtcctttgtctgcgcggctggagggcggtgtctggacccgtcttagggagggggtcacggccctttcctgaggccagcgcggagcgggagtatttcccaaagcagttctctcacgggaccgtgtcgccgtgcaggacgacacggccctctcttggggttggttaagagctgtggctgccctttcgcttcaaggaaggctacaaagactgagattttgggtgacttgaaaggcacggtgctcttgatgtcagcgggaggaaggcgcagacgccccgccgtggggttctctgggaatctcttgaattttggcgaaggaaccgtactcccttggctcgcagctaggttggaaggtttcaaaagaatgccagcagtaacctggaattccacagcggaaagatcctttatcaaagtcctcagtgcaaacactttccctttgtcaccttcagagtcatctgcgtgcacaccagggtgtcaagagtcccaactccacagtttcaaagctctgcacaaggttttttattttctcgttgagcatttccttttgttttacagactcagaaattaccgttaaatgaatgcaaatatttgcaactttcttgccgtgc

SEQ ID NO: 12901 - DNA, 2158 bp, Artificial sequence
  DNA replication origin
agcagctggccgacgttgcggagaaatggtgctccaacacgcccttcgagctcatcgccaccgaggagaccgaacgcaggatggatttctacgccgaccccggcgtctccttctatgtgctgtgtccggacaacggctgcggcgacaattttgtgagtgcctggaggagggaccgccggagccggcgggagtgtggacgcggcggtgcgtccctgcgcccgagctcccgcgcggtgggcggcggtgggcgcagagtggggggccgtaacccgcgccccgcgccccgcgtgctccgccggggaagccccgggccgggcggtgcgggctccgctgcccgggtggggcccggtgggcggcgggcaaggcgcccggaggatccggggagccgggtcggggcgggaggtgtggcgtccccctaaaggccactcctctccccgctgctgcgggcgccgtttcgggaacccgacctcgcggcccgtgcgcggtgcctggcatggagcatccctggggtgtgggtgtcacccgcgtcggaccagccgggtctggggcgcacggaccctccggcaggagcccaggtccggagcttcccacatccaggcgtcccgtccgggataggaatcccgctcccctccggtgcccagcctcggctcctcgcattgcccctcccgggagaaccccactccccgccctcgcgggttagtccttgcactgcctgtttggacacaaagctctgtccatactagcgatgcccgatctcctggaccttctttgcggaattacaccccggatcttaatacgcacgcgcgcctgcgcatacaccccaacacacacacacacatgctcacaccctcaccctcacacgcgcacactcacgcgcacacgcggcacgcctctccccctgcccccgcgctgccctcgctgcctctctgagctgcccgagaggtgtgtgtggcccgggcgggttctctccagccgaggcggtgccctggccctgctgaagcccgttggcttttccagatgacggggaatcccctcagccccggctcagagggaccgggaactgggactgcggtgtccaaaccttccactttgaatcctgcacccacctgggatcccgactctggcagttgaggaaggggatgcggagggcaggggagtcggggtgggaggggtggagtagggcgagcacggtgctcatgaagtgtttccaaggtcggggaataaataatgatccccaaatgtaagatggaggcggccgtgggcgcgggtgaccgtgtggtcgcgggccttgtgggcggaggtggggtggtgcggggcgcggcctggtgcacgctcctcaggtgggggagacaaagctgggccgtggtcctgccgccgagcgccctgaccacctacgggaagttcgcgaaggagttagggagactgcaagaccgcctttcttggtcctggagaggtgaaggcttatgtatgcctggccgataaagcattccctccgcccacacgcaccccctgaggagggcagggatccacctgggcattccacaagtggcactccagaagagggatggccttgtgtgacagccagatttgagttctggctctgtgactgtgctcaaatacccaccctgagctcagtttccacatccaaaaaaataggtataataatgccagcacccaggcgttcatataggtaacgcaccgaatagtccctaacacacagcaagagccccacaaatttggggttagagacctggggtttcccagaatttagagcttgtctcattttttaaagagccttggttttcccacctgtaaaatggggctaatcagaatacctccagaagagccaactgaacaataatattaatgcctgtaagcccatcttaactgtaggtaaagtaagtaaataagtgttctttttggaaggagtgggagatcattaaaaagggattcactccattgcaaaagtgtgagaaagcccccaggatacagtggaaagggcaccagaatccagctgactgtaaaatgttagggtttggctagggtcccttccagctctgggcttccttcatctgccagcgccctttctccctcctgaccgtgtgaaacagggcaagaatggctcatggttctggatttcactggggagaagcccaca

SEQ ID NO: 12902 - DNA, 1261 bp, Artificial sequence
  DNA replication origin
ccgctctctgctgccgcgctcggcgcccccgatctcggcaccgcctcctctcgggcggccgctgctaccgccgccatcctccggctcccacggcggctggcggctgagtgggaggcgcccgcccagactccgccggggccaccttccctcctcccccagccacccagctgttattaacggagaaagaggaaaaacgggtggcgcgcgaggggagaacgaaaaatgggagggagaggtggcgcgcgcttcccggcaaccgtcgcctcgctccccctgcgaaggaggggccgggctggcgggaggatctgggccgcgaaggcggggggtgcgcagatggggaggaggttccccggccccgcgccggaaggccgcggagcggcgcggctgcagggtgcgcccggcccgtgtgtttgggtcgcgcgcgttgaccccgcccccgccccctcgtgccgccaggccgattggctcccgccggccttgctccgcctcccccttccgcgacctgcctgcccctgctccgcctcgccaaggtactgcggtgtggtaggtgctgccactcgtggactcggtgatggacaggtctctggccacgccctcccagccagggcgcgcccttgtcttcctcgcggggcctacgccgataggaggaacggacaccgggcgccaaccagaaggcggcccctcctcccgcacgtggcccgccgacgctgtaggagcctgtgtcagctgcagcttttcctggcagggggcgtgaatggctgtgtcctctgcccagagccgtttggtttcggtgggtgttggtgttacacactgattaaaaaaaaaaacagaagctcaaaagccagcttgatctcagacttactcatgaaacaccaacctgggaggaagcgcagagttggaagaactcgggataatccaggttgaccctctgtggtagggcaaatactgtggtgccaggaacgctgcacctgactcacaaaacctagaatctaggcccaacaccaaactaaattatctgtagtgagcaaattattttacttttttggactttaggtttatttttgtttttgtttttgagacggagtctcgctcagtcacccaggctggagtgcaatggtgtgatctcggctcactgcaacctccgcctcccgagttcgagcgattctcctgcctcatcctccagagtagctgggattacaggcacgtgccaccacgcctggctaatttttgtatttttagtagagacggtctttcaccatgt

SEQ ID NO: 12903 - DNA, 946 bp, Artificial sequence
  DNA replication origin
atctaccttccagtagcagcggaggcgccaatgggaccgcgggcggcggcgggggcgctcgggccgccgccgcggggaggttcccggctcaggtgcccagcgcgcaccagcccagcgcctccggcggcgccgcggcggccgcggcggccccggcagccccggcggccccgcgcagccgctccctcggcggggccgtggggagcgtggcgtcgggggcccgcgcggcgcagtcccccttcagcatcccgaacagcagcagcggcccgtacggctcgcaggactcggtgcacagcagccctgaggacggcggcggcggccgggaccggccggtgggcgggagccccggcgggccgcgcctggtgatcggctccttaccagctcacctctcgccgcacatgtttggaggtacggacccctctccgcgcacccgcgctcggtcctcccgcggctgcacgtgggccgtggccgccggctatttttacccttctccttttctccttctgccggggcgccgggggctgcctcccggaccagcccgcgtcggtctccatcctggaagaaacccggcgcttaacaccggcggtgccgctaccgcatagacgcgtggttttgtttttaaacatcctgagcaccctcacctcagcggctgcccagtagagaaagtctattttccagtgagatgactggagcaaatgttgttttacaacaaaccgacgaaacagcccttgtggttgtggtttttagtaccaggaagtcaggaggagaccagttgctaaatgtagttctatctggggactcgagtggggaacagtttttaaaggccaaaagtcaaagcgtctcaaatgaacactgagttaccatgtttggaccgacttttagtataaagctgtaatcctgaaatctgtgtcagtagtcccagttactatgtcattttaattggatgaat

SEQ ID NO: 12904 - DNA, 930 bp, Artificial sequence
  DNA replication origin
gtgctggaggtgcggctgggttttgtcttacagcagaggcaagtaattgtaactcagaaatgcattgctgtctggctgcctcctttctattattgtacaccttgaaggtgaggttgattaattccttttgtggggtttgagggccgaattctaatttttggagctttatgtaacgtcgggagtggattgggtactaaaatgcatactaagacagccttctgacctttcagagtctagggctgtaaagtgtctaagggttgttgccaaaagagccatggactgggctatgttttcatatttgatgaaaaaaagcctaaatgctaattgatttgggagaggttggataaagaaaaaggagcattaaccttgaggaaattgttgggtaggtaggggagggctagttgcggaacgaaactgtaagctggaccgggtgtgaggaggtgaggtgatagaaggattatagggtgggggagtggaggcagaggaagaattgggacctggctcagcctggcgaggagcagcctggggaggaggggagaggttagatgggtccatagaaaaggaggattcacaggactcagagcttggggtggagactgaaggaacagacaggagagaaagaagatttgggatgagtcacattgggagcagagattaggaagggaccaatgtgtaaaagaatgcctggacatcaggcacctcagactatttgcccattttacgacaataattatctagctcatgtaggatggagaaattgaaagtgccgttttctggctatttggaaccattgttgagtctgtattggggtcaaacggtattgcagaagaaaataaggcgtttaggttttaggtcaggtgtgagttgaagaggttttaagttcttgagaacacaggctaagggagaagaagggggaatggagggtggaag

SEQ ID NO: 12905 - DNA, 1204 bp, Artificial sequence
  DNA replication origin
ttcaacggcgtcaagtacaacacgacccgtgagtgcccccggccctcgctgcctgctctacaccggcctcctgagaaggcggtttagggagtaaagaggattccggacccagcggtacaaagctgctgacggccgcggtaccgcggaccgcgggcgttaaggaccccttacagtgttgggggcgcgccttctgcttctacccccaatacagcgtctaatctcagtaagccagtgatttgcccacaattcccgtgctccatgcggtgacagcccaaaaaggggagaaggaaatacttcctcctcttggagtgtaaacctccttccctcattgtaggttcccgttgcctgaagttccccattagggcttcattgtttagacaatgcttcccctgcccaggagggggacctatcccaggagggcggatatgctaagtcccaaatcccccagagtgagtgcagtgaccagaccctactaccagaggggaggaggagggtaggaggcaggagggctggggcgagcgcatgtttcgtggggaggacatgcaggcgtaggttctgctaagccagagggtgcggggtgttgcatcttccctaatccgaggtcccaggactgacctgctgggctgagtcaggggctgtgggcagcattattcctgcgcccccataatgagtggtgtctgaatcagcaccccaacaccatctctcaaggagaacaacctgtgcctgccttcctcctggcaaatcatggactggcttgaggctctggggaaaagggcagtagaggttgctggagttacacagcctccaggtggggtcgttcagtgtgggttctgggtgtgtgcgtgtgggtaggtgcctgtctgtgccctgtggaacatgggatgggagccaggtgtgtggtctgcgggaggctgtgggggcagcaatcactgccccacctagaacccccctgatatctccagccggaccccagttgtcaagcacgctgagaccctatctggattgtttgtctgaagcctctcatcctggaaacatcctcagagtgtctgtgtctgattggtagcccagctccacctccaccacacatacacacacacacacacacacacacacacacacacacaagctttcagaagctgaggctgagggctttgccatgagagatggttagaaggcaagagagatgtacctgcacctgatgcca

SEQ ID NO: 12906 - DNA, 1734 bp, Artificial sequence
  DNA replication origin
acccagcgcgcgagagaaggagcccgcgcagcctccgaccgctcgcctcccgcctaccctcggggtccaggggtggcccccagccgtccaagagcagctcttcagccagcgccaggctgcagttggcctccagcaggctgtggagcagtgccgcgtccatcgcgtcccgcagccgcgtgcggagagggagtgggagtgcgcgcccggcgtgactgcgagggagtggacgcgagagtgagcggccgagagggcgcggggtcctggcccccgccagcccagccccgatctcccgggcagcctttgggcgccacctccggtcgcccagagctgtcaagtggggaccttcccggagaggagccgccgagtgcacggagctgcgggtacagccgctccgccgcggccaatggctgcgccggggggcggggccgggcggctcctctcggaggggctcagtctccagcccccgggccctccaccctgcccaaagtacggcttctcagttcgcagctctcttccactcgcggcgtccagaggagggcggtgggctggagagcgtgggcctggggtgacggaatgctctgtgcggggatcgcaggcccccgagctgcagggggcagcaaagcgcgcccacctgcccgcctgcccgaggagaacaccgcagctctgctaatcgagggacagccgcaacccaaagttcggcagctttccgcctgagcttcccctccctgagcgaggacactggagggaggcagagacggagagcccatgggcagatctgcatcctccaaaagcctccatagcctctgggaaggaaatgtatcgaggaggcctggagggaagcagggagacacccatgagtctaatgagatcaagtggcctgagtgggttgaagtccttggatcagaccgtggaagctggaatggagagagatttcggaggggcagccagacctggtgaggaggaactggagtgggtggctggttttaagtaggagcccagaggcagggataacatcaggtctcctgcttgagtgactgggtggccatttaatcagatggagtaagtctaggggagaaattggctgaaattatctggaaggctttatacacccagttgttagtgccttgggcaccagaaagaataaaggaagaagtgagaatgtgtctctcttcctcaaggcttgggcagggcttcacctgaccctggtttccacaccagtagcggggcaggggcggggagaatcaggccccacagcaggtgtggaggagctggaaacctccccagagaacttgcccaggccccccaccccaccctggcccagaatgcctccttggtgatctgctgtggctgcaccctcagagtgcccagggcgggcctgctgtgtctgccagctgagtggggcattgggctcgggaagcagggcctggggtaaggcatgcttccactcaggctgcattttggtccagcctctgactctgctctccctgccatggtaccccaggcaggatgcttgccctctcttctggagctttctccatcagtgaaatcttccccgaggcccctctcagctctgagactctctggttctgagttatgagacggagagtctggggaagacatacatgtgtgttgtgtgttgtttgtttctatctttagagggcaaggagagctggaacctagtctcagaaaccagtcctgttcccctgccatcctccacataaacctaagctgcta

SEQ ID NO: 12907 - DNA, 907 bp, Artificial sequence
  DNA replication origin
ggtggccgcctccttggtcagggagttcctcagcagaaaggtaacggctcgccccctccaaagcccaggaagtggctctaatttggggggatcatcggggtctcccctgaaggctttgcagcttctgggagggcgcccgttccctacctactgcctgctccagagatgccccagaagagcgccgctttcccgggacaggggaaactacatttcccacgaggcgtttctgccgtcgtcaccgggcgcttccgcaaggcacggtttggaccccgtccgctgccctcctggggcatccgcgctccggggcggcggcagctggggagggggcctgggggccgcgccaagcaatcctagcgcgggcgcacagcgggcaggcctgcgccctagcctggctgccggcctccgtgcgctacccacgcaagtcagggtcccactcggaaagaacttctcccagagggaaccccaaaagcccagaaaagttcttgacggtcaaacccttagtcattttagtcaacagtgggaattccagtggttgctttaatttttgtaagttttcctattgtcttgtcccaggagagtttttgcagtgttcacaagcttggaaggtccttagctgtcatctggcctcagggtggagatggggacctcggtggggaaggagctcgccggggggtcttgggcgtggtagtggagggggacatacattagctcattcagcacatggtgactgagggctgcactctgtgtgttttgtctgtccttgcagtgtcatactgggctagggcgatgggtacttgtcttgtatgaaaacacatacacgtaattttttgaatggaggaaaggggaaggactttgaagtcagacggagacaattcaaatatttgctactagtttgcagtgtgaacct

SEQ ID NO: 12908 - DNA, 1026 bp, Artificial sequence
  DNA replication origin
tctgcctctttggcccaaccttgggacagaaagggaactgggcattggccagagggctggcggacctaagggatgtagccctggggtccgccaggaaaggcccaaagctggggctgcaaggcaggggaggggatgtgagtcattccctgtaacccagggctgcagacaaaggcgggaagagaattgttcttgtaggatggcctcagggtggggctgggaaaacctccaaggtgtgcccccctaccttggattttgcaaaattctctatggccttggagacactcccatatcctgaggatgggagctgggtagtttgtctcccagctgggaagtgtttgggtgcaccagccctgcctgggagaaggcagcctaagtggcctcaagtgggcatctttgcaagtgagcctttgctgatgtggtccatctcccctgtgtgagtgcacttagcccctgggacggccacaaagcatagtggaaggtgctggggcttcctggggaggggtcctccgggggcagctgcatggggagggccttcatgacctcacagcagcttccattcccttctctttccatgagtcatgtttctaaaagtggcccaggagtaagtggcagccagacggtggtggcggggcctatctggccaggcagagggagggtgaggctgaggccagcagtggggaggaagaagagagaaggagagacagggagggcagggccagaagcaatgggagacaggccttggaccaaggaaagagacggggtggagaaggagagagagagggtggagacaatagggaggcaggcacagaggagaaagaggggtggagggagccaggacctcaccgaaggcctcctcagccctggaatttagatgcagtcgggcatggggtggaatgttctggacttttgggtatgaagccgtgtcccctgctgggccttcccacctttttgcatctcttctcctaggagtgctcctgaccatcaccttcatgcctggggctcgccccttgcctctggtcttggtac

SEQ ID NO: 12909 - DNA, 2091 bp, Artificial sequence
  DNA replication origin
gtagaggaaacagcacgtgtgaaggccccgaggtgggaaggagctcggcgtgggaagagatgcaagttagctactgtggttggatcttagggagaaaaggggagcgtagagcgggcggcacccagatcacgcagggtcaggaaagctatgctaaggtttcatcccaaaaggtactgaagtgtgtgatgtgacgaggcttaggtgttttaaatgatcgctctggctggtatacgaagactgaatttcaggcagagacctccgctggaagcagggaggctggaaatggagacacgtactagggtgatagtgatggaaaagataaggaccaagtccaaagctgtctaactcaggggtgaaactgtgtgagagcaagaagacggacggaggcgtcccacaagcctactggaatgaggagagacagagaggagcaagcttttgggggaagagcaggagctcagtttgggcacattgggtttggggtgcactgagacagccagcagggtgccaaggagcgggctggagtgaggagcgaggcccagctcagaagtggagttcatgagtggccagtatattggtggcgtttgatgccaagggcataggtggggccaccccgcagtgagagtgaggagcaggatgagaaggggactgagggctgagcctggagggatccacacattcacaatcccacgggggagcaggagcccccaaaggaggcggagcaggggaaggagtgctcagagaggtgggaggagaaccggatgaatgtgggatcctggggccccaaccaagattgtcccagcgaggggctgctgagccggccgagtgctgctgagccgcctttgtgagaggatttggaggcgcagctcacagcgagagcggatttggcggaggatggactcggaggctgggctcaggggtgctgagagggagcggctggggcagcccaggagaacaaccctttaccgaggctcctctgggagggcggggggagccagaagggagcgggaggagtcatttggttttgttgtaagaggacagcctgtaaaaatgctaagaagtggatatgggagtcactgaaaagtggggggcacgtcatggagcggggtggttgagaaggagtgagaaggcaggtcctgaacccagtgtggggggccttggctgagaaaggggactctgccccagaggctggcaggtgggtgtgtggcctgggggtgggcaggagagggaggccaactgctggctcctgcattcgtcatgaaggtgaggttcctggcctgctgggggtgggcgccaacagggggtgggagtggagagcgggtgggtcttgagagtgcagaagacggaagcagctgcggcagaggtgggaggacaagccagtagggaagaatatacagttgccaggccatgctggcgggccagctcccccaagagcggaaacttggagtgagaccactttttctgggtggaatatctggtacagacaaaagtgacttgggcttattcagggttgggttttgccccaaaggctgaggcaccagggacttgtaggtgtttgtcagagagcatttgtgcaatgccacagggtccctgctggagggtctgctggaagggagtggagtattcggtgctagggctgggtgggggtgcagaggaagagttctaggaggacagaagggtgtggtcagaacaggatgctttgcagcacagctggtgtgacttccagcagtagcatgggctccatgttggtgtgggagggggtgtctgctgggggtcaagaaggtccctgagagaaggaagggcagggactgtgaggtcagtgggtgacagaccatcagcctgggcactgctgtcactcaagacaaaggctggggttgaagggcaaggatgactttcgagccagagcctccagccatgaaggtggggaaggggctgcaggagcctgggggttgcaaacaggaggctggggcagaggtgggatgcagggagtgaggaggggcagaccagagggagagtccagacagggcggggtggagaggactcagggtgcggagcaggaaccgaaacccccaggcactggtcccctgccctccg

SEQ ID NO: 12910 - DNA, 780 bp, Artificial sequence
  DNA replication origin
ggtcaggctggggctgagaccacaactccaagtgtggtctgtgttgagccagccagtgtgccaagggtttgctcccaggtcaccatggctgctgagctgaggtgccctgcaaagagtcaagaggaaggtcgtcccccgcaacaatctctccagcagccagagcccagagcccctccgtgcctgcgccacgcccagcagagccaagggccacgccggtgccatggcaatgccaccactgccagccttccccagtcccgtaaccatgggaatgtgcacagggcctcgggctgattatgcaacgcctctgagggagggagactcgcaggccctgacctactcccagggacgcctgcggggaagctggagcccaagcaagttccccagggaagggagtggcaggctgaaggtcacacagccctccctcacatgcacaacactctacctgggaggggacagccacgaggggaagacaggagagttagggagggagggagggatggtgtgggggatgggcagagagcactccggaggagaattctgacagatggggctagctggccatctgcatgccagcggaaagctccggccacctccagccagccccgggactcagatgttggtatcatggagatggggcagctgcctgatgggctgctctgttgcttccccacagctaaaatctggggcctcaaaaagagaaagatgcagagagacagagagtgtgcaagagcaagccagaagagaaaaatccacacgagagagtcacacagatgaggcaga

SEQ ID NO: 12911 - DNA, 1219 bp, Artificial sequence
  DNA replication origin
acatgaaccaatcagactaccagtgtgttgtgtcaatgggggtcagcggtcattggtcagtaaagagaaacatggacctaggaacctccacgcgtctttctgggccctcagattgcttctttcaagtttccatatggattcctctccatccacaggtcctttcctctttggtagactggcgaccccaaaggaaggctcaaggctctccctcctccttcccccttcttgaggcctcctggacaaggtggccatacctagaacttggacccaaagggaagctgagcgagaatttacttgaatgggcaagaacagagcctggctgcagaactgagagctctcagagactgacgcctgaggcagggaccaaaaaccgagagcagaggcaggcaggagcagctgtgggatgggggctgggtggggtgggcagagggtgagaacttgcctgggagtgggtaactaactactctcagttaagtttgggcttcgctgccaacccgctaggccacctttacctgtgtagttctccttattaagccatttgcactaggaggaggttggacaggactgtaataacagtagcaatagtaatttattcagcatcggcgaatcaatgataccagggagaaactactatggggtgagtgtaccatttttatttaatgctgctgtgaagagacctgggggccggtactattgttcccttgtgcagatgaagaagctgaagctcagagaggctgagccacttacccaagctcacagagctgtggcacagcagggactggagccaggcagtctgatattttaagttgcctctgtcctgtaagcaccaccatccccttcctggtctttctccgggggcgggggggtcacattggaggacatcccgacaggcaccccaaaactagctgaccctcccaggcctgggcggtaggggcaaagaagagcccaaggagggtctgagacttgcctggtaaggaaggcttcttggaggagagggaagacaggctctgatacacaggaaatcttgaggacctagggagaagaaagaaggctttctagtcctggctatgatggagagactggaaagagggtggtgagcccaggaggcccagagtcagaggagacggggatgacagggggctgagggctccacctcagcgcccccgacccccgccgctgggatttcccgccgcagctcctgctccagtctgtgctgcgg

SEQ ID NO: 12912 - DNA, 2112 bp, Artificial sequence
  DNA replication origin
ggccgccagccggccacacaggcgcggagacccggctcggcgcgcgctcctcggcgcacacgctccccatccccgcgccgcgcgggccgcggacttgcaggctgcgcgtcctttgcggagtctgccccggccccacggacaggccccgcagtgagcaggtaagggtcgccccgccgcggctgcccctccacgcctcggccgtcttctccccctccagaaccttcgcccagccgggacctcggatcccctcctctggcttggcggtctccgccagccgcgacctccaccgacggagagcgggcgagggccggcgccaggcaagcctcccagatctgaaatgaagccccctcccgccgctgcgcccttcctgcgcgtcaggctgacaccccccaacccaagtgtctggcgctgcgctcggggcggccgatcgccgcagactgccggggtgggggtcgacctagctatctcacgcccctcctgatgcggagaagggagaccaggggggcaggcaagccatgcggccggagggacccggagggacatgcctccctacccttaggtggacggacgcacctacgcggatcgggaaggcagggctggagggtcccccggggctaggtaccgcaatccgcacggggtttgaggggtgggcaagcaatgtgctaggtgggggttggggtaggggccagtgtagaatgcccctctgtggtgacacatccgggattgttcaaaagagtgtcgtcttcgtttcccgtggcgcggaggggctggggttggggatgccagggcttcagtggtccccagaagaaacgccctgcggggtctgtggggaaacgcaccggccttcccaggttgaagtgggcccgctgagacccctgcctgccgctttagaggcagaagctcctgcggcggctgcggggggcggaggccacatcctcggcgggaccttggcaggttagggggctcagaagggacaggggagccgatggatgcaactagaccctcaggagggaacccagccggaagccgattgcatttcacgtggagctgaggaggggagcctcacccctggatggagctcagcccctttttggaagatgggggtggggtggtggacacctgctaattcttccgaccatttttatgtttttgagtgcaggtgcgtcagactccctttatcttccccagccttacaatgtcccgcaaagcccccctggccctctccaagacacagcatttggctcttcccatgagcggccctggggaggagttgggggatgggaaggggctggacgcagcatgtggagggcaacttgccctgggactgcagctggccagaggcagacaagcatcctgaaggtcaagctagaagctttgagtggcggtaggattcccaagcagatggaaaactatgtttgagcctttgggggcaggggcagcaggcagcacccaggttttctcaggagaccccaattaaatgagtttggtgctgggtacaagtagcactggtggagtccccagtcctaagctaagttctgctcctcactgaccttggggagggcaggcagaggcaccagcttggacacaagccgaaatctgaacatacagattggaggtggaacacgctgagcaggccctgggccagctcttccaactgatccatcaacaagtgtgtgtggggtgacgatggaggcgggcctgatacttttcctctttggccatgggtggttcatgggtggttgggtgtctgggacaagacccccaaaagtctgtttgtccccatgtgtggtgaggggaggtgtctgtggggagcctctgaaaggatccctctcctgcactctcgggactgatctaagctaaggggtgcattaagtcctgttttgtataaggttcaggctggcaggggattgattggagaaacactttgggacccatggcttttcacatggccacctctctctgttgtgcgtcaactttgggacactccctcaatttgtgtcgaataaataaatacacacatgggagtttatagtatatgtggctgagaggctaggaaagctaaggccacagggtggcttttctcttggggacagggcttaagctggagtgtcc

SEQ ID NO: 12913 - DNA, 834 bp, Artificial sequence
  DNA replication origin
tagcccttactgagtgccaggctatagtatatactctatagtttctttgtataaatttgctgatgcctcactgtaacatctatgagatagacattaatattattcccatttttcagatgataaaaagaaggcacagagaagttaagcagttttcccaagctcctggggcagaaacctctggcaaaatggtcccaagtctgtcatactaaatgccaggaggtgactttaatcatcctcaaaaactatctgccccaacagagtctggacccaagagagagagccagggaatatggagtgacccattttcccatcctgagccacttttgtggctgggctgaaatccatcctcagggaggggagagatcaaccctgggctgcagtggtggggcttggcctgtcccttgagggtgtcactagcagcttgggagagtctggaggaggaggagccactggcagggctggggtggccagcaagtgaggggaggcatcttagagggacactgcagagaagcacttggtttggggcaggcagcctaagtctgtaagctctgagcgttgtccagttgggggcagtgcagggttgcggtgggggcagaagtgcctggaggggctgaaaggattaccgcccagagaggggagaggctgcgggaggtgatccctgaggtccccagcggagtcgaggcctgggagctcccaggttctctctctcctcctctttgctggcgggggcgtctgtgtccagttgggcagggggtggactgtaatgggtgtggggaccaagagaaggtaacagtgggaatcaagaaccctgggtctagttccagaagaggcacc

SEQ ID NO: 12914 - DNA, 1083 bp, Artificial sequence
  DNA replication origin
gcactgcccgtgtcccgcccgcagtgggcgccctgggggccgggggactgcgccctgcgaacccgggccgcggcgcccacactgacctggcctgcccaagaaaggggctgggtggcatggagagcggcgagcgcaccgccgcgcgcgggcctggaggctctgccccgcactcgctcggagagggagaaagggggttgccccttcacccgccccttgtgccacaagcagggacgcggcgcaggcggcgatagctccagctatctcttgcccaagtgcagccgagagctgaccctgccctgctcctcccacggctggcgggacttcctgagccgaggctgcgaggcccgcgccccattctgcaaaggacagcgtctccctctccctctacgcctccagttttacgcccctgggcctttggtgcgcaaggcagccgccaccgaggggcaaaggtgccgagcagctgctggcgcgggtgctgaacgcgcccttctaagctggtgtgttagcacctgttcattcaaaccccagagggcgggggaaaaggcccgaaagagaggaggaactgcgcccccacgccccaggtagagggaaatttgcccaaactagacagccgtctgtcccctctacctgtctctctgcaccggagtgactcgcgcttgcttcctcccatatgcgcacaaaacctgctttccctggcactgtgtccgggactgccaggcctctttaaggcccctcagacactaagagcccggccattgctcaccctgtccgagcaaacagaaagaaagtgaagaagcatctggaaatggaagaatctggcctttttggcttatttttttaagcgatcctgttaaatcactagcagaataggtgtggcttcccccaccccccgcccccatctttctcccttgatccttgctccaaggtgacccgctgcccgactgagaacagcctcgcacctgctcagaatcttggttcagacagcttttgaaacccgcacagtctttccggggtcacaaattcatattggaacgagagattgcaacaggagatgtatcctcccgcccccctctggcaatgtgg

SEQ ID NO: 12915 - DNA, 1563 bp, Artificial sequence
  DNA replication origin
ttaataaggcaggccgggggaaaggaggggtggaaatagggctggagacgctgcgatggagagatgaagatagtgccgagagagggagacagaaagcgacaggaagatgtggacatgatagagacacacagacagagcggcaggaacatccagacacggggacactgatagaaacacctaggccccagagatagaggcggacgtcaagacagactaatagagtgacaaagacgtggagacagtgactgaaacaagagaggagaggctgagagagacagagaccggggaattcagagagagaggggagagagagagagagagagagagagagagagagagagagagagagagggagagagagagagagagaggagagagagagagagagagagagagagagagagagagagagattgaacaatagtttctataaaagttgaaacaaaggaaaagggacacatgaagagagagaagagaacagagagattcagaaaaataaagcagaaaaagaggccaattcagtctgagagagaggccgcagggaggggggatcatatgtcatgctacccaaagtatttgagaaaaagctgtggtgtctctgagctgcaggtggtgtttccctctcctgcccttgggactcccagtggctcctgttttctttcccccaaaacccttcaccaagagggggaccagagggggttttggggaccttcagggagcagcaggaccacagggttgaccctctggaggcctagcatttgaagaggtgggtgcttgatacttctaccttccgccccatgctgtgactgttttgaaactacttgtgagggattgcctccacatcttccttggaggtgagtagaacccaagtctcaggtggagccctggaggcctgctttttgggacgtcagcctttggagaacagcaggatagaggcaggagccactctgattcctacttttggaagtactcaagtacttccaaaagtactgtggtcttaatctgaactgaaccccaaagattttgaaaatgagggggtagattattttgctttttgtgggctgtgtctgcttggatgtgtatcaggaaagtactagggccaagaagagaccaagaaaaggagctcatctcagggcctcttttgttctcaataaagtagcccaaggtttctggggcatggactgaacacttgcccttctccaaacgtaccaaatcctacccatctgagcctttgcctaggctgttcctgcaggcaggaaagccattccctcaacacagcattgagaaatcttgtctatgctttagatcccagctttcactttccacgtcttccactctccatccccatcagaaagaatttctcccttggcaatccctccagtccctgagttctccgttggagctcacaccctgccttgaatcagttatttaggcacctgttggtagtcctcattgtattaaaaattccttaaggatgagactgcttatgtatctttccctgtcaaatggtgttggtgggtgctaagggagtgcttgtagaaaagaattaaaggttgccaaagt

SEQ ID NO: 12916 - DNA, 837 bp, Artificial sequence
  DNA replication origin
gctgttgtctccaggcgctcagctgccagcgcgcggcggggctgagagtgacagcgcggcgcggccgggggaggattcgccgccgagccccgggctgctcactccgccgtgggggggaccgcagacgccgctggtctcgctgcgaggcccctgcccggccggccgagccatgacggacgccggcaacaggaaggagggcttcaaaaaatgccggagcgccactttcagcatcgatggctacagcttcaccataggtgagaactttccacccctctcggactcctggctcgggcaaacgccctctccggtggcggtcagagttcctttctaagcgggcagggggagctcaggggtcgggctggggccggagggtgctctccgggcgggagcccccgggagcggcgactgggtcgggacagaagccgcaccctgggctgtcccccccggcacccctcgcgggctccgacccggcgtcgcgcggaagctggttttcagcatcacacctccccgaactgctcggtttcctggctgcgattttaataaggcaggccgggggaaaggaggggtggaaatagggctggagacgctgcgatggagagatgaagatagtgccgagagagggagacagaaagcgacaggaagatgtggacatgatagagacacacagacagagcggcaggaacatccagacacggggacactgatagaaacacctaggccccagagatagaggcggacgtcaagacagactaatagagtgacaaagacgtggagacagtgactgaaacaagagaggagaggctgagagagacagagaccggggaattcagagagaga

SEQ ID NO: 12917 - DNA, 982 bp, Artificial sequence
  DNA replication origin
ccgctcccgggggctcccgcccggagagcaccctccggccccagcccgacccctgagctccccctgcccgcttagaaaggaactctgaccgccaccggagagggcgtttgcccgagccaggagtccgagaggggtggaaagttctcacctatggtgaagctgtagccatcgatgctgaaagtggcgctccggcattttttgaagccctccttcctgttgccggcgtccgtcatggctcggccggccgggcaggggcctcgcagcgagaccagcggcgtctgcggtcccccccacggcggagtgagcagcccggggctcggcggcgaatcctcccccggccgcgccgcgctgtcactctcagccccgccgcgcgctggcagctgagcgcctggagacaacagcggggacccaatgtcaacagctaaagcgctaggagctcggcggaggcaggagccgtcgcgactgccccatctccaagccgagttccagaggcggcgagaggagtgtcaggaagggaggacgcgcgcccgagcgcgtggacggggctgaccggtgggcgcggagatccctgcctggccacgctactctctgtcagccgcggatcccgcgcgccacaggaaagtctgttttctacttcaccttctccttccgtctctggtggctggggggatttggggacccaagggaatggctgaattggcgtcgtgcgtcttctagatatgttttctctggcagaccggggagcttccagaaagcacatcaacagatggaaaggcaaacccctcagccatgagatgttgccgaagtttactccaaacaaggaagtcgggaaaatcgccacgcccacttccttctagccactgcccccagcactggcctggagccccgatagtgtttcttctccactgtccctgccaggaaggtaattgtcaaagtcaccggaggctctatgatgtgaaatgtacaatcgaattagaactcg

SEQ ID NO: 12918 - DNA, 906 bp, Artificial sequence
  DNA replication origin
tttgaaagaaaaaggtgtcctcagccgccccgtccgggaggggggaggggggtcagccccctgcccggccagccgccccgtcctggagggaggtggtgggggtcagccccccgcccggccagccgccccgtccgggaggtgaggggcgcctctgcccggccgcccctactgggaagtgaggagcccctctgcccggccagccgccccgtccgggagggaggtggggggggtcagccccccgcccggccagccgccccgtccgggagggaggtggggggatcagccccccgcctggccagccgccccatccgggaggtgaggggcgcctctgcccggccgcccctactgggaagtgaggacccctctgcccggccagccgccccgtccgggagggaggtgggggggtcagccccccgcccggccagccgccctatccaggaggtgaggggcgcttctgcccggccgcccctactgggaagtgaggagcccctctgcccggccaggaccccgtctgggaggtgtgcccagcggctcattggggatgggccatgatgacaatggcggttttgtggaatagaaaggcgggaagggtggggaaaaaattgagaaatcggatggttgccgggtctgtgtggatagaagtagacatggagacttttcattttgttctgtactaagaaaaattcttctgccttgggatcctgttgatctgtgaccttatccccaaccctgtgctctctgaaacatgtgctgtgtccactcagggttaaatggattaagggcggtgcaagatgtgctttgttaaacagatgattgaaggcagcatgctcgttaagagtcatcaccactccctaatcttaagtacccagggacacaaacactgcggaaggccgcagggtcctctgc

SEQ ID NO: 12919 - DNA, 1067 bp, Artificial sequence
  DNA replication origin
caccacgatgtgcagtacgggcccccgggggacgccatccccgcctctcctggccttctccatgggcggccgccgcgggcccgcacgacgacttcgaccgccaagggcagcgggtctgacgaccccaccgtgtgcggaaagccgcggacttcgggtgtcagcgagcacagcacatgagggccgcacagggagatcggtggaggcaaagcagctcccgccgcccccagggccacggccgcccttccctcatccgcttccgcagcttccgggctgtcacctgacacggcggccgccgccggcgaggcagggctgggcaaggccgggagggccctgacggggcggggtctgagaggccgaggtggagcctgggggagcggggtgggtctaggagaggagagatcgactctgtggggcggggaggagcggggggaggagcggggggagggcgggtccgggtgggacttgacgaggagcggcggggtggggcttacgtgacccgggcggctgggcttgcagagcctgtggtgtccgcgggacctggaggtgcggcgtggcacacctgctttttcctccctggattcaatctcaaagcacttccttctcttttgccttctctttttcctcaaagttttcccacttccctcttctcttctgttttccttgctttttcacatcttttcggttcactctccgagtgtccgattccttcacctccttgcctttgcctctgtggcccccgtccttattcttaaatatgtagtaacatggagcatactggtgaggttgcgtatctgtgtattcagcctttaaattacttgcttactcgagaattcttgtttgtttctttctagagtttttttttcttcgtttaaatattatgtgtaggaatctgagacgcatttaaaacctgaaacagaatatccttgacaacaaaggaagtttacttggatacgtgtaaaatgattattctagtcctgcgattttataagaatattcttttcattccatctcattttgggtgtagtactctggtcaatacaaaatatatgggctctgttgtcaccagg

SEQ ID NO: 12920 - DNA, 1282 bp, Artificial sequence
  DNA replication origin
ttaacagcatcccaaggcagaagaatttttcttagtacagaacaaaatggagtctcctatatctacttctttctacacagacgccgcaacaatctgatttctctttcttttccccacatttcccccctttctattcgacaaaaccgccatcgtcatcatggcccgttctcaatgagctgttgggcacacctcccagacggggtggctgccgggcagaggggctcctcacttcccagatggggcagccgggcagaggcgccccccacctcccggacgggatggctgccgggcaggggctgccccccacctcccgaatggggcggctggccaggcaggggctggccccacctccctcccgtgcggggtggctggccgggtgggggctgccccccacctcccggacggggcggctgccgggcggaggggctcctcacttcccagatggggcggctgccaggcggaggggctcctcacttctcagacgggcggctgggcagaaacgttcctcacctcccagacggggtggcggtcgggcagagacactcctcagttcccagacggggttgcggccgggcagaggcgctccccacatctcagacgatgggcggccgggcagagacgctcctcacttcccagacgggatggtggccaggaagaggcgctcctcatttcccagactgggcggccgggcagaggggctcctcacatcccagacgatgggtggccaggcagagacactcctcagttcccagacggggtcgcggccgggcagaggcgctcttcacatctcagactgggcggccgggcagaggggctcctcacatcccagacgatgggcggccaggcagagacgctcctcacttcccagacggggtggcggccgggcagaggctgcaatctcagcactttgggaggccaaggcaggcggctgggaggtggaggttgtagcgagctgagatcacgccactgcactccagcctgggcaacattgagcactgagtgagcgagactccgtctgcaatcctggcacctcgggaggccgaggcgggcagatcacttgcggtcaggagctggagaccagcccagccaacatggcgaaaccccttctccaccaaaaaatacaaaaaccagtcaggcgtggcggcgcgagcctgcaatcccaggcactcggcaggctgaggcaggagaatcaggcagggatgttgcagtgagccgagatggtggctgtacagtccagcctccgctcggcatcagagggagactgtggagagagagagggaga

SEQ ID NO: 12921 - DNA, 842 bp, Artificial sequence
  DNA replication origin
cgtctgggaagtgaggagcgtctctgcccggccgcccatcgtctgagatgtggggagcgcctctgcccggccgcaaccccgtctgggaactgaggagtgtctctgcccgaccgccaccccgtctgggaggtgaggaacgtttctgcccagccgcccgtctgagaagtgaggagcccctccgcctggcagccgccccatctgggaagtgaggagcccctccgcccggcagccgccccgtccgggaggtggggggcagcccccacccggccagccaccccgcacgggagggaggtggggccagcccctgcctggccagccgccccattcgggaggtggggggcagcccctgcccggcagccatcccgtccgggaggtggggggcgcctctgcccggctgccccatctgggaagtgaggagcccctctgcccggcagccaccccgtctgggaggtgtgcccaacagctcattgagaacgggccatgatgacgatggcggttttgtcgaatagaaaggggggaaatgtggggaaaagaaagagaaatcagattgttgcggcgtctgtgtagaaagaagtagatataggagactccattttgttctgtactaagaaaaattcttctgccttgggatgctgttaatctataaccttacccccaaccccgtgctctctgaaacatgtgctgtgtccactcagggttaaatggattaagggcggtgcaagatgtgctttgttaaacagatgcttgaaggcagcatgctcgttaagagtcatcaccactccctaatctcaagtacccagggacacaaacactgcggaaggctgcagggtcctctgcctagg

SEQ ID NO: 12922 - DNA, 1115 bp, Artificial sequence
  DNA replication origin
attgcaactcagaaatacattgctacttggctgcctccactttattattgtacaccttgaaggcgaggttagttaagtcctgttatggggtttgagagctggaatttaatttttggagttttatttaatgtcgggagcaaattgggtaataaaatgtatattgagaataagacagccttttgaccttttagggtctagggctgtaaagcgtctcagggttgctgccaagcagccatgaactgggctgggttttttatttggtgaaaaagagcctaacgctctctgatttgggataaagaagaaggagcattaactttgactatgcctttagctccagccacctttttaagaggaaattgctgggcaggtgcgggagggcttgttgcagaaggaaactgtaagcccgaccgggtgtgaggaggggaggtgataaaaggattatagggtaggggagcggaggctgaggaagaattgggacctagctcagcctggcgaggagcagcctggggaggaggggagaggtcagatgggtctatagaaaaggaagattggaaagaagaaagactcagcgacgcttggggttgggactgaggggacaggtgggagggaaagaaggaagatttgggacaagttgcattgggaacagagactagggagggaccgatgtgtaaaagaatgcctggacgtcaggcatctcagactgtttgcccattttacgacaaggattatttagatcttgtaggatggaaaaatcgaaagtgccattttctggctatttggaaccactgtcgagtttgtattggggtcaagtggcattgcagaagaaaataaggcatttaggttttaggtcacatgtgagttgaagaggtattaagtctttgagaacacaggctaagggagaaggagaatggagggtggaagtttacctatagtgaaggaggcaagtccagagaaaatagagggtagagacacagagagaaggggtggggggatgcttgcccccaggaaagtggagaagaggtagagacatggagggaaggggtcggggggttcttgccccccaaaaagtggtacttgccgctaagggtgaaggaccaagacaggcatccctccgt

SEQ ID NO: 12923 - DNA, 1230 bp, Artificial sequence
  DNA replication origin
cgaggccgcggcgggagggccacgcccccgccgccgcgccggaggggcccagtgtggacggggccaccggctggagcggatcccacacctccggaccgagggacgcgggtgagcaggcgacagtagcgccgggcaggctgggagcccgcggcgacctgtggaggggccggggaggagggctgtggcgggagggggctcggccctttgtggctcggcgggtgggaggcggcggccgcggcatctttcaaacccgagacgcttccgccgcgggcgggggaggggcgcgggcggccggcgccgccctccgcaccccgcggcggccccagggcggcggagctccgggcaggtccgcggggaaggggcggcccggtacgccgctagctgggcgtttccggccccggcaccgggcgcctcggcgcccgcggggctcccgggcggcgccttggcctcggctcgcgcccgcccttaccgaagtaaagctgtttcccttaaagactcgcgacgtgttcgcgacatggtgggccgaaggaggacacccccttccttctgtattccccccgcgtacatctgaactaaccaagagaggtctagacgaacagagctcctgttatggtctatatcgacttaaaaaagaaagcagaaactgccctttgaaacggaaaattgtgtacgtgtttactttgtgaaatctttaacttccttgaattcgaccacctccttctccctacggattgaacaaccggggaatagaaaaatcgcttagtttggtgtggggcggttattttgagttaacatctttttttcccttgggcttagctatctaagaactctacctgcctcaaaaggtagaggagcgtccatcccacgggctaccacggtgaccccttccagtgaaaataggaaaagaattcaaaatacaaaatgaactttaaaagggtgtgtgtgtgaactatcttctgtgtcaattagccttatgaagacgtaggcaacaggactggtcacgtgttgtttatacttgaatctgtacgtcgggctcacagcatttaggcattgagaaacgaaaccctatcaacgctgtgcactgaccaaaatgatattttcttttatcgaggcaactaattaacagggatcttccccctcttccctctgagttgtacatttttgccgaatttgagtagtatgggtcttagatctcttgtaattgtgaatgacttagtttggttaaccttt

SEQ ID NO: 12924 - DNA, 1127 bp, Artificial sequence
  DNA replication origin
actcctcccccgggagccgcgccgcccgcccgcccgcgccgccttgtcagtccggggccgcgagacgccgggcccgccgcccccgccgcccccgcccccgcccccgccgcgcgctctcgcccccgcccgcggcccgggaacgcgcgcgcaatggaccgctggccagcctgccgcgcccgccctcgccacgccgccctcccgcctcgcgcgcgcgcgcgcctgtcggcaccagcggcagttttgcagtttcccgggtcctcgcgaccgtcccccgcccctcccttactctagctgcccccgcccttttcctctgccggatgccaccggaaagccaaaacaattggggccgcgcaggcgcgaaagaggaaacggaaagagcaggaagggcgggggcggcgcgaggtgacgggaagcgtaattgaagggggttcccgggaaaggtcatgggagagcccttgaggggcgcgtgcgcggcagaggggcactccgagtagccgcggcggccgaggccttgggcctagacgggcggatggagaggcccgacaagttcattgctaggaaatctagagagcaaaacaccaattgttatgctgaaggaggtgttttatcccttggaatttcccctgaaatacagatttttgcaggctggctcggaaagtgggaatgagtaggactaaacaataccagaccgggggcaggagaaagttgaggaggcgttgggcgggtcgctttgttgccgcagcacctcttctccaaaccatgccctcctctctccagagccgcttcggcttttcccaaggccaaggaagaagtcagagcagcacccaaaagggcccgcagttgggggaggttaggggaaaagggagagagagacatctgggtgcggacggcagctccagcgtctgaagccttccgttgtgtgctgcaatgcggcggctgcacgcccccaaccccccgagttccaaaagagcgccttcagcgttgcttcgcaaagcgaagcgtttgtagcagcagctaatggctgtggcccgtactgttttagttaacttggcacagcttgctggcaggcaggctgtaaatttgctaggagctattcgtggatcaaaaaattgtcagaaatgcccaca

SEQ ID NO: 12925 - DNA, 1320 bp, Artificial sequence
  DNA replication origin
gggaaggggcgccgcacggaggaagtgccctcttggccgcagccagagccgcgccgcaggtgccgcgatgtcgtcctggccggggcgcgaggatgcgagggctgggggcgcgtggtggccgcgggagccgctggatcaggaactgcagcgggcccgggagcagaagcggcggcggcacgacgcccagcagctgcagcagctcaagcgcctggagtccttgtgagtctcgagcagccgtctgggccgcagtccgcgcgccgcccgttttctgggaacaggggcgcccggcgccgtgttgggcgctgggctgggtcctccaagcccccaggacccaggcaggggtgcgggcctgtgaggaacctagtgcctgcgacgggacttctagtcctcactgggtggggagcgaggcccgcccggccacggaggggccctggaggccgcggcgcgggtgggcgggggcctcggcccggggaggcggcagcggcttgcgctcctcgcccccgctttggtgtgggcgtcgcctcttttggggaagccaagagttattggcgcttgctcggcatttgtggaccgaacaggcaagttcaaccgagcacgctgcccccgcgctccacctctgagttccctgggccactgcgacatggagaaaccccgttcttttcatcctctgctacggagaagggacgaggacacgggtcctgcagtgttggtgtggcgaggcccggaagaagagagaatgggcggcggggactggccacggcgctgctaggtagaacagaggcggacttgttttctccgggttggagggaattttgttgttgttttttttattttttaccagggttcagggtgggcattcagggagccagctgccgtttggcaccacgcggaattcgggccctgacttgggaggccttgcgctcccgtggctccagttcaaggagggtccagatgacccgggagagtgtggtgtaaagaagattcaaaggtgggggagggagatatggcttccccctacgcttctaggttctttagctgggccacagattaaattgtcataagacagattaacaagagaaaaactatttttacatacccatgcactggagggccacaaaagtgggagactgaaagaagggccagggaataggagcatgggccttttggggcgtggtggagacaaattatggaagggtcaaaatgtatgatgaataaaggttgctttgttaggctcccaggtgataaaagctgtctccaggcagctctctttctgatacagatacgtttactcatggaaatttcctttaaagatgtaaattt

SEQ ID NO: 12926 - DNA, 1742 bp, Artificial sequence
  DNA replication origin
tatctcaataaagctgttttttttgtttcgttttttgttttttgttttgttttgttttttgagacggagtctccctgtcacccaggttggagtgcagtggcacgtctcggctcactgcaggctccgcctcccaggttcacgccattctcctgtctcaacctcccgcgtagttgggattacaggcgcccgccacctcgcccggctaattttttgtatttttagtagagaccgggtttcaccgtgttagccaggatggtctcgatctcctgacctcgtgatccgcccgcctcggcctcccaaagtgctgggattacaggcgtgagccaccgcgcccggcctgttgttttttttttttaaagtaactaaaatggtagtaagaatgaccatttctaagcgcttgctagtgccacatactatgctgaacagcttttgtatattcattgtctggaacttcaaaaaagtcaagagtctacaaaatattcgtaatgaccctaggccttggggcacatagcaggggctcaacaaatagctctctctgcctgatctagtgttcgcgaagggaagtgctggcacagaccagggtttgtaacaaaagccttggcgaggagtagcctggtgctggacgaagagaggcctgttaaccccgaacctaaactggagggaaacgggagagcagtgctgtgatcctgaggcagagctgagagaaggagttctgggcttgatatagggcctggtataaagcagagtgacggtcctggactacctcctgcccacgagaggtgtcgtgttgtgttttgttttgtgatgggatctctctctgtctcccaggctgcagtgcaatggcacgatcatagctcacagcagccccaaactcctgggctcaagcgatcctcccgcctcgttctctcaaagtgctgggactacaggcgtgagccaccacgcccagccccaagagaggtttttgtatggcaggaaaggaagggcagtggtagttgcgcacacagactctggagttggattaaacaatctgactccattgtttaaacacgtttcttagccgcagttgcttgttaccttactgataaaatgagggtagtgatagtacctacctcacaagactgctgtacaattaaatgagttcactacaatatggaaagtacttagaactacacctacacattgttaacagctcattgtatgtttggggctgctagcctcttcatcattgttctgtgtgagaagcaccatctgactagattcccaagggagcggagggaaggaacaggaaagggcgaagagaggcaggcacgaacatccactcttgggggtccagttgtgcaacgtggcctccacttacactgattattttacactgattttgcgtgtgtccatgcgctgggaggaaagggaggacgtggtctgccccaaccccgctgctcaaggtcctccaagggtccagtccccggctggcagcctagggcacgtgagggccgggaggctcacccgcggcggagggtctggggtccgggaggatctgggcagcggaagaagggaggagcgcggctgcacggggcggagctaggggaggtccggcaggagggaaaggcctgtccggagagagggacgcgcatccgctgaggccgcgccgggcgccaagggcgcggtacctggagtcgaacttctggccgtcggggaacgtccccacgtagtggtagcgcacgaagtcgccgctgcgcacggtg

SEQ ID NO: 12927 - DNA, 806 bp, Artificial sequence
  DNA replication origin
cctgcgcttccctagctccagggggttccaggagagtccaaatgacccgggagagtgtggtgtaaagaagattcaaatgtaggggaaggaaatatggtttccctctacccttctaagttcttaagctgggccacaaattaaattgtcataagacagattaacaggagaaaaacttttaattatgtacccgtgcactagagggccacaaaagtgggagacaaagaagggccagggaataggggcgtgggccttttggggcgtggtggagaccttttggaagggtgatgggggaaatgtatggtgaataaaggttgctttgttatcccgatgaggcgctcaggcgataaaagttgcccccaagcagctgtcttcctgatacagatacatttactacagaaaatttcctttataggtgtaaatttctgtttacaacaggcgagtcgaaaaataataagaacaaaaggaaaaaaagcagtcatactttattttaggcagttgaggggtagctgaataagttatcctgtgttgtttggttctgttacttatagctcaaagtcatcaatatgccagggtggcatgtttggggatggtgcattcttgtcttttgcagtcatttatcagggtggcgtttcctaaattctaacacagacctcgagtggaaagttcaggcagcaactctttcagttcttgtccgtgattctataattagctgcataaaacaaccttttctaagtgtggcattcactcagttattcaagaattcgtttctgttttagccacttctagttacctgtgctaagtaggtg

SEQ ID NO: 12928 - DNA, 866 bp, Artificial sequence
  DNA replication origin
gtgctctcttggctgccgccgccgccgccgccgccgccggagccgcgccgcgggggttgcccgagcggcgctgcgggggctgacatgtcgtcccggcctgggcgcgaggacgtgggggctgcgggcgcgcggcggccgcgtgagccgccggagcaggagctgcagcgacgtcgggagcagaagcggcggcgacacgacgcgcagcagctgcagcagctcaagcacctggagtccttgtgagtcccgagctgccgtccgcgcgcggccagtcttctgaagccaggggcccggggcgcgggacgccgcggtgggcgctaggccgggtcctccgagcccccgcgagcaggcaggggggctgggcccggcaggagcctggtgcgggcgaccgatgtcgggcgccgcggtcaaggacttgaagtccatcctcctggcggggcgttcagggagccaactgccgctcggcaccaagcagaatctgacttgggaggccctgcgcttccctagctccagggggttccaggagagtccaaatgacccgggagagtgtggtgtaaagaagattcaaatgtaggggaaggaaatatggtttccctctacccttctaagttcttaagctgggccacaaattaaattgtcataagacagattaacaggagaaaaacttttaattatgtacccgtgcactagagggccacaaaagtgggagacaaagaagggccagggaataggggcgtgggccttttggggcgtggtggagaccttttggaagggtgatgggggaaatgtatggtgaataaaggttgctttgttatcccgatgaggcgctcaggcgataaaagttgcccccaagcagctgtcttcctgat

SEQ ID NO: 12929 - DNA, 944 bp, Artificial sequence
  DNA replication origin
ctccctcagcttgcagggaggtgtggagggagaggcgcgagcgggaacccgggctgcgggcggcgcttgcgggccagctggagttccgggtgggtgtgggcttggcgggccccgcactcggagcagccggccagccctgctggccctgggcaatgaggggcttagcacccaggccagcagctgcggagggtatactgggtcccccagcagtgccagaccactggcgctgcgctcaatttctcaccgggccttagctgccttcccgtggggcagggctcgcgacctgcagcccgccatgcctgagcctcccaccccctccgtgggctcctgtgcggccgagcttccccggtgagcgccgccccgtgctccaccgcggccggtcccatcgaccacccaagggctggggagtgcgggcacagggcgcgggactggcaggcagctccacctgcagccccagtgcagggtccactgggtgaagccagctgggctcctaagtctggtggggatgtggagaacctttatgtctagctcggggattgtaaatacaccaatcggcactctgtatctagctcaaggtttgtaagcacaccagtcagcaccctgtgtctagctcagggtttgtgaatgcaccaattgacactctgtgtctagctactctggtggggccttggagaacctttgtgtggacactccgtatctagctaatctggtggggacatggagaacctttgtgtctagctcagggattataaacgcaccaatcagcgccctgtcaaaacagaccacttggctctaccaatcaataggatgtgggtggggccagataagagaataaaaagcaggctgcctgagtcagcagtggcaacccgctggggtccccttccacactgtggaaattttgttctttcgctctttgcaataaatcttgctactgctcactcttt

SEQ ID NO: 12930 - DNA, 677 bp, Artificial sequence
  DNA replication origin
agtgaggagcacctctgcccggccaccccgtctgggaggtgaggagcacctctgcccggccgccaccccatctgggaggtgaggagtgtctgcccagccgccaccccgcctaggaattgaggagtgcctctgcccggccgcaaccccatctgggaaatgaggagcgcctctgcctggccaccaccccgtctgggatctgaggagcgtctctcctcggctgccctgtctgggaagtgaggagcgcctctgcctggctgctgtgcaatcttccaagtgtgaagtgacagcctttctgcaggtgtacccaacagcttggaagagacagcgaccatcgagaatgggccatgatgacgatggcggttttgtcgaaaagaaaagggggaaatgtggggaaaacagagatcagattgttactgtgtctgtgtagaaagaagtagacataggagactccattttgttctatactaaggaaaattcttctgccttgggatgctgttaatctataaccttacccccaaccccgtgctctctgaaacatgtgctgtgtcagctcagggttaaatggattaagggcggtgcaagatgtgctttgttaaacagatgcttgaaggcagcatgctcgttaagagtcatcaccactccctaatctcaagtacccagggacacaaacactgtgg

SEQ ID NO: 12931 - DNA, 830 bp, Artificial sequence
  DNA replication origin
gactgcgcactgccgctcagccgccgcccgggctgccgctactgtttcgggggctgtcgctgtcgctgccgcagcgtcctccactcccgcactcctcacctcctgccagccccgccggctctcggccctcccggagcgcgctcgctccgccgcaacagacgtgggctcaccgggcgcctcccggaacccgctgggggcgcccgggcgcaggagggactgcgcgatagctgcagcgggaactctctcggcccagcttccagttccccagcccctccagggaggccagggccccagggcgcggaccagagccgagaaggcgcgtctccactgtccgggcgagcgcggctcctcctccctttcttgggggagccccggggatgccgcagcactagcgctcaggcccgggtgccccaatccagcgagggagcagcaaacgggacgcaggggcgccccaccaccctgctcgctcccgggtgccccacctttgggaaggagcgacacacccggggcagtagggcccccgcaacttttcatgccctgctttgcttccctctggcgggggcgcgacagcgaactcagggggctgagcggacagaggggcaagtggccttagagatgtgttctgtgcttagctgtctgcgcgtcctgacactagggatgaccgaagttgaaacacacacaaggtcgatttaaaaacgtaccgaggcaaacgcctttcgtccttaaaaaatgaacagtcgctccgagactcctcccttccaatctcgggcggaccggggcggggaggtggtgtttgactaatcattcattcacccgaaaagagggaggaa

SEQ ID NO: 12932 - DNA, 2017 bp, Artificial sequence
  DNA replication origin
cctccgcccgcccgcccgctggagagtgagctgcgcccagccgcccagccagcccgccgttctctggccgccgtccgggcgcgcgcagcgagcgggcgcgactatgccaagatggtcctgcaggcgcggaacaagcaccgggaggcggctcccaagccgccccagccaccccgcgcctcacagtcgccgctgaggggggcgtcggacgtcggcgccggggagccggggcccgagcgcgcgcccctgtccccggggcgcaagggcgccgcgggcaggaaggggccccgcgccgagcccggcgcgccgcccgccgggggcggccttggggggcgcctggccgcccggctgcgctgggcgctgggcctgcggcgcgcggggcgcggccggacctggaccacgctcctgttaggtgagcagccctagcgccggcgccgccgggacgcggaactttgaggcgctggccccctcccctcccctcccctccccttccttcccctctcctcccgcttccgccgcgccgagccccgccagccggaccagccagtttgcagccctctccgactttttctctgggacattcttaccttctcctccccgcaactccctggctcagctctcctcgcacgcttcccacccgcgctctgcctgggctttaaaagaatggcccggggatcaacagctgcccggcctggccgcgggcagcaggtctgcgctaacgagacttgagcgctgctgattggtacgactggccgccttcccgttatctcggcctctgaccgccaggatggtttgctttggcttggaaacgattccgtggagctcaaagcaaacgcacgttccatgtcgtagagagttgcttaaacttataattaaattttagcgtacttttttcttcctggccgcaaacgccgctggtggcactttatttgtgattcccctcgacacgtcactttctaggttgtgttgtgtttggggcgcccgagccttaatcctccctgctgcccttggaacctttggtgaggagggctctcctcccctccctctgccatttaccaaatggatgatgtgtaatgatgtgctgaaaaaaaaaaacaaagttgacgcattcgtatgtttcggactgacttcaggtttcctctgtttcctggttgaattttgataaggcaagttgtagcagtttggataacaggcctaatttttctaagtcaactagtgaaatgctgttacattgcttttttctatatgcctcagtgggcttttcgctactgaactatttaattactgttgatttatcccttagtatattttcagattcccttggtgactcaaagttcccttagccaggagttggggtccagtataagtcaaggaataggacacagcaaattggcttcccctgagatcacagccacaaataaaagccactcagtcataaaaagccagtcatctctgtatgttttaatgggctcaagaaggttgttcctagggtactttttttccccccattgccgattcaagcctagaaaaaccaagtttgtttttctttgtttgtttgtttgtctgtttccagcacatttccccccgccccctttttttttatctcagtagcaagcttgaaaagctggctagtatgcaggttagaaaagctcaccttggggaggcagcacgatacagtggatgaggcagagccttcagatctagtacacagcggttcagtttggtttaagtttcaggttcctttgtgagtctttcgttctctgctagtggggggttatcacatggcgaatttactccacagggatccacaggatctgttaaggatcataactaaaaggtgtgggtgatacatgggaagatactttgtgtttagagcacttgacacattgtagttgttgtaataaaagaaagtgtgtgatgctgatttgagatctgatgacagaatggagttgcatttttattgaatgactaaacattaaccactttgtagtaaaatatagaatggcattgcttcttcagg

SEQ ID NO: 12933 - DNA, 1247 bp, Artificial sequence
  DNA replication origin
ctgctgcctggctggcagtaccgccgggaggcggcgccggacttgctagcccgccgccgttgccgccgctccggttgtcacggcgaccgcggaacgccggggggcgggggcggggacaccctgcgagcggccgcggccccgcccccgccgcccctctgcgccggacgcgcgctccaggccggccagcgcgcacgcgcggacttccggcgcaggcggggcccgacccctctggcgcccggctacccacacctcttcggcgcccgcgcggggctcggccggtgcgaggacgcgggggcggacggccttccggaggcggccgcccttccattgtgggagtgatggggccgaaggaagagccctctcgggatcggggcgctgattcaagtttcggagcctgttaaggctgcgcttggagcccgcgcaggcgagacgcggcggggcagggagaaggcgcccggagcggccacttaggggcgctgtgcgtgcgccctgggcgcctggtcggccccaccgatgtgaagcgcgcgggtggcaatcaagtcaccgtctccgtttactccccgcagtgtggtcgcgcaacttggagcgcagcccctcactcaccgacaagaagaacgggtgcgacccgatttaagatagtaacagagtattaaaatagcagcctggaatctcatggggagctgataagggacgaggcacaagtgtaaactgaagaccagggtaggagccaggctgaaggtgataggatggattggctggagcaggaaagatcatcaataagtacattcagtttgttacacttgctgtaaccttgttgcttaataggaagcaggaaaacttggcgttgataagataggagattttagtcgaaaatatgttttcttttacatagcagaatgcacgagtaaattaaacccgggaaaatttagaaacccaggtagatcccaattctccctccacccctgcattctttgcacacagtcttacaacagcatggattacaactgggaggttcctttcctggccgtgcccagtggcttgttccaaaaagttgtctttaagtcccaatgttgtaaatcaaggcccatcgttctgcttatctctattgtaattccagggacttcacgtggctttctcgctctttgtttctttgcccagtgatttctttactaataccagcattcgttcattgttagcctttttaagagacagtggattattttgtaaagggagggtgtttgccatgc

SEQ ID NO: 12934 - DNA, 2955 bp, Artificial sequence
  DNA replication origin
cccagcactttgggaggtcgaggtgggtggatcacctgaggtcaggagtttgagaccagcctgaccaacatggtgaaaccctgtctctactaaaaatacaaaaattagctgggtgtggtggtgcgcgcctgtaatcgcagctactcgggaggctgaggcaagagaaccacttgaacccgggagacagaggttgcagtgagccaagattgcaccatcacactccaacctgggggacaagagcgagacttcgtctcaaaacaaaacaaaacaaaaacagtgtggtaggagatatgacaggggaaggtctaggttacaggaagagaagagttcctgcaggatctgagttctaagtgagatgtgaagactgagccagagtcatccaggagaactggcagggcctgggcaggacaaaagggtggccatccaagataacaatatatgtgcatgtccagggaagagagggcattgggcactgaggaatggtgagaggcactgggaaattgtgaagggcactagggaatggtgaggggcactggggaatggtgaggggcactggggaatggtgagaagcactgggaaatggtgaggggcactgggaaatggtgaggggcactgggaaatggtgagaggcactgggaaatggtgagaagcactggggaatggtgagaagcactggggaatggtgagaggcactgggaaatggtgaggggcactgggaaatggtgagaggcactgggaaatggtgagaagcactggggaatggtgagaggcactgggaaatggtgaggggcactgggaaatggtgagaggcactgggaaatggtgagaagcactggggaatggtgaggggcactgggaaatggtgaggggcactgggaaatggtgaagggcactgggaaatggtgaggggcactggggaatggtgaggggcactgggaaatggtgagaggcactggggaatggtgagaggcactgggaaatggtgaggggcactgggaaatggtgaggggcactggggaatggtgaggggcactggggaatggtgaggggcactgggaaatggtgagaggcactgggaaatggtgagaggcactgggaaatggtgaggggcactggggaatggtgaggggcactggggaatggtgaggggcactggggaatggtgaggggcactggggaatggtgaggggcactggggaatggtgaggggcactggggaatggtgaggggcactggggaatggtgaggggcactggggaatggtgaggggcactggggaatggtgaggggcactggggaatggtgaggggcactggggaatggtgaggggcactggggaatggtgaggggcactggggaatggtgagaggcactgggaaatggtgagaagcactgggaaatggtgagaagcactggggaatggtgaggggcactgggaaatggtgagaagcactggggaatggtgaggggcactggggaatggtgagaagcactggggaatggtgaggggcactggggaatggtgaggggcactggggaatggtgagaggcactggggaatggtgaggggcactgggaaatggtgagaggcactggggaatggtgaggggcactgggaaatggtgagaggcactgggaaatggtgaggggcactggggaatggtgagaagcactgggaaatggtgaggggcactgggaaatggtgagaggcactgggaaatggtgagaagcactgggaaatggtgagaagcactggggaatggtgagaagcactggggaatggtgaggggcactggggaatggtgaggggcactgggaaatggtgaggggcactggggaatggtgagaagcactggggaatggtgaggggcactggggaatggtgaggggcactggggaatggtgaggggcactggggaatggtgaggggcactgggaaatggtgaggggcactggggaatggtgaggggcactggggaatggtgagaagcactgggaaatggtgaggggcactgggaaatggtgagaggcactgggaaatggtgaggggcactgggaaatggtgagaagcactgggaaatggtgaggggcactgggaaatggtgaggggcactggggaatggtgaggggcactgggaaatggtgaggggcactggggaatggtgaggggcactgggaaatggtgagaggcactgggaaatggtgagaggcactgggaaatggtgagaggcactggggaatggtgagaggcactgggaaatggtgagaggcactggggaatggtgaggggcactgggaaatggtgaggggcactggggaatggtgaggggcactgggaaatggtgagaggcactgggaaatggtgagaggcactggggaatggtgagaggcaaggctggagaagaaggggcaggaagagggtgtgtgtcatagatcctgaaggcctagttagccatgtcaacagatttggaagtggtgaatggttttcaaaacaaggagtgacaggattcgatttgtatattggaaacagctctctggaagattgatgggcaacaagagaagatgcgaagaggtcagttagagctgctgctgaagaccatgggaaaaatgactgtggatcatggcattgagggtggaaagcaatgaattgatttgaggaccattaatgagacagaatcagcaggatgactgcctggataaaggaatagggggaatggtaatgccacttgctggagtaaggagactggaggaaaagcaggcttgggctttggggtttcaggtgactaaaagacaccccatcacaaggaggagcccctcttctggacacagccaacctctcttccaggggatggtgctccctctactaactagctgcttggtcatctctccactcttctggctgcctttctacagtcttaagcatgcccaaatgacatggctgttatcttcattaga

SEQ ID NO: 12935 - DNA, 1285 bp, Artificial sequence
  DNA replication origin
acctagtaggagcccaaagttccaggaggagagtcacaggaaatagggctggcaaaggaatctggatctagagcttttcgttctagatgggaaaatttggccaatagattttgagcaaagcaaaaaagcaatgaaatcaagattttagaaagattaatttggcaggacatgaaaaatgctttgagagtaggtagactggaggcagagagccagctaggaaaaaattgtgatcatccatttgtgaaatgagggatggtggcagcagaaatagaaaagtaggaagcgatgtaggcaaatcagaaatgactatgtatggtactcagtgactgattggatatggaggacaagatgatgctaagttttcaggactagataactataaagaattattgacattgatgtacttagaaaattcacaggcacccatctgacttccacctcctctctcttcaagattagtttacccatagtagaaatcttgttttccagcctacatttcataggtagtggtagcagagacgcctggtggtagtgatgatggtggagatagtagtgatgatggaggtagtgataatggaggtggtggtagatatggcagtagtgatggcaaaggtggtgttaacagtagtgatgtgaatgttcaaggtggtggtagtggtggtagtaatggtgagagtggtgataattatgaggaatgtgaggtgaaatagtggaggtgattgtggtggtgattgtactaatggaggtaattgagattaatggtggtggtggtgacaatgatggtaattataaagggggcttgtgatagttatgaggaaggtggtgatggtgatgacggtggtgacggagatgaccttggtagtagtgataatggtgatggtagcagagatagttggatggcggtagtgatgatgatcgaggtggtggtggtaattgtgttggtaggggatggtgttggtaggggtagtggtggcgatgttagaggtgtggatgatttcagaaatggaggaagtggtattagtggtggtaatggcgctggtgatgataatagtgacagatgattgtggtggggatggtggtgggcagggtagtagtgagagtggttgtggtgattataagtggtgatattgataatggtggtaatgatgatggaggtggtggtgatggtagtactggttgctataatagtgattgtgctgtgggtgttgtagtgatggagggaatcacagtggtgactctgtgggtggtggtgatggtaatagtccttgtgattgtggttgggtgt

SEQ ID NO: 12936 - DNA, 1121 bp, Artificial sequence
  DNA replication origin
ttgccgccaccctgcgctgtccagactgaggggtcaggcggagagccgggccgcgccttcggtcagcttctctccctttcacccgcgcctcctcgcgagacccggggctgggccgtgccggtcgccgcgcagcaggaagggagcggctgccacggaaaacgcctggccggacggtgtggctggcggccctgcctgggcgcggagggcggcggtggcgggccccgcggccttctctcaggtaccccagtgcccgctgaccgccctgagcggcccagctgcttccccgatccgcaccgcggggccgtggcgtaggggccttgttgcgttccagcttgggggtcgcggtggggcggggcagtgaccccgggccggccgttgtgccctcatccctcccacccttccttcgtatagcttcctttctcctcacgacggcctccacagtccggagcccggcggagcccggacctggcggggagagctgcctccacggccgggcacccagaccccaccgtcgcagtcgccaccacctcagtccatccttggtaccggcaatgggcttcgtatcctccagtgcacttgtaactgacttggacacggaatactaagaactcacttctgtcctcatcccagtcgcgccggcggtgaccatctcggctcttttgggcttaactgccgctcctctggactctgtctgactttgggggcaccatggaccaaagtgggatggagattcctgtgaccctcatcattaaagcaccgaatcagaaatacagtgaccagactattagctgcttcttgaactggaccgtggggaaactaaaaacgcatctatctaacgtttaccctagcaaaccagtaagtgtgtaaaagctgggggcagctgctctgaccagcagcttttcgtgccgtgtaccctcctttttcctgcttctcccctccagtcttgaatcaaataggtctcttttggtagaccgcgaggtattttgagttctgaggttgtgtctcctgagtgttcgaaccatcattaatattttcctgatgaggttcagttaattagtaagaggaagcagaaatatcaagggacttaagaattggcaggcaaagaccgggcgcggtggctc

SEQ ID NO: 12937 - DNA, 1003 bp, Artificial sequence
  DNA replication origin
ggaccctaagagctcaaagatgccagtgaagtactccgattcctgtaagcagtggttctcagacactggtcttcattcaaatcacctgggatgtttgttaaacatatagaatcctggacctcactcagatgtactgaattagaatatctgggtgttaaggggtggcggtcacggggacaaagggcaggcggatcggcggggagggagcggggcgcggccaggccctgcccgggggctccgcatgctgcagctgcccccgggtgcccccgccgctgccctcgccgccgagcagcatggagaggagccggggacctaaccagagccagccggccggcctcccgaaggcggcggcgcagggaacggcccgacgcgtgctcgtggtcccggcggccgccaaggcggacagcggcaccgcgcgggggcgctgcgttggcggccctggcccccgggccgggcagtggcggcccaggaccacgcgtctactttcagagcccctctggggccgcaggagacagcccagtgaggcgccaagggaaggtcaccgtcaagtatgacggcaaggagctacggaagcgcctcaacctagaggagtggatcctggagcagctcacgtgcctctgcgactgccaggaagagtagatcccagaactggagattgatgtggatgagctcctggacatggagactgacgatgcctgggctgccagggtcaaggagctgctggttgactgttacacacccacagaggccttcgtctctggcctcctggacaagatctggggcatgcagaagctgagcacaccccagaagaaatgagggtccccgacccaggcaaacggtggctgccacaggacaatagctgccccccgacctcgtagcaacagcaatactgggggaccctacggccaggcctggtgccatgagcagggctcctcgtgcccctggcccggggtctcttcctctgccccctcagttttcacttttggggtttttgttactaaac

SEQ ID NO: 12938 - DNA, 1369 bp, Artificial sequence
  DNA replication origin
gaagcctgagcccagcccgggacagcacgggccccctgcctccagcctaggcgtccgcgcgggtgtgggtcactggtcaggccctggaagccgactacgccgcttcggtctgcgtgtcccggctctttctatgggagaaacttagcatcgctctcccagagtgaatagaagccgcagggctgctcggaggcggcggcagcggcggcgaaacccgccgccgaggctgcaccggggcttgcggcggcgccgccgcagttgcgtttaccccggcaaaaagtcctgcgcccaactcgggcggggatccgccagagccagtccagacccagcaccagccgcacggctcccgctcgcagtcggtgtcaaagccaaagtcccggccgcgccgcgccgcgccgctcgcgcctccgcaggcaccgcggccacgcctcctccgcgcggcaactcctccccgggactcccgagggcacgtgggggaggggccctggcgcggggcgaggcctggcaccagtgggtggagagaggaacccgagagcgcaagggcgggcctggagtgggagaggcggggccatggaagagggggcggcatcaaggctcaagagggtggagaacgaaccagagagcgcgaggggaggccctggcgtgcgagaggaggagccatgggtgtgggggcgtggcctggcacaaatgggtggagagcagaaccctggagcgcgtggggcgggcctggagtgcgagaggcggggtcatagagtgtgggagcggggccagggcgcgatggggtaggaaaagcgggggcggggccatgagcgcgggggtaggccccgggagcgcagaggcgggacttagggggcttaaggggcggagccggcgccgtgccggcgagggcgggtcacagggaggctgtcctaagtcagctgcccccggaccatggttgccgcccggggcctaggactggttgtgcctggtagaggctgtttaggattgcccgaggcgagatctgctcagctgcttttcgtctgtctttgaggtgtggggatgaaggccggggcagtccctgagagtgcatcgctgtaggtccagggtctcacggaattttgcagaacgttccagaggagactgaatgggatcgtcttaatttctgtccccactttcggccttttcttttcttccaccagtgtattacctttgctccgctcagagagatgtcctctaataacgccagcgacgcattgtgctcctagcagagggcacgcaccaccctcctgtgtgttcgcataggtcaaatacaggtttgctcctttgcacatttagcgctgtgagtaaacaaggataagtttttgtaatattaagtctaatcattacgaaggag

SEQ ID NO: 12939 - DNA, 1161 bp, Artificial sequence
  DNA replication origin
gaggcgcgagcggcgcggcgcggcgcggccgggactttggctttgacaccgactgcgagcgggagccgtgcggctggtgctgggtctggactggctctggcggatccccgcccgagttgggcgcaggactttttgccggggtaaacgcaactgcggcggcgccgccgcaagccccggtgcagcctcggcggcgggtttcgccgccgctgccgccgcctccgagcagccctgcggcttctattcactctgggagagcgatgctaagtttctcccatagaaagagccgggacacgcagaccgaagcggcgtagtcggcttccagggcctgaccagtgacccacacccgcgcggacgcctaggctggaggcagggggcccgtgctgtcccgggctgggctcaggcttccgagccgcaggtggaagaggaaccggcgccccgcagagcggccgagaggtggggcgcggggacccgcggcaggtcgggtggggggtcgataagccccttctcagtgcccgctccggggagcacggacttcccaggttgcaggtagcgctgtgtcagatgcggagcgtgggggaggtggagtggccaccccgtctgcgcgagcccaagtgtgggtgacccaagtgtcagagttgagagaggcctggaggagaggcatgaggctgatggggataggtctcttcccaagagaagcggctcgtagcctttttggactccagtgtgataaaacccggacgtccctagaggagaatccacatgggcctagcctcattgtgcctgcgtttttaggggttcacgggcagccaccagtccccgactcctggttactaactctagcactaggtagggggtgctaatgcaaatttcttaattcaatgggtttctatgtttattgatttattttctaggcggccaagtgaaaggtaattttggacacgccaggcatggaagattcggtgtttgtctatagtaacctcttcagtccctgaatcctgcaccttccgtttttctgtgcttgtacggcctactgggcttcctccctagccagagagctcttctgcagtggtgcggccttcccgggagcctgatcctggcggaccatggggagcaccctgggctgccaccgctccatccccagggacccctcggacctgtccc

SEQ ID NO: 12940 - DNA, 889 bp, Artificial sequence
  DNA replication origin
ctgcccggccccccatcgtctgagatgtggggagcgcctctgccccgccgccccgtctgggatgtgaggagcgcctcggcccggccacgaccccgtctgggaggtgaggagcgtctctgcccggccgccccatctgagaagtgaggagaccctccgcctggcaaccgccccgtctgagaagtgaggagcccctccgcccggctgccaccccgtctgggaagtgaggagcgtctccgcccggcagccaccccgtccgggagggaggtgggggggtcaggcccccgcccgggcagccgccccgtccgggagggaggtgggggggtcagccccccgcccggccagccgcccagtccaggaggtgaggggcgcctctgcccggccgcccctactgggaagtgaggagcccctctgcccggccaccaccccgtctgggaggtgtacccaacagctcattgagaacgggccatgatgacgatagcagttttgtggaatagaaaagggggcaaggtggggaaaagattgagaaattggatggttgccgtgtctgtgtagaaagaggtagacatgggagacttttcattttgttctgtactaagaaaaattcttctgccttgggatcctattgatctatgactttacccccaaccctgtgctctctgaaacatgtgctgtgtccactcagggttaaatggattaagggcggtgcaagatgtgctttgttaaacagatgcttgaaggcagcatgctcgttaagagtcatcaccactccctaatctcaagtacccagggacacaaacactctgcctaggaaaaccagagacctttgttcacttgtttgtctgctgaccttccctccactattgtcttatgaccctgccaaatccccctc

SEQ ID NO: 12941 - DNA, 1918 bp, Artificial sequence
  DNA replication origin
gcgttcaaaccagttaccaaatgctcatatctgagctctttcattttcgtttccctcttcttgccctcaccctgtctcctcccttattaacatagatagggaaataaatgccttggtaccacataattgttagaaagagcttaggtgtatcaagttgaaagccaataacacaaaaaagaagaaccagtaattttccacagacctggcagcagcctcctttgttgagaaatggcaggaaaacagccacaagcccgggcctctgtcttcaaaggtcctgatcactttgtgtgagagatgatccggccctccctggagcactggccagcttcgcaggcagcctttgacatgctcctgcttttaagtgcaaagaagtatatgtggggtgtgaatgctgtgtgcgctttctgtgtgtgtgtgtgtgtggtatccgtgcactttctgtgtgtgtggggggggtatctgcgtgctttctgtgggggtgtgtgtggtatctgtgtgctttctgtgggggtgtgtgtggtatctgtgtgctttctgtgggggtgtgtgtggtatctgtgtgctttctgtgtgtgtgtgtgtggtatctgtgtgggggggtgtgtgtatgttatatgtgtatgtggtgagtgtgcatgtggtggtatctgtgtgaggtgtgtgtggggtgtgtgtaggatgtgtgtgtgtatataagagagatgtatgtatgtgtggtatggggtgtgtggtgtgtgtgtgtgagatgtgtgtggtgtatctgtgtgtggtgtgtgtgtgatgtatctgtgtggtgtgtgtatggtgtgtatgtggcgtgtggtgtgtgtagtgtgtggtgtgtgtgtgtgtgacgtatttatgtgttgtgtggggttgtgaggggtgtggtgtatgtatgcgtgatgtgtggtgtgtgtagtgtttctgtgtgtgctgtgtgtgggatgtgggggtgtgtgtgatgtatgtgtgtggtgtggggttgtgaggggtgtggtgtgcatggtgtgtggtgtgtgtggtgtttctgtatgtggggggtgtgtgacgtatgtgtgtgtggtgtggggttgtaaggggtgtggtgtgtgggggtgtgtgtgtgatgtatgtgtgtgaggtgcggggttgtgaagggtgtggtgtgtggtgtgtgtgtggtgttggtgtgtggtgtgtgggggggtgtgtgattatgtgtgtgtggtgtggggttgtgaggggtgtggtgtgtgtgtggtgttggtgtgtagtgtgtgtgtgattatgtgtgtggtgtggggttatgaggggtgtggtatgtgtgtggtgtgtggggggggtgtgattatgtgtgtgtggcgtggggttgtgaagggtgtggtgtgtgtggtgtttgggggtgtgtttgtgatgtatgtgtgtggtgtggggttgtgaggggtgtggtgtgtggtgtgtgtggtgtttgtgtgtggtgtgtggggggtgtgtgtgatgtttgtgtgtgtggtgtggggttgtgaggggtgtggtgtgtgtggtgtgtgtgtgggggtgtgtgattatgtgtgtgtggtgtggggttgtgaggggtgtggggtatagtgtgtgtgtggtgtgtgtgtagtgtgggggtgtgtgtgatgtatgtgtgtgtggtgtggggttgtaaggggtgtggtgtgtggtgtgtgtgtggtgtttgtgtgtggtgtgtggggggtatgtgtgatgtttgtgtgtgtggtgtggggttgtgaggggtgtggtgtgtgtgtgggggtgtgtgattatgtgtgtgtggtgtgggattgtgaggggtgtggtgtatgtgtgtgtggtctctgtgtgttatgcggtgggggagacactgcatggacatgaccgagattacgcagcgggatgagtgaagttcgtgtccaccttagaaggc

SEQ ID NO: 12942 - DNA, 1213 bp, Artificial sequence
  DNA replication origin
tcccagtaggcgcggccaggcagaggcgcccctcacctcccagacggggtggctggccggacggggggctgacccccccccacctccctcccggacggggcggctggccgggcagggggctgacccccccacctccctcccggacggggcggctggctgggcagagtggctcctcacttcccagtaggggcggccgggcagaggcgcccctcacttcccggacggggcggctggccaggcgggggactgaccccgccacctccctcccggacggggcggctggccgggcagaggggctcctcacttcccagtaggggtggccgggcagaggcgcccctcacctcccggacagggcggctggccgggcggggggctgacccccccacctccctccctcccagacggggtggctggccgggcggggggctgacccccccacctccctcccggacggggcggctgccgggcggagacgctcctcacttcccagacggggtggctgctgggcggaggggctcctcacttctcagacggggcgtccaggcagagacgctcctcacatcccggacggggcagcagggcagaggtgctccccacatctcagacgatgggcggccgggcagagacgctcctcacttcccagatgtgatggcggccgggaagaggcgctcctcacttcctagatgggatggcggccaggcagagacgctcctcactttccagactgggcagccaggcagaggggctcctcacatcgcagatgatgggcggccaggcggagacgctcctcacttcccagacggggtggcggccgggcagaggctgcaatctcggcactttgggaggccaaggcaggaggctgggaggtggaggttgtagcgagccgagatcacgccactgcactccagcctgggcaccattgagcactgagtgaacgagactccgtctgcaatcccggcacctcgggaggccgaggctggcggatcactcgcggttaggagctggagaccagcccggccaacacagcgaatccccatctccaccaaaaaaatacgaaaaccagtcaggcgtggcggtgcgcgcctgcaatcgcaggtactgggcaagctgaggcaggagaatcaggcagggaggttgcagtgagccgagatggcagcagtaccgtccagcttcggctcggcatcagagggagaccgtggaaagagagggagag

SEQ ID NO: 12943 - DNA, 963 bp, Artificial sequence
  DNA replication origin
gtgaggagcgtctccgcccggcagccgccccgtccgggagggaggtgggggggtcagccccccgcccggccagccaccccgtctgggagggagggaggtgggggggtcagccccccgcccggccagccgccctgtccgggaggtgaggggcgcctctgcccggccacccctactgggaagtgaggagcccctctgcccggccagccgccccgtccgggagggaggtggcggggtcagtcccccgcctggccagccgccccgtccgggaagtgaggggcgcctctgcccggccgcccctactgggaagtgaggagccactctgcccagccagccgccccgtccgggagggaggtgggggggtcagccccctgcccggccagccgccccgtccgggagggaggtgggggggggtcagccccccgtccggccagccaccccgtctgggaggtgaggggcgcctctgcctggccgcgcctactgggaagtgaggagcccctctgcccggccaccaccccgtctgggaggtgtacccaacagctcattgagaatgggccatgatgacaatggcggttttgtagaatagaaaggggggaaaggtggggaaaagattgagaaatcgggtggttgccgtgtctgtgtagaaagaggtagacatgggagacttttcattttgttctgtactaagaaaaattcttctgccttgggatcctgttgatcggtgaccttacccccaaccctgtgctctctgacacatgtgctgtatccactcagggttgaatggattaagggcggtgcaagttgtgctttgttaaacagatgcttgaaggcagcatgctccttaagagtcatcaccactccctaatctcaagtacccagggacacaaacactgcggaaggccgcagggtcctctgcctaggaaaaccagagacctttgttcacttgtttatctgctgaccttccct

SEQ ID NO: 12944 - DNA, 2110 bp, Artificial sequence
  DNA replication origin
ggaggcgtcctgctccgggggactccgggcgccgcggagacacttttgtttcctccctgggggcgccgcggctcgggcgggggtggccgccgcgctcggcagggtgagggctgcgggcgcgtcggggcgctctgcagttggggaagtctgagctccggggatggcgggagtgggagtgggagcggagggagggggcgctggaggtgcggcgcccgcggatgaagcgcagggcccggggcccgggagcccgccgagacatttcgaccagggtctgcgggagggggggcgcgggagggttgcgacgctggcgcggggttactggggacgggggatgtggggctgggatcttggagtcaagattcctatagagctagagaagcggctgcggctcagactcggcgtcttctcctgcactcggggatgggagggaatcccccggcgagcgcgctcgtgggagggggcggtgatgggccagaggaatgggggccaggagggccggagagggcggtctgggcagccgggagcccctgaggttctggttagtaaatactctcctcccggggacacaccggggtctccgccgagaccgagagaggcggcggggagctttgtggagcttcgtggaaatctcggcttcggagaggggacgcaccgggcgcgccttcagagaagggggcggcggcatgccagggggcccgggaatcggagcggagagtggcgactgcgatcgccggagtcgctttgaggaagaggaaatacagaactcagctgtcccgggggtgcgcgcgtgtgtttggggttgggaagtcggtgctgtgccgcgagcgcgcgcgaggcggcgtgtgtgtgtgtgtgtgtgtgtgtgtgtgtgtgtggtgtgtgcgcgcgcgcgtatgtatgtgtgtgtggtgtgtcgtcggtgtgtgtgtgagtgtgtgtgtgtggggggggtgttgtgggtgtgtgtgtgagtcggtgtgtgtgtgtgtgaccgcacagccaggaactccccgcccagtgaccctctcccgcctagggggccatttgaagttggaggcgggtcgggacctgccttgacctaaaggaccagcctcaggcttggtcccaggtagtgacccagctctgagagtccctggacggctcccgagactcagtgaatatatttgggatgccccccgcgctggatcatgggcttcccaacaccgctggccttgaatgattcgggcctaattcgttatggttaagatttcagataatctaagacgggttgaggcctccagaagcggaggcttcctgttgggcgctgccagtgacttggggatgaagctatggaagaatatctgagtgtttctcttttgcttctataaaagtaattaatgacctgtatttacacaccaaaaccctgcgagcaactttgggacatagagggatataatccttctcagaatcactttgagattgcaaaaaccggcagcagctattattggggtctcctctggccagggttctcatattatctcacctccatgcctactttccaaggttgtttcaagcattaatgtcccataatttacagatctgggggaaaataatggtaagttaggaggccagatcccctgcagaaacatcacatatttttaatttttcttatagctgaccttttgaagctttactctttattattgtacatttcctatctctggaaggctgtggttaaatgtgcatgctgccttgtttctactctgttttgtttgtttttattaggttggtaaattttgagaaaatgacctggactgctgggactcttggggaggggttgtgtcaggagggtactgaactggagaacaagaagtatggtaggtatcagggaggggcaggctcggaggcagacccggatgggagtctggggaaactcagggcctggagcagtcattgggcaagaagatgggcagttctagtgatggtcatgcttactgtccttggtaactgcaggcaccctcaccgtcttacattcttctttttcactgagttctctccctagggcctttgcccatgatattacaggaggagcttttctcccacatgtccagatgactcacttcccctgctt

SEQ ID NO: 12945 - DNA, 1406 bp, Artificial sequence
  DNA replication origin
gggccggctccggagctggacatatccggcgtctccggggccagggtctgcgggtccccggcgctgcgtcctcccgacccgctccccgcggcgcccgggtcgcgccttgcggcagtcaccgagctgagggcagggcgtcccagcgtccctggccccggccccgctccgcagcgcgccgcaccccgaggctcgggccccgcacagctgcagccggtgccctccggccaagcccccgcctggcgtccccggccccagccccggccgcccgccgctgaccttttcctgcgcgcggttgagtcgcttctggacgttcttggcgaagatgcccgtcttgatgtcggccatggctgcgggtccggggagctgcgaagagcagagcgcgcagcggggctggcggcggcgcggaggagcgggaggaggagcgggaggaggaggagagggccgagcaagggaggagcgggagaagcggcggggagccgcggagcgcggaggggtgagggcggggcgcggcggcgggaccagcttaaagcgacagagcgggggcgggatgcgtcgggactggctgtgacatggggagaaggggcgggggaagaaagagaaagaggccaagaaaaagagagggaaaagccagaagccagattgtctcctcgatgatagaagagtttcgagaggagaaagggaaccaagcctagcagaagtccctgggcccaggggcagctcgggggttcttttaatgcagtttgtatttggggagagtgaggggacctgattctttccagcaaaaaaagaaataggggagacaaaaaagggaagaaccctagggatgtggaagccagctggattggaactgctctgaagtggagctgatggggctggtcccttgctgctcccaaaagtttccagctaacagaggcccctccatacaccctgggtgttgcagaagaaggtatggaggtcgccctaccctcaggaggctcacagcccagtgaggggccctggctgggaaaccaacgaagtcagagctgcaggagagaggcgtgtggagagcaaagcggggagagaccatcgctgacacttgtttaaactttaaaacaagagttagcagggcggggaggtccgcgttgagaaaggtcagcttccggaagacaggcgatgtgttttggtcatctccaaaattcctgtgctgggcagaaaccttagaatagactactcttcaagaaatggtgcatggaacagtcaagtcccttatagcttcgcatcaaccatggaagacccagtcccccctaacttgttgcttccttggaaaccttttggcaaccttaacagggactcaccatccctattattcttattaatgcttgggagaagtacgaataatagggataaacctgccctacacctagagc

SEQ ID NO: 12946 - DNA, 1499 bp, Artificial sequence
  DNA replication origin
ccttataaaaagtgagagccagaaaagctgattcttcatcatggccaaaaatggaaagtcagtttcaagcaactagacaaatccacattatgacttggatatgttctaagaggcaaccactggaatgacctactttaataaggtgacctaaggagttaacagagaagatgtgatggaggaaggaggattcagggaaatgcctgggtgtcggaagaagagctggcagtgcaggaagagcatcccagtggagcaggttcctgcaggagcaggagaggtggcctggctgagccctggcagttgtggaattagtggtcacagaacctttgcctaactttgtctctgtggcagctttcattgttgaccaaaggaagcaggagacagatctgtggcgtggggtgtgtgtgtgtgtgtgtgtgtgtgtgcatgtgtgtatgtgttatgtagatgtgtggtatgtgtgtagtgtgtatgtgtgatacatgtgctgtgctgtgatgtgtgtgtgatatgaatggtggtgggtgtggtgtgcatgtgatgtagggtgtgtgtatgtgtgagatgtgtataatatgatatatatgtgtaggtggcgtgtatggtgtgtggagtctgtggtatgtggtgtggtacctatgtgtgcattgtgtgtgtctgtggtatgtgtaatgtgatgtatgtatgtcatatatgtgtgtttaagtgttgtgtgtggtatatgtggtatgtggcatggtgtctgtgtgttgtgtgcaggtggtgtagtatatgtggtgtgcggtatgtatgcttgtggtatatgtgtggcatctggtgtgtatggtgtggtatgtgtatgcatgtgatgtatgtgtggtgtgtggtgtctgtattgtgtgtatggtgtgtgtgtggtatgtggtatgtgtgtggaatgtggtatgtgtgtggaatgtggtgtgtgtggaacgtggtatgtgtgtggaatgtggtgtggtgtgtgtgaagcatgatgtgtgtgtggcttgtgtgtggtatggtgtgtatgtgtgtggtatgtatgtgtatggggtgtgtgtatatgtgtgtttctggtgtgtggtgtctgtgtgtgtggtgtgagcaaggtatggaatgtgtgtgtggtatgtgtgttgtatgtgtatagagtgtgtggtgtgtgcatggtattgtgtgtgtggtgtgaacatggtatggagagtgtgtgtggtgtatgcatggtatggagtgtgtgtgtcgggggtgtggtgtgtgtattgcatgtgtatagtgtgtggtgtgtgtggtattgtgtgtgtggtgtgagcacagtatggagtgtgtgcggtgtgtgtatgagtacagagtgtgtggtgtgtgtggtattgtgtgtgtggtgtgagcatggtatggagaatgcgtgtggtgtgtgtatcgtatgtgtatggattatgtagtgtgtacgtggtattgtatgtgtggtgtgagcatggtatggtgtggtgtggtgtgtgcttgtg

SEQ ID NO: 12947 - DNA, 1351 bp, Artificial sequence
  DNA replication origin
ctccggccggagggtactcggtccttgtcgcctggaaggccccgcgccgggagcggtcgaaggaggagtctgacgggtggcgggggagcctgggcggctggaggaggaggaggaggaggaggagaaggaggaggaggactccgacgctttgctctggggagatccaccctcctcctggcggctctgcagcagccgccacagatcacttccggggcgctggggagcggggcggggcagctggggagcgacttcctgtccgtgggctgagaggagggtgatcatgggcctgggccgcagaacagtggctcggagggcgcaggctgcccggcctccgccccctgcaagctgagggctgtccgcgctgtctttccgacggccccacccccggctctctgagctccgcgaggtgaagtcatctcccgggggctcgggagtggccgcgggcctcgcggaggttcccggatctcggcgtcgttgccgcggtgtccttgtctttcttttggggaccaggagggggttcttgggggaaggaggggagagcggaggccgccatcttgcttctagagggtcagctcatgttccctgggcgtctcagggttgaggccgctcgtgtggcgtggccgggggtattcagagcggagctggcgacgtggcttgtcacgggccaaatcccaggaggcgggtcagccgcctaccctggctggagggtctcgtggctgccctgggcctcatctaactgctgatcccctggagaattcgctttctcggacggtctgcgagttctttctgaggggtgtcggacccccctgcgactctgcaggtgtcggtgtggcactgagatcatcttgcggccccatggcactgtgatttggtagcttgtgagaagtagtttcactaaatccgtaaatttaagttagcagctacagattcttatgtcttgacatttattcgcttatctctctttgctccccacaaattgagtaccaactatattcctggtatgagccattcaaggaatgtccagtctagtgggcagacatacatgaaagcaaatcattgctattggaagtatggtttatcaagatgtacagcgtgaagaatggatagctttactaacgtaggttagagttttaaagataaataggcattttctactacaaaaataggggtgggatggcaaatccggatccgaacagaaaggagatgcagcacggggacaaataatttgttgagaagaatgagtaataattacaggtcttgaagttcaaacttaggttgctgaagaagatgaggctggagaagaaaacaggagccaaatcacgaatcgtctatgccttggtgaggcaatgag

SEQ ID NO: 12948 - DNA, 1186 bp, Artificial sequence
  DNA replication origin
cggaagggaaaaacggggcctggaaaggccgttgtgaggaatgagccccatgggcctgaagaggcactggcaggcgggagctgggcctgccgaagcggccgagaggcaggagctttggactggggaggccgcagtgaggcgagagctagctgggcgtggagagtctgctgtgaggcagaggctgggcctgtgcaggcttcgggaggcaggaggccgggccttgtcgaggcctgcagaggccgccaaaagtcaaaagcggggcctgggaaggccgcccagaggcatgagctgggctgggccgaaagaggcactgggaggcaggaggagctgggcctggagaggctgactcgaggaacttttgcacccggagaggccgccgagaggctggagctgggcctggggaggccaacttgaggacgacttgggcctgcagagggcgccgggaggcaggagctggccctggacaggccgacttgatgacagtctgggcctgcagaggccgccgggaggaagagctgggcctggagaggctgccaagaagcatgagctgggcctggtgacgtcgacttgagaaagttcagggcctagagagaaggctgggaggcaggagctgggtctaaagaggccattgtaacgatggagctgtgcctgtggaggctgttgtgaggcagtagcctcatctgcggagactgccgtgaggtagggtatgggcctaaataggccattgtgagtcatgagcttggtctgtggaggccgactggagaaagttctgggcctggagaggctgccgggaggtaggagctgggccaaaagatttaagcagattacatttattaggcactttatttccattagtacactgtaatatataataaaataattatagaactcaccataatgtagaatcagtgggcgtgttaagctcgttttcctgcaactggatggtcccacctgagcgtgatgggagaaagtgacagatcaataggtattagagtctcataaggacagcgcaacctagatccctcacatgcacggttcacaacagggtgcgttctcctatgagaatctaatgctactgctgatgtgagaaggtggagctcaggcgggaatgtgagcaaaggggagtggttgtaaatacagacgaagcttccctcactccctcactcgacacactcacctcctgctg

SEQ ID NO: 12949 - DNA, 1110 bp, Artificial sequence
  DNA replication origin
tctgcaggcccagctgttcctcctggctgcatctcccggcccagctcctgcctcccagcaagcaagctctttcggctcagctctcgccggcgtttgtagaccccaaagtttctgcagccaagctcttcaggcccacatcctgcctcccagtggcctgtacagtcccagctctggctggagaagagcgtctgcaggccctgctgttgcctcccaggggcgtctccaggccaagctcttgccccaccgcggcctcccggggccaagtccctgtccgccttccggcagcccgcgtgcggccctgctcctccctcacggtggcctgttgaggcaggggctcacgctgacctctgtcagcgtgggaggagccggtgtgaggcaggggctcacgcctctgggcagggtgccagaggcatgagttgggcatcaacaggccaccgtgagggaggagctgggctgcatgcgggatgccgggaggcaggcagggacttggccccgggaggccgctgtgggggcgagagctgggcctggagaggcccctgggaggcaagagcggggcctgcagaggctgttctccagccagagctgggcctgtacaggccaccgggaggcaggaggtgggcccgaagagcttggctggagaaagttcggggcctacaaaggcggttgggagctgggcaggagctaagccaaaaaagcttgcttacttgctgggaggcagggccgggagaggccgacttcaggacgacttgggcctgcagaggtcgccgggaggcccaagctgggcgtggaggagcccactggccggagaccatttggggcctggagacaccatcggagggcaggagctgatcctggagaggccaccgtgaggcctgacctgggcctggggagcttggcttgaggaagctgtgggccgaccaaggccgccaggagatgggcaggcactgagtccaaagaggttgttgggaggcaggagtcgggcctggagacgcagccgggaggaagagctgggcctggagaggacgcccggagggtgcaagtgggtctggagaggccaacttgaggaggttctgggcccggagaggccgccggaagggaaaaacggggcct

SEQ ID NO: 12950 - DNA, 930 bp, Artificial sequence
  DNA replication origin
ccgggcccatgcagaccttcgagaggcaggaggccgggcctgcaaaggccgactggaggtcaagttctgggcctgaagaggccaccaaaagtcaaaagcggggcctgggaagaccgccgagagccatgagctgggctgggccgaaagaggccactgaggcaggaggagctgggcctggagaggctgactcgaggaagttttgcacctggagaggccgccgagaggacggagctgggcccggggaggccgacttgcagctcttccaggcccatttccaggccgacttgaggacgacttaggcctgcagaggccgccgggaggctggagctgggcctggagaggccgacttcaggacgatttgggcctgcagaggctgccgggaggcccaagctgggcctagaggagcccaccgaccggaggccgtttggggcctggagacgctgtcggagggcaggagctgagcctggagaggccaccgtgaggcctgagctgggcctggggagcttggcttcaggaagttgtgggcctaccagggccgctggaagctgcgggggagctgagtccaaagaccttgttgggaggccggagttgggcctggagacgcagccgggaggaagagctgggcccggagaggacgccgggaggctgcaagtgggtctggagaggccaacttgaggaggcccagcctctgcctcccgcatggcggcctctgcaggcccagctgttcctcctggctgcatctcccggcccagctcctgcctcccagcaagcaagctctttcggctcagctctcgccggcgtttgtagaccccaaagtttctgcagccaagctcttcaggcccacatcctgcctcccagtggcctgtacagtcccagctctggctggagaagagcgtctgcaggccctgctgttgcctcccaggggcgtct

SEQ ID NO: 12951 - DNA, 1423 bp, Artificial sequence
  DNA replication origin
catgagattcaatttctcaattacatatttctttttttttttttgagagttttgtccttcatgttttatggaataaaaagtttggcctttttattgcatgaaactaaaattgggaaaggtagggggcgtggatggggtgggagggggtttaggggagcagggagatgccctccccaccagctcctggataataacacctcacttcttgcataatttctggcgtcttcccgcctgcaatgccggctctctcagcgtctcggagaaggggggatcacacactcatcgtcatgcttggagaataattgtcattctgaaaggagtggaggaagctccctcctagctcgccgtcatctcgaggggtgcctggaggattgctaatgccacttatgttgttaggagaattttttggaagtccgtctatgtcgcctgaccctaatgatccattcatgtggtgtggctccatgccacccatgccgcccatcggaccgtccgagccgggacccatcgggaagttggacctgccgccaggtcattgtgtagatgttgtcactggaatttgttgaatctgcgggactgggcataatgggtgttcctggagggccgccaccaccgggggtcccacataggtaccaggtgatgaggaggaatatggaattgagttagcactgttaggattgggccagggtctgccagctcccgggcccatgttaatcccgggcatggcgggccgagggagttgggtggtggtctcatgccgctgccgtaattctgtgggccgggacccatgggccccatgcctcggggagggttcattctctgcattgatcctcccatgttggggtggccttgttgtcgtgtgggatccatagaattgggcagcaatggctgtgtcccaagaactcctcccggaggctggtttcccattctgatcgggggcccggggccgcctacgtatcgcggtgacataaaaggctgactgtggggtcccatcatgctgctaggattgtgaggtggaggctgtgcgtgcggcgagggctgtgaccccggaggaccctgaaagaaacctggcgggatggggcctcccggcatcccatcgttggggggaatgttgccaagcacggggctcggggcagctgctgcactataatcatgaaaggcttttgcttcacttgaatgttcacaagtgtctctcctttgaggagctgcacagtaaaggtccccaaatacacaccaccacgagtgcaaaaacccaggcggttctcccaacgtgatgtttttttcccatcgaatctccgacaagaaggtctctgcagatttctgtactcttacgtgcagtaaatattcgtagacgtatgaagctaacttttcccaagcctgcccatccgagggcaccgccgagcctctgcctttggcaaacatggtt

SEQ ID NO: 12952 - DNA, 1397 bp, Artificial sequence
  DNA replication origin
cgggactcgggtccctgggttccaggtcacagtggggtacgcagcagcctccgggccccagggaagcaggaatccgggcggcggagctcccgattgcgctcgtcgtcctatcctcggcagcgaaaacaccagatgcgccgggcgctgacctgcgggggagtcccgagtcctccaagtgcccccgggggtgggggagcggccttggccgcgctctcggctcgggcagcgcaacgcggaagtaccaccttcgtcgccgcttcactccatcgcgccctgacgttgggtgcaagttcaggggaggggagtgggcgagacaacaacacgcctccaccgcctcctcctcggcgtcgacgtcgtcctcctgtggtggcggcgacacaccgcaggcgcctcggaagtggcctgggcctgacaacaactcccggcctagggcctcgcgcactctgcggcccgcggggctgggcagcggggcggggcgaggcgggggcgaccgggctgcggctctcggttggggcagcgactgtgcggggctgggcggggggctatttccggggagatgggggcaggggcgtttctgagtctgtggcggtaggtacgggccctgactttcttcttctttcgccgccgccgccgccgccagcagaggtggcggagctacccctttcctccgctccccccctccacgaggaggctcctggtgtgcgcggcctgccccggctcgctcctccccttccctctccgctcctcgtcaggaggagggagagcaacgggacttgctggttgggccctaacctccacaacccctccttctcgcctcgctctttcggcttttcccctcagccctgacgtacgaccgggagcgcgcccgcaattcacgctcagagaaagccgaagatgagaggtggccggggcaagagaggcgggaacaaagttaccgcgcactggcgtgctcgctcccgccaggggccggcaggccgcaccggaagtggcatgatgtagaaaccgctcggcttccggcgagggtgggactccgtgtgaagaagggttaaagaaaggagaggattcgtgtgccgcccactgctgttgcttgagactctgcccgtggtggcgcgcctgtcgtgcttgttgcttgcgtccagcgcgcagtgccggttccggctctgcagacgccgcactgcctgcctgttgagcgaaaggtcacagtgagaacaagtgtttctggagactgcgagggaaataatgctgttggtggccttctggagtaggcagttaccccccgtgtaccttcagtcaagccctgggagtggaacagctgcgaaaggagagaaaacaccccgcaaaacagggtggagatggcgttggtttaacttgtctcacgtacgccaaagttcgaggcc

SEQ ID NO: 12953 - DNA, 1502 bp, Artificial sequence
  DNA replication origin
gcgtcgcgggccccgcgccgggcaggaggcggagaagcgtcgggtcttctcgctgccccagccgcagcaggacggcggtggcggtgctagtagcggcgggggtgtgaccccgctggtggaatacgaggatgtgagctcccagtccgagcaggggctgctgctggggggggccagcgcggcaacggcggcgacggctgccgggggaacggggggcagcggcgggagtccggcctcctcctccggcacccagcggcgcggggaggggtcggagcgcaggccccgccgggaccgccgcagcagcagtggccgcagcaaggagcgccaccgcgagcaccggcggcgggatgggcagcgcggtggcagcgaggcctccaagtcccgcagccgccacagccacagcggcgaggaacgggccgaggtcgccaagagcggcagcagcagcagcagcggcggccgccggaaaagcgcttcggccacatccagcagcagtagcagccgcaaggaccgggactcgaaggcccaccgcagccggactaagtcgtccaaggagccgccttcggcctacaaggaaccgcccaaggcctaccgggaggacaagaccgagcctaaggcctacaggcggcggcggtccctcagcccactgggaggccgggacgacagcccggtgtcccacagggcctctcagagcctgaggagccgcaagtcccccagcccggcaggaggtggcagcagcccctattctcggcggctgccgcgctccccgagcccctacagtcgccgccgctcccccagctacagccgccacagctcctacgagcggggcggcgacgtgtcccctagtccctacagcagcagcagctggcgccgctctcgcagtccctacagccctgtgctcaggtgagttctgccgttctgcctgtgtgtgccttggctgcgctggccagatccccaggaggaagggaaagtggtgcccgggtcctcagaacgactcaggtccaccaccgagacgagacaacaccgcctgagcctcccaggaaggataggcgttttcgcgcgcgtgacacttttttagggggtcgaagggacaaagcaactgggcgaagggaacttttctcctagctgtggcagggaagatttctaaggaagaattaaaagtttcagacttgttgcattaatgtgttaacaggtttctctcagttgctctttgcttttctggtacaatttgggtaaacctagaggtggtttaagtcttaattttgaaagttctgtgaagaggtttcattgttgggaatttaggaatggactgcaacttaagatctagtattgtacaggggaataagaatcaggtactgatgtcagagttagatgtggattgcagatgtttcttatgattattacagaaatgggagaagcagcctttctgtaaagtttattcttttagtatgttaaaaaagcttaggtggaagccgatagttctgaatactgaagttaaaaaaggtatc

SEQ ID NO: 12954 - DNA, 845 bp, Artificial sequence
  DNA replication origin
gccattcaccatgctgccagctgactcatttggcgctaccggcaggccgaaattcagctggcccccgctcccttgcatgggggtgctcttcagctttgaggcttgaatcccggcaccacaggcaccgtcgagtgcaccaggggccactggctgcctgttgagacagttcccatactgcggggccttacagggctgttcatggaaggcgtttccactggtgccacttccggggctgttgtggagcatcaagtgctctgggccaccgtaggggttgctgttctccccgagggtctgatagcccccagcaggcccgctcctcaaggggttctgcgggtggacgaccatgccgttgcagaacccaaaggcgcgagtctgcggcacagcgggccgcggcccacacttgagcttggaggaggacaggtcggcgcttccggagctgacttcgttccactgaatgggcaggtcggttttgctgccctcggggcagggctgctcgagggcatggaactgctggccagcgtggctgtctggcagcccgggcgcgtcaaagtcaccgggcccgtggggcactttgctgtcgtccgggagggcgctggggaagtgctgctcgtaccctgcttggttctgggaatttaaatactgcaccacgtcgtccggcaggaaatcctcatcgttcaggttggcatcagcgtccatggtcagggactccagggtgacgttctcggtgatgctgggaggacagggggacgagtggaagtttcgggactggccgccctcgggccgcgtgtaattctgaagcacgagactgcgcttctccgcggacgtggccatcgccggggggttgc

SEQ ID NO: 12955 - DNA, 2118 bp, Artificial sequence
  DNA replication origin
gcttctccgcggacgtggccatcgccggggggttgcagctgctgaggctgctgaagcgcggcacacgaggcagggccaggccctcggagcctgtccgcaccgggtcgctggccctcctcacgccgtggcccggcgcatcgtgcggctgcaggtggcgccgcccgtagccgtgggctcccccgtcgctgcacctcctcggggcatgaactggaggcagggccacgccaggctcgagggcatccccgagcagcgccaggcgcgtcttcaggctcatcctctccatgttgggcaggggcgtcggcggcggccctcctgtggcagccgcgtacttggccttgaggcggtactgctgggcgggcgtgaggctgagcaggctgggcaggccgtcgctctggctggcttcgctggagcggcgcgaggcgtcggtggagatggggtcgtaggagtcggccacgctcacgttctgcggccggccctcggcctgtgacgcctcgctggagcggcggctggagaagcagggcgagatccctgaggagcggcggctgctcaggtaggccgagctgatggtgctggcgctgctgtcccttctgttgagcatgttcagcatagtgacgtccaccccagagaggtcgcttctgcccgggagaagcgtcatgggcccacccaagctgcaggtgttgttggactgtgtgcctggagacagagaaagggagagaccatgcggagatgaattcccttcgagcatgacttacaccaggcatgagcaacccttttctgtaaagggccagctaggaactatttctggtgtcccaggccacattgcctgcctcacaactactcagctctgcagtgtagccccaacacggccacagagagcagtgagcaagcaagcgtggcggggtgtccatgaagcttcctttacaaaaacaggggcggctggagatggccgcaggctgtagtttgctgatgcctggcttaaacaaaacaataacaactccctcgattcactgaagcccctccccaagcgctgtgcaaggacaaaaagaatcttgtgatggtacacaacgcttgagttccaggcaagtccccaggcaaaggtactccacgagtttcacattcacgctcagggcgtcctgttcatgccacatcctaccaacaggtaacacctgtgttggtgcaggcaagagcttcaccccttaggtgctctcagaagtgtaatctcagaagtgcaaactgacctggggactgacagtggggagggatttctgactttccttgaactgggtaaatataaataaaagtggctgctaacctcgtggttttaaattttggaaaccagagacagagttccaaccacagatgcctccactgctggcattcccttaccctaatctaacagttatgatttcaccatcagaatatgagtcatgcacagtcacatttttttctcaatattatcctgttcctagctgtttttaaaatatggacaatcccaaaaggcaacttgaatgggctaaacattaacggatggttacagcgtcattttaggactggtggagaaactagcaaacataaaactgagggcctgcatttaaaagaacagaaaaaaaaaccctgagcagatgcatggtctgatgtagaactcaccatttcctatgagaggagagaccgcaggggctttagggggtagaatggggttcagtcgcggaaacattccattcacttgttttagcctttctagttttacgtgctccatccatttggtccctgccgggtttctcctggcttgcaaagcaagggctgtggttgcagtggaaatggttgagtccatgattggggtttcatcgatggcactgaggtctcctatactacctccatcggtcagaggaagctcgagcccactgttggaatagttgctgatgggggactgttggctgctgcatgaagactgaccaccagggcttggctgagatgtctgttggggtcaagtggaaaggaaagaaatgtcaccagggagggtcaaggaaagggagccaataatgagagctcatgcatatcgagatcttcaagatcatcagttggttgaatgagaagaaaaactatgttctggtgaatgga

SEQ ID NO: 12956 - DNA, 979 bp, Artificial sequence
  DNA replication origin
ttcgcggaccccgcagcccgctcctgcggccgcgcccgcgcctccggggccagaggtggtccccagcgtggggacgggatggagtgaaaatggctgtcaaaaggcgcccagatttagagagccgccggtgaggcgtccgagcaaggcttgcattcgctccctcctcctggaaggtcctttccgaagagtccgacccgcggaccggccggagacggattggagaatttcacctcccggaggggggacgaagtttgccgcagtggtggcggcgcccctcgcctccgcccccatccaaagggttcagaagaactccgcgagccccgcacgcgcctggctccttcctttgcgcggtggcgctctacggctcgggcttcgggcgcgcacggcgctcgggatgggcggaaggaggcgggaggcatggtgggtgcgcgcggggacctccgccgcgggggccgccgccgctggggcttctccagcccgggctatgcttcggagggcgggggtgtggtgtgagcggatggagagaggcgcgccttcgtcgtcatagaggaaaagtgaaagttgtaccatctgtatatgatttgggattctcttatttcttttcctttccaggggcagcgcgcacagacacacaaagtaaccgtggtccatgcaataatcatttaaggtgccgcgtttacacagagcagcaggggacagttactttcttgagtagcagcgggaaaacgggcgggagaaggcagagagggtgtaaatattgatcccaaacttgcagagtttgtgaagcgacttttaagcagattgtccgaagcggacgctccaccccgcacccggccttttatcctttcctgaactttgtgctcctgtcccccattgcacctccttctgtaagatgccgtcccccgagaggcgctgcaccccaggcttccctgcctgaccccgcgtggaaagaggattaaggaggctccctccgccgctg

SEQ ID NO: 12957 - DNA, 1085 bp, Artificial sequence
  DNA replication origin
agagaggctgggtgggagaagatgggagcagacaggacgcagcacgagtgccagggcgcgcatttggggggtgtcctggcggtgtggagagagaagagagagggcgcgggtgacatcacgcccgggcccccttcccctcgccgggtgggtggggcttcggcgcgccgggagggcgcggggtcaagtagggggaagaggaggagcaggcatgaatgtgtctgtgtgaagaccggggaggggcggaggaggaggaggaggaggagaaggaggaggaggaggaggaggcggcggcggcggcggcggcggcggcggagggcggggagggagcgcgcgcgtggctcgcggcgcccgggctcccccccagcccccgaccccggcccgcgacgcgccgcctcccagccgccgccgcccgcctcgcagctgggacccactccgggcttggggacccggcgggcgggagaagcgggggctcccggcgcggcctggaaggagcgagaaagcaaaagtaaggcgagcagcactccaagttttcccaacttcgccccctgcggcggcaggcgtcctgctgctcagcgcgtcccctccgagcccgagagtggctgaaagaaaagggactgggcgggggccggggcggaggaagagagagtgcgagggagcgaggagagtccggcaacatctgttaaaacttgggggaggaggagcgcggggaggaggaggaagaggaggagagaagggaaggagggagcgcgcgggaggggagcgcggagccgagggacaacttttccaccccgtgagtagtgcaggcggtgccaggtcggggcggggggcttctccacccagcacggggcaccaggccgggatgggacctttttccagaaagtcgattggatgccaggagaggcgtacggctgggggtttctttctttctctttcccctccctcccgcggttgaaccaaatcagaactgtcactcagggcttgtgagtcagaagggatcggattacacgatccccgaaactgatgccggagctgcacgagcgggagggagcgggcaggggcagcgccaccggcgcgctcgcacactc

SEQ ID NO: 12958 - DNA, 1166 bp, Artificial sequence
  DNA replication origin
ctcagagcctatggaggctcagagaatcctcccaggcctgaggccagttagtgagcgcggagatggggctgccacagggcttctgagtctcgtgctctctgcgatgagtcagtggtgttttgttttttcctgagccgtgaggtcgagggaaatcttaaaacaaatggctaactagggcctttagccccaccttacctccaccacttccaccataaaaccttaagtctgtctctgcacttgtcatgtcattgtgacaaggaaggagtcccaagaaacaaacaatgaataccaccctcaatttcgttaaaagattcttcagttaagcatttgaatctcaaaatgctcttcaaattctaatagctcatcattcatccacccacactcttccttcagtcaagacacttggcggcaacgccacacaagcaacccggagctccggggcacttctggctgggtggacccggcttaaccagaaagaggggatgttggaatgtcacaggggctttcttttctttctttttcttcctgtgtttccccccgagaactccttttttaagttacatgtccaggttggatatattaaaatgacgcagatgaacaaggactggatggtcgaggaaggaggccaaataacttttactagcatgggcctctgaaaatgaagcagggacagagacactttgtagctcaaggaaaagcggcacgttagagaccaggctccaagcctggggtctttgtttttgtgtcttttataaagtggcccatagggacagcaggctgtgtggtgggagctcctcctcgcttcgcggatttggccccgagggcagacgagtccggtggagagaaaaaccctgaacttccaaaggcatcatcccgcgagagggagtttcggggatggctttgggaaaatgtaaaacaaggagatggggagccaaggatggggggcggtggtaatcagagaagccttaaaagaataaaggggagtccagcccttgagcaagagtgagaaagagaggctgggtgggagaagatgggagcagacaggacgcagcacgagtgccagggcgcgcatttggggggtgtcctggcggtgtggagagagaagagagagggcgcgggtgacatcacgcccgggcccccttcccctcgccgggtgggtggggctt

SEQ ID NO: 12959 - DNA, 1146 bp, Artificial sequence
  DNA replication origin
acaccttgaaggcgaggttaattaaatcctgttgtggggtttgagggccggaacttaatttttggagttttatttaatgtcgggagcagattgggtaataaaatgtatattgagaataagatggccttttgaccttttagggtctagggctgtaaagcgtctcagggttgctgccgaacgagccatgaactgggctgggtttttatatttgatgaaaaagagcctaaacgctatctgatttgggataaagaaaaaggagcaataaccttgactatgcctttggctccagccacctttttaagagtaaattgctgggcaggtgggggagggcgagtcacggaacgaaactgtaagtcggaccaggtgtgaggaggggaggtgataaaaagattatagggtgaaggagcggaggctgaggaagaattgggacctagctcggcctggcgaggagcaggctggggaggaagggagaggtcagatgggtctgtagaaaaggaagattataaagactcagcgacgcttggggttggtactgaggggacaggcgggagggaaagaaggaagatttgggacgagttgcactgggcacagagactaggacgggactgatgtgtaaaagaatgcctggacatcaggcacctcagaccgtttgcctattttatgacaataattatttagatcttgcaggatggaaaaattcaaagtgccattttctggctatttggaactactgtcgagtttgtattggggtcaagcggcattgcagaagaaaataaggcatttaggttttaggtcaggtgtgagttgaagaggttttaagtttttgagaacacaggccaagggagtagaaggaggaatggagggtggaaggttgcccatagtgaaggaaggaagcctagagaaaagagagtagagaaacggagggaaggggttcaggggttcttacctgccagaaaagtgggaaaaggggttggggcgcagagataagaggtcagggcacggaaataagggattggggcgcagagatatgaggttggggcacggaaataagggattgggtgcagagataagaggttggggtgtggaaataagggactgggggttcttgccccatagaaaagcgggacttgccgctaaggctgaagg

SEQ ID NO: 12960 - DNA, 1088 bp, Artificial sequence
  DNA replication origin
ggaatcgcaggtttggcgtcacccggcccggaaccacgtgatgcaggaggtgcccgaggcggcggggctcgcgcgggtggagccgcctcggcgttcgagcggggtgggggctgcccggttgagatttcccggcgggtcccggcctctgcgtgcacgcgcctgcgtgctcgcgctcgcggttctggcgctgccggtgaggagccggggagcgaggcggggaggctgggagcggggcgcctcttctgaggccagagggggctgggcagggccggcccggcgggaagggggtcggccgcgcgctatcagcgcctggtccctgagccgcggcgctggcggtgggggcttttcggccccggcccctcctggcagggcccggctgtgcaggtggccgggcagggccgagggccccgcagcccaccgagaaggccccgccggcctctggcccgcccacccggcgacctgcgctggggccgcttgcacggccgccgcgggttgcagccttggagtttagtttcatcttcggattttccttcagagtcggagtgggagtgggacgcaagttggtggtcttcttcggtcttttaaaatagtctgggttgacgtcaaatgcagaaatgaggcagtgttgattttttttggcgtaagtaccccaagcctcgggggaaatcatgaggcagccggttgaaggagaccaactcgggaaggaggaaaaggttagggaggctgaagtgctcagtttaggacagacacttgctttggacagtttgctaactagccagtctgtgtgtatttttgttttcggcatttttgtcgcctttattaaaatttctcagcagttaaacaggccgctgatagacataagggaattatttatatagcagattgcccaactcttgcattgtatcctaacctaggaccatgctgtgtccccatggctttcaagctgaagaaatgaaggtctaaagtgtgtcagacgtacctaaagaagagttcaaaagtgtagctgccatcctttccttagctatcagaggaagcagtcactccagaatgagacatacacaagcccgggttcatagactcaccctcca

SEQ ID NO: 12961 - DNA, 737 bp, Artificial sequence
  DNA replication origin
tgcgaacccgcttgggggcttctttgtttctctccgtaccccgcaggagggccgggtgcgcctgcagtacccaagccggggtcgccacccggggatgccggcccggaccgggcggcggcgcgacccaggctgacaattgaacctcgcgggagaagcgagagggtggggaggagggtggatctcggccccgagaagggagggcgctgccggggcctcgcgtgcggcggggaagccgcccagagaagggcgggggggaaggggcggcagacagtgtccccgcgctacgcccgcttaccttggcagccctggcctgggcacagatcatgctcctgtcagcgcgcagattagagctggggggcgcacgtgccccgcatagtgcaccgggcgcctgggactggctggggaggggaccctggcgaccgcccgctctcgctgcgctctggctgccgggtgccccgagagagcggaggccacggccactgtcacggcggaggggcgcgcgcggctcggcgagtgtgtgcgcgaggagggggccggttcggtcagagtcgcacggtgttccggctccaacaacagcgcctgatgcgcggtaacgcagcacacttcatcgctttatcctcccgcttgcatcccctccctccctgcctgctcctctgtgggtaccagactccagaaccaaccacaagccgggcttgctctcattagcgctgccccgccctgcagcctccgcgcacccc

SEQ ID NO: 12962 - DNA, 1388 bp, Artificial sequence
  DNA replication origin
ctgcaggcgcacccggccctcctgcggggtacggagagaaacaaagaagcccccaagcgggttcgcagcgcctcccccgcccctcagcgccctcccagtggcgaggaggtgtcaggggagggggcggagagacctacgtaatcccccttcccagcccacacccaccccttgtgaaccaaagctctggatttgcgcttcgccttgggctcgcttttgaacaattgtgtcccatgcaatgcccgtggttagcccagagagcgcccagagcctccgcacgggctcgccggtgctcgctcgaggggcgcgtggccaggtccggcccttgctcccatggacgggtgcaggaggggaggaggcgctgtgtgggtgctcccccagcgcctccctgttaccggccggctgcgccgctcagccgggcctgccacctgagttttagcgggagcagtcatgtcgcctaccgtattgcgacttgcagacaggcagggagggagctgccggggcggggagggggggggaatgcgtccggtccatttttggctggaggtgcgcttcctgctacccccacgttcccgggcggtgacaatgcagcaaaatccgagggctcaaacaatgtggcccctccatccccggctccagggcattctgattgctctgccgctttgacgtcccggccacttggctgattttcagagccatgatgcgcggtgtctctgtcttgcacacagaggctgggcaccataacttcttccctgccgaatttcagcgcgtagggggagctggcagggacacaggctgcagagatgcccggcttcctgtggttccgggcacagcgcgcctcagtctgcattgggctgacaccagagagcatgtggggattttcctagttgccgaagaagatattatttgacgttgctgtagttttgtgcttacttctcttggaatctgcagtggtgcaattctccccttgttttccccccttctctttgaaaagatatcaatgctatgttcagcagaaacggatacagcaagagcagcatagttcaaaaattgagggaggcatcttctctcttttcctgggatttaaacgcgatttaggagggcagatgccctacccgaaaaggccaaccgttaaagaccccggcagtgttgtggtccaaggcgtctcaaagcaggtggccagatctgcgtttctcatcagcagactcactccggctgtggctattacggtaattcattctagattggggattcatttaaaaatgtgtgttttccactaagaagggattagagtccacatgcccaccctggtatgaatgtgtgtgcctgtttggtagagagatagattgtggtagaattccctgttggtagaattccctgttgcctgttcc

SEQ ID NO: 12963 - DNA, 1449 bp, Artificial sequence
  DNA replication origin
tactgaagtaaatacagataatatactttgctactgattagacttataaaacacacttttaaaatgtcaacattaaaagtgcaaaactcgtgagttgaacggagagctaaagacaggcaggcaaactgtaatcataagagaccaggcgtgcagaagggaagcacagaggctgttccctgagcgggagctctcagcttgcctggagaaaaccgtggagagagagagtgtgcaatgagggtctggagggttctccgtgtggaggcaggatatttggactctcttatatcggatttgtggtcataccaggctttggaactgggaaggcaaatggtttagcttagcgttattgaacaaatacaaggtaggaagcatgctgtgagagccttcagaggaacaatagccagctagctcttgatgatgagaacgctggagagggtgcttcctacttcaccagttctcctgggagaagaacatggccagcccaaagggatctcaggaggactgcgggtgtgcgaggatgtgtgtgtgcacgtgagtgtggagtgtgtgtgagagagtgtgcaaatctatagtgtgtgagagtgtggggtgtgagagtgtgcaaatctgtattgtggggggtgtatgtatggtgtgtgtggtgtgtgtgtgagtgtgggggtgtgtgtgagatagagtgtggggtgtgtgactatggtgtgtgaatgagtgtgtatgactgtggggtgtgtatggtgtgtgtggtatgtgaatgtgtgtaagtgaagggtgtgtgagagtgtggagtgtgagtgtggtgtctgtggtgtgtgactatggtgtttgagtgtaggagagagtgtggggtgtgactatggtgggtacgtgttagggtgggtgagtgtgtgaatgtgagtatgagtgtaagagagtatgggtgtgtgactgatgagtgtgtgtaagacgtgtgtgtgagagcgtggggtgtgtgactatgatgagtgtatgtaggatgtgtgtgtaagtgacagtgtagggtgagtgtgcgaatgtgtgtggtgtgtgagtgtggggtgtgtgtgagtgggtgtgtgagagactgtgggatgtgcgactatggtgggtgtgtatagggtgagcgtgtgaatgtgtgtgctgtgtgtgtgaatgtggggtgtgcgtgagtatgagtgtgagagagtgtggggtgtgtgactatagtgggtatgtgtagggtgagtgtgtgaatgtgagtgtgtggtgtgtaagagagtgtgtgtgtggggtgtgtgactatggtgtgtgtatgtgtaggttgttggagtgtgtgcgttgagggtcgagatgacctaggggcaatggcaggaaagatgtgggttgtcattgctcagactgaacggggcagccacagctgacagggaatcaggggcccagtgccagctccaggggcctgtgaaccaacgccttcac

SEQ ID NO: 12964 - DNA, 1011 bp, Artificial sequence
  DNA replication origin
ggcgggcccgagctaccggtagtctgcctgccgcagtccgagcgccgcgctggggagagcgggtgtttgaaggctccgcggaccggcactaggagccgggggcgggtccgtgaccctccggctgctcggagtgaacaggcggccaggaaagaagcgggcctgaacaccatgatccctttggagaagccaggcagcggcggctcctccccaggcgccacctcaggctcgggccgggcaggccggggtctgagcgggccgtgccggccgccgccgccgccccaggcccgcgggctgctgacagagatacgcgccgtggtgcgcaccgagcccttccaggacggctacagcctgtgcccgggccgggagctgggcaggtgaggacgggcggggcccggcgcggaaccttcccggacgcgcggggcgggacgtgggcgccgataagtgccggcgccgcggcggcgaggctgaagtggcgttgctgctgccgataacgcgcgttgtgacttggcacaaacttgggtgccgacggcaagtagggcagccgagtcgcaccagcgccccctccacgcgccgcgcccagcaagcgagtggtggtaactcgatggcggtcccggaggcgcggacactttcctcagccctttcgttctctgtggcgtttcgaatggctatttaacgagagaaggtgcgggccgcgctctgcctttcaccccgagcagcgggtctgaaaaccagaggtctgtggagccgactttgcatttttccttcaactcttgcgactttcttggtctgcctgtgtggttttaataaaatacagcatccgttgtgaccgcttcctttgcaccggcgctctgttaccttgtgtcggtcttctgctgaattcattttcgttttcttggttggttttctgccgttttagttctaaagcatttaggtccctttgcttcgagtttagattggtttctttcgtgggcgcttggcccttttctcgctttttactttgctgggaaccga

SEQ ID NO: 12965 - DNA, 1262 bp, Artificial sequence
  DNA replication origin
ccggctttgcggaccggggcgggatcccagctccgattggctgcccggctggggggcgggggccccgaagcggggtggcggagaccgggaggggaccggaggcggtggggaagggagtggacggaaggggagggagggtcccggcctcgtgcggtcgcgcgtgagatcctggcctctgtgccctgggtctggcgcctggggccgtaagaaccgtccgtgcgcctgccctgttctctgcacccagcttggtggcgaggggtgggtggtgggtgccggccgaccggagggcgtatggaagtggctgggccccctcacggtgtgcctggccccctcacggtgtgcctggccccggcgtggggggggcaggcccggggggtgtcgcatctctcttatccgccccccactcaccacgtagaacccactggatcccattggtatttagtggccccgggccgactgaactggcgccgaggcttacctgagtccttcctgtaaatgtgaggagcggagggaatattccaggaggccggtgtctgcgatgtcctgctcttgggtagctaggaagtagtgaacgtggtctagggaactgcctgggctcttatccacctgggaatgggtttgttggggatcctgatgtgggagaagccagggagcttctagcctagtggggctaggggagaaaacagggagaggggtggattaggctgaaggaaagagatctctgatcttaaaggcagcgttctgacgggtaaggttgactggcattttccccaacaaagagttctagtaccgtattccatgacctgacaagcctgtttaagtgaggttttgttgagtgcaaagagagaaggcttggctttgaatttttatctccaggcgggacctgcctcctgaactccatactcctctatccagctgcctccttaatacctcctcttggatctctaaaatacatttcaatctcaacacatccaaatctgtgcccctgatctcttccccatagcatcaccatctcgatggcaactccatcttccagttgtcaaggccagaaaccttgctgtttcagaaacctttctctcacatcccacctccagggcccaaaaattctgttggttggatctccctagcatacccagagcctgaccacttcttacctctgcctccatcatctgctacctgggtcatgacagtggtctcttccctgatatccctgcagcctgtccccataaagcagccagagtgaccttaaaaaaagaaagcca

SEQ ID NO: 12966 - DNA, 1020 bp, Artificial sequence
  DNA replication origin
atgcaagcagcaaccgcgggagagcgaacagcggcgggatgagcattcacaaggctgagcattcacagggctgcggggaaggcgggagtaacagctagcagcataccgcggccccgccccgcagaggccctgccccgcccccgccagagtacagagtacgagctccgacttggtctcgtccgcggtcgtccccacccctcagcgcgctgtggtacgtcccgcgctccgcttggcccaagatggcggcctccgtgtgcagcgggttgctggggccacgggtgagtggggcgactcggcaggtccctgcgagtcggaggtggggtccctagtttccgcctcacgcgccctccctccacaggtgctgtcctggagccgagagctgccttgcgcttggcgcgccctgcacacctccccggtctgcgccaaggtgagcaccgccggggcaggggcctgggggcctgggggccggggggccgggggccggggaagccgtgcgggctgaagggggcgtgtcgctggggtccgaggcggggctagggtcggggcttagggatcaggggattggggccggggaacagtgccagctgactggggggacatggcgcgaagtaggggtctggatcggggatctcgtggagtcacggccccttttgctcctagaaccgggcggcccgagtacgcgtaagcaagggggacaagccggtgacctacgaggaggcacacgcgccgcactacatcgcccaccgtaaaggctggctgtcgctgcacacaggtgagcggaccccaggcctccaaaaggagcactcaatccgactgtcatgtaaacaaaatgaacacgtgtcacaggttttctttaactcaggaaataatgctagggtcagaaatctatgaaaccaactcaagggagacataaaaaagcagagatatatatagatcaggatgttgaaacaaatttgaagatggatgcaaaactgactttttccatggcaggcagggactcaattgatcctccactgaaca

SEQ ID NO: 12967 - DNA, 1594 bp, Artificial sequence
  DNA replication origin
agtgagccaagattgtgccgctgcactccagcctgggtgacagagcaagactccatctcaaaaaaaaaaaaaaaaaaaaaaaaaagacagaagacagagctgagctgaatgcagaactgtggggaaaaataaaggggaggggccgggcgcggtggctcatgcctgtaatcccagtacttggggaggccgaggcaggtggatcaccaggtcaggagatcgagaccatcctggctaacatggtgaaaccctgtctctactaaaaatgcaaaacattagccaggcgcagtggcgggtgcctgtagtcccagctacttgggaggctgaggcaggagaatggcgtgaacctgggaggcagagcctgcagtgagtcgagatcacgccattgcactccagcctggggacagagtgagactccatctcaaaataaataaataaataaataaataaataaataaataaataaataaataataaataaaggggaggtggagcccagccgggatgagaaggatgctggctaggtgggcaggggctgaggggaccctggagctgtgtctcctgacctctcacccctgagcagcccccctgccctgcctgcctgtagccaattcccaaatgtcagcccccaccccaccccttgaggccggctgcccagctccatgcacttactcgtcatgctgccggctcttggactggtcgggctgcagccggaaccagccctcctcctgctgcgccacccgcagtctctggacatcgatcaccacctggggacatagtggcagttttcctggagctgggagacttaggtctcctccttgccaactactgttcttagtggggaggggcctcttccaagggtccctgagtgccagtggtggtggggggaagttgctggttctggcagacggtggaggtgggggggtagtcccaggcttcctgagtgtccctctttggggaagccagaaggaggtccctgaggatgggatggctgcaatggagccaggtgctgggggacagcaggtgcagcctgccgggggaggagggggggcggggcggtggtgctcactttgcccaggaagtcgtttcggctgacaaggtcccagtcccaggcctccacgcacagcgcctccacggccccctcctgcagctcaaattcaaacgtctcattccagcgtgggtagcatgacttcttcatgatctgcccagaggagggtgggagggggttaggctgatgccactggactccccaggctgggcaaaaggcagagctgccctagacacctcccctgggttccccacagcctcctcgccttggaggttctgccacagcagaggttaaaatgtcctgtccaagctcccacccatttctcagatggggagaactgaggcccagggtggggaaaagatgtatccgaggccacacagcagaacagtactgactatgaggatgtggtgaacagggaatacctctacactgctggtgggaatgtgaactagtacaaccactatggaaaacagcggagattccttaactaactaaaagtagaactaccatttgattcagcaatcccactactggatatctacccagagg

SEQ ID NO: 12968 - DNA, 862 bp, Artificial sequence
  DNA replication origin
ctctgagcattgcctcaagacgccatacaggccgggtgcagtggctcacgcctgtaatcccagcactttgggaggctgaggcccgcagatcacctgaggtcaggagttcaagaccggcctggccaacatagtgaaaccccagctctactaaaaatacaaaaaattagctgggtgtggtggcacgtgcttgtaatcccagctactcaggaggctgaggaaggagaacggcttgaacctgggaggtggaggttgcagtgagctgagattgcatcactgcactccaacctgggtgacagagtgagactccatttaaaaaaaaaaaggggggggtgtcagggtttcatacagagctcaggtgcctgagcctggggcacagagagtgtccacaaggcttcctagagaaaaggggagacctagccctggtgggatttggggaggagggggagagggagtgataaaaagggggtggggaggtgtgggggcaggaggggcaggaggagcaggaggggtgcatgcagccaggccaggcaaggggccccaggtgcctagctgaggaactgggctgtatcctgcagcctatgggagccgggagtgggttttgatcaggggagacaggcagataatgtttgagcggggtcctgaggtgtggagggtggagggggagagtgatggggagcaggagcaatgagctggatttgtgaggtttgaaggaatcgcctcagtccctttggttaattctgcccggccagtggagtctcagtttcccctgtgcgatgggtcagagcatgctagccaatggctgtgggatctcggccagagcctttcttcagcatccatcatctctccctctctcctcccctcc

SEQ ID NO: 12969 - DNA, 698 bp, Artificial sequence
  DNA replication origin
ccaggactaggaggcctctgtaggggcagaacagccctcccggcgctctgagcatgcgccgaaaagcgcccacgggggaaagccaagccggggtgcgggtgggggcggtgcgctcgccactgacgcatgcacagaggcactggcctctctcggggttttctcgcgcctgcgcaagatcctccagcccgaaagggggcgatgagccgatccttgcgcgggtttgccccgccggagtaatccggaagaggcctcttattagggctctggtggcggcggcggcagacacttggggtctggacgcaacggaggcgggagcgtgaacgcccctccagccttcgagtcgttcttgctcttcgagggcgagaagaagtaagtgacgccggctgcggcgggccgaggtgcgcgggcctgcggctgtcgcattctggggtgtctcctgcccatctcttgcccctggagggaaacagcttttgcttgatcgtccgctcggcctgtgtcagccaaatttaaggccgttccgcgaggcagtcgcgagtgtgtccattttgcagatgaggacactgaggcttggaggcgagcaagttgccccggacacaggaagtggcggcgcttgtattcgaacccagagtgtctggttctccatagcccttttcctctgggatctggcagcttcctcttttgtctctcgccctccacct

SEQ ID NO: 12970 - DNA, 1030 bp, Artificial sequence
  DNA replication origin
tgttggccaggctggtctcaaactcctaacctcaagtgatccacccgccttggcctcccaaagtcctgggattacaggcgtgagccaccgtgcccggccctcctaggttctgacaagcagtacagatgccacacacctggctttcttctctgaccccgggggtacctcaagtgggctccaaggaaggggacaggtgcctctaaggtgccccacttgccggcctctcagagccccacttgccggcctccctccttacccaccttggagctgggcgtcttcgcgaagctgagggcctcggtagtgagggagaagtagagcttcttgaaggaggaggacatgagggggcccttgcccttggtcctgtggatgaagagtggcccctccttcacaggtggcgcctgcaaactcagcgtccgctgcaggtccagctctgccaggccagggagggaggggaatagagagcccagggaatgagggcgggactggggggggggggcggagcagtgggcggggccatggggctcaagggctgagcaaatctgaacagcaggcagtggacgtagtcatggggctcaagggcggagcaaacatcaacagctggtggtgagcggggtgacaggtggactgaggaaggcagggccatgggcttggaggcgggacacgcgtcagtagcaggtggcggcggggctatggagctcaaggatggagcaaatgtcaacaggcacagatgatgggaggtgaggccatgggtctaggggtggggcaaacgtcaacagcaggcagtgggcagggtcacaggaagcacaaacagtggtgcgtgggtctatggcctgggggcctggcaaatgtcaacagcaggcggtgggtggggccacgagaggaacaaacagcggtgggtggggccgtggggctcaagggcggagcaaacgtcagcagtaggctgtgggcgggtctgtgcagggcggcgctcaccgtccttctcctcgatgtccacgagcttggtgatgaagtccttcagctgcgccacgcc

SEQ ID NO: 12971 - DNA, 967 bp, Artificial sequence
  DNA replication origin
gctggtgcgggcgtccgcgtggcgctcccgcaggtggaagagcttgggcgacatgatggcgggagagaagaagcgcaggcacaggaagctggtgacggcgatgaacggtacattctggaggggtgcggaagagcgcgggctggagtcccccagaccagggctcctggcagccccctccccttaggctccgtccctgaccctcgccgggacacagcctccctggtcctccccagcgctccctggttccccaccgctcttcgcccgcccctcgccccagcccagtccaacccggcccagcctagcccagcgggtggagggcgcacctcgtgctgggcgccggggaagcgctcgcgcacgcgccggaagagctggcggaaggtggcgcgcaccacggcggggcacgcgggaaccgagcggctgagcgcgctcagcagggcccccaggtgggcgcgcagcgtctgcgcgctctgctccagcacctcggcctcggtctgcgggcggtgcagcccggaacacctgcgtggaacggggcgggttggcagaggaggtcacggtcagcgccagggccacgacaggaacagtggctctcacagcagccgggacacggacacaggggacaatacacgggtgggcagaagcacaaacacacatgctgacagggcctgatcccaacccgctgccgctgcgccccgcacccccccggagttacccccggcctcaccctacatccttaacttccactttgctggggtccagctccacgtacttctcctcaaacaccttgttgatgatggggcccaggacgccgtgcaggtactgcatcccggccacctggggaccaccgcaggtcacattgatcctgtctcccccagtcccactccagctgcccaccttctcccggcagccgcccttgcaccgtttgcctgccgtatccgcccaggagggggacaggtacacaagcagggca

SEQ ID NO: 12972 - DNA, 1060 bp, Artificial sequence
  DNA replication origin
gcgccccgcacccccccggagttacccccggcctcaccctacatccttaacttccactttgctggggtccagctccacgtacttctcctcaaacaccttgttgatgatggggcccaggacgccgtgcaggtactgcatcccggccacctggggaccaccgcaggtcacattgatcctgtctcccccagtcccactccagctgcccaccttctcccggcagccgcccttgcaccgtttgcctgccgtatccgcccaggagggggacaggtacacaagcagggcaaactgtttattcatgaatgaatgaatgagtgagtgaatgaatgactagaattcttagcccttgtaatcctagcactttgggaggccgaggcaggaggatcacttgaggccaggagtttgagaccagcctgggcaacatagtgagactgtctctaacttaaattttaatcacacacacattcttttggggggggggggtgcggggcacggagtctagcacggggcccaggctagagtgcagtggcgtgagctcactacaatctctggcttctggttcaagtgagtctcctgcctcagcctccccagtagctgggatcacaggtgcccaccaccatgccaggctaatttttgtatttttagtagagatggggtttcgccatgttggccaggctggtctcgaactcctgaccttaagtgatccgcccgcctcagcctcccaaagtgctggaattacaggcatgagccactatgcccagccacattcttaaccttaaagggctctcaatatggagatagaacactggagtcgaagtcccagccccctctgtcgctctctctgaagctcagtgttgtcatttgcaagatgaggacaatatagcatgcaacctcaccttcagaaaagactccatggactttgaggccagagagttgctccggaacagggtgttggtcttttgttacttggtcataagtaggcgttttccttttgatttggttctaggaggttagtgtgcattggcgttctgttgcctgcttccagcccctattctcctgcctc

SEQ ID NO: 12973 - DNA, 2198 bp, Artificial sequence
  DNA replication origin
ggccaaagcagaggtgagtgctgccccggggcatgctgggcacgtgggagtgttctgcttgctgtggctcatctttcctcacaagtgagctcatgcagcatccactctccttggtgcccattacagatggtcacactgaggctcgggtaagttaagccacaaggctaatgatcgactggctctggtgcccgtctttggccatgtgcctaaaactcagtcctgggcaggggattaggctgaagtggcagcatagggctgagcgggcagtggctctccctgcagaaggaggaggagaaccgtcggctggaggaaaagcggcgggccgaggaggcacagcggcagctggagcaggagcgccgggagcgtgagctgcgtgaggctgcacgccgggagcagcgctatcaggagcagggtggcgaggccagcccccagaggtgagccagaggtggaggctggcctgggggacccaccctgaggcattgctgggcacctgctccatcccatggaggcgaggaggactaaggggtgtggcatgagaagctgtgactgtgcctcagctgtgccccacccggcccttcccagcaggacgtgggagcagcagcaagaagtggtttcaaggaaccgaaatgagcaggtaagatgggggtgctctacttgtttggacctgtcctggccacacgcagaagtccctgatctcggattgagggcccagcccagacctgggcagaggctgccctgcagtcagctggggcaggttggaatctgggcacctcaagaggtggcagtagagaggaaagccaaaggcggaagcgtcgggcttggaccacacctggtcctgggggaggccctgggagccccttggcttctgtgttttacttccttttttaacgttactttttatttttaaatgacttctctcctgagaacatgttttgcctcctggccccacactcacctttgaggggctactgggccgacagctggaggggctgtgatctggggagaggtggtgaaggttttgcccactgcaggggtcaacatgtgcttccctccaggagtctgccgtgcacccgagggagattttcaagcagaaggagagggccatgtccaccacctccatctccagtcctcagcctggtgagctctccctttgggcctggccatgaggcagcagcaggctgagggggagcctggggtcctatgtgggctcccccaaggctagtgacagatatatcggtgacgggtgagtgagtgaggagaagggacacctggggccattgacctcatcagtgaccacactggtcaccagtttggcctccaaaagatattgggctgcgctgtctaccacgtcaccacatagcacatggccctggggcctctgttcctgcactagcaagagcaagccccatgagactgcctcgagcacaccagggtggagggtgctgtggggtgcgtgggtgtgtggtggtgtttctgaagtgatgtatatatttacccgggtttgcaggcaagctgaggagccccttcctgcagaagcagctcacccaaccagagacccactttggcagagagccagctgctgccatctcaaggcccagggcaggcaaggcgcttgtcaccccatggggaccctgggggacagcagtggagaagggggatgtgtgggagtgagaacctgctgtgttccctggtgcagatctccctgctgaggagccggcgcccagcactcctccatgtctggtgcaggcagaagaggaggctgtgtatgaggaacctccagagcaggagaccttctacgagcagcccccactggtgggttcctacactggggctggggccaggaaggggctgcatactcaggaacacttatcacgggccgcctgagttttctgggggcatgcaacaggttttaaagcacatgcatttttggagcagccctgtgttataaattgtcagggcacgccccactctataggaggtgctgggtgggaagaggaccttgcagcctatggctgagggatttatgcactgtcctgtggcttctgtactctggtagggcggggacagcagcagcccagcccccgagcctgtagactgcttgccctctgcgtactcccagcttgacctgagccatgtggggcagagcagcgattgtgtgtaagggctgagtctggggtaacacctttgtcatccctggg

SEQ ID NO: 12974 - DNA, 993 bp, Artificial sequence
  DNA replication origin
tggctcggggcgctgcagtactgaagccccatagttgaaaattatcttcctcccagctcctacccaggccctctccctctccagatgcctacagcacaccagacagtaggctccttgctggcacgaaccacagcctccagctcatggctctcaaatgcagtgcaggtatgcatggttctcttctgggcattctgggcagggtgccctgcaggagccacagttaactgcagtgcaactaatgagacactgcacatcagggaccacttgccattcatgactgcaggccccaccacagctccacgatgtgggccccactcacatcccatccagggcaggaacgtgagccatggggaggctaagagcagacccagggtcacacagtgatgaggctggcactgagggctcccacctcatcacaccctgcagcacaccagcaggggctcaactgatcctgcaggcacaattgacctccggaagagccaggccttggcggggaggggtgaaggtgggggtcagggggcagcatatctgcctggagacattcagtggccaggttgggggcagcccaatttcctgagtggaagtgggggacacaggcaggctcaggcgtttctctgctctggaggaaggtactcaaggcccaggtgtctgaagatgtcttcctctgaagccgcttggaaaaatgtcttctgcaacagaagcaggacttccgtgacctaggagtcttgccactgctgcttccctgcaggaagactgagggtggggaagagcccagcgccgaggtggggtgtgctcttgagggccaggaactgtgtgtggagacccagattcgggtcctatgggtttcaggctggaggggtctggggccatttcagattgtgggtcagggagcggactatgggtgctgtttgctgtccccagtccccaacaatgtacctgctccgggtcaaacagcccatggctgttcagccacaggcccttctccttccggct

SEQ ID NO: 12975 - DNA, 1956 bp, Artificial sequence
  DNA replication origin
cggggggctccggggagggcgcggggggtcaggggctctgggtctctgggaaagggcggagaggggatcgagacgggtgagggaatccaggaaggggcgggagagaggatggggtgagcgagggaatccgggaaagggagggagagtggattagggtgggcgaggggacccgggaaggggtgctggggggctccgaagccagaggggctcaggggtggtcggggcgctccgaggtcctggcggctaataggcgctccggccccgcgtggcgcactcccgcgcggatagccgtctccaaagcgctggcggggcccggggcgggggcgccggggcttccggagccggctccccacccccggggaggaggaggaggaagagaaggaggagccgagagtggacggaggggctgcgggggggcggggggcggggggcggggggctaggggcggggcaggcgggcgggcgctggcggcgagcgtcccaagcccggagacttgcgcctaggacagaggggcagggggcggggcgactgggaagacagagggcctgagggaaggaaaggtggtggggagggcctggggtgcgggtctgagggggccgacatccctcctccttctgccctaggcaccccccttaaggcgggaccccgagtccaccggggctctgagccctccgcgggtgaccaggaaccctggacggaaagccgtggtgtcaggcctctgagacctctctcaattcggagggccacagaaaggccaccccatccttcccaggctctggagcctctgcccatgggccctgctgcatcccagcgtcaattcattcagtcatcctaccaacctcttcaggtcggtgtggggccgggccccgtgctgggccccagggagggacagcacagtgggaactcactttccagccaggaggcaggtgcaaaactgccctcagagtggccagctgccccgctgggggtaggagtcccatgtaagggcatgccatccctcccctccgggtcccaacgtggacaaatagccatttatcaccttcttcttaccagaactcattttttaaaaagtgtctaccatacctccagctgccacatggacccagagggcccagaggacccagaaggcaggtggattgagtgtcaactgatcccaggatccatcagggatgtgcaccttggtgcctggtgtttgccataaggcttctccagggcaaatgttggctgccctacaacggccatcaacaggcagagtggtcccattagtatggcagggcgtgacacagcacagtcccccgtgactcaagcctagtccctgtctcatactggaggaatggggagctaaggacagagctccgaggacattcccccttaaaggaatgaggacacaagagaaagctcacaggtagtccatgggccaagtgcagaggcagacagccctaagccacgattgtctgcggggtttggccccagtgaagtagtcaggtagggaagcctaggagcccctgggatgattgacagggcagagtttggacctggggtcaaaaggaaagaggaaaagtgggtcaggaagcacctgggtccccagagcagccccgagtgagttggagcaggcagcagccggggaggccacagtggaggctgctgggcctgggatacatgccaccccctgggagcaggaccacaaggaggccttgcctcctctcacacctggtcctgccaagaccctgcctttgctttctcactgcatctccttgaaaaagcagtgggactgtgtcaggttctggctctacctcccaggcaccacatctcggcaggtagcctcagtgccgtccacctgtgtccctgttctccttgtcgttcatacaggatcatgcatgtgctgtgcctagcacacattcttggcactcacactgctgccttttagctctcatcatttgccctcagagatcaacc

SEQ ID NO: 12976 - DNA, 751 bp, Artificial sequence
  DNA replication origin
tagagccaccggcccccaaaagcggccctgccgcccgggtgctggatgtgcctccacgccagcgctgacctcggcctagcacagggtccctccaggcatctgggctcgcgtgcgcattagtaagccagccattcctcccctagcagactggggagtggccagaccctaccgaatccccctgttcccacctgagatgccagccccccacacccccgccctgccctgggctcttaccttctgcggccgtccctggccgcttccctggcttgccccccgcctgggcttttcggacccgcggggtgggctcgggaggcggcggggcctccacgtcgtcctcccggggctcaggttctagctctgacaggaagccctcgaggaactcctcgatctcgtcgtcggtcagcaccgtctgcgggcgccctccagggcacagggccagcaacgccaggaggcagctgagcaggggcgccccgcgcacggccgccatggccgcggcacgcgcggggggctccggggagggcgcggggggtcaggggctctgggtctctgggaaagggcggagaggggatcgagacgggtgagggaatccaggaaggggcgggagagaggatggggtgagcgagggaatccgggaaagggagggagagtggattagggtgggcgaggggacccgggaaggggtgctggggggctccgaagccagaggggctcaggggtggtcggggcgctccgaggtcctggcggctaatag

SEQ ID NO: 12977 - DNA, 1644 bp, Artificial sequence
  DNA replication origin
ctttggtcttttccggaggcactgtccaagatgcagactcgtgtcaaatgaacagagccagctctgtgcccccatgaggcccctctctagatgcccagaacctgggcacagggactcttgtcagttcccagtgcggatcagcaaactgagaggttaagtcatttgcccaagtggcaaactgggatccggacccagattttctgtctgcaagtctggggctgtgaccaccaatctcaacctctctaaagactgagcgtagggttcccagttcccagggggaggccctcatccccccacctgccaaaacctcaataggggttccttactatccactcctccactattctgttctgggcacagaaggggcagagaggtgactgagccatccaggcctggaggagcatctggtcatccctgccaactgccatacaaaggaagggacatgggcccaagaccttcccctggtctcctacggggcaagaaaagcttcaaagaaaagggacacttggttgagtattgaagcccaaagaagaggaagtggtctcctttcgagaagtaaggggtttggaattgattggaaggatagggagtcctggggggttcagggatcacacagaggacagaaaagacaggtagggagcttgtggctgcacactcatttcagagtctgggagagggagcagggactggttgtgaggattccccatgggaatcctcccaggaccctaagcaggagctgcaagtgctgttgagaacctgatgagaggtggggagcatgagggaagtttggcagaaacacaggaaagctaccaaatgcagacagccaggggacgcagggctgctagagcggtgccccagagccaggagagcaagcctggaaggagagccagaggcaggaggggcacaggcagcccagggtgtgggaagcagccaggaaagatctagagctggggtggcaggggaggggctgctgacatcaggaatgttggatggtgccttggaatctcctgggagacagggatcacaagaccctctgccaccttccagagggccacgatgaaaacagctaagatttactgacaactgattatgcaagaggccgtgggttaaatgcttcagtgatgcatcacctcatctaatttcctgtactaatgtaggaccacccattgctcaccaccacctgaagccctgtgctcaccaccacctgaaactctctcacctacgtgagacctcctggagtaggagggcaaaggcaggagggagggacgacgtgaagctgtgccaccaacagggagagtggtcccattagtatggcagggggtgacacagcacagtcccctgtggctcaagcctagtacctgtcgcgtactggaggaatggggataagcgacccgtacaaccacagcaccaaccctagagccaccggcccccaaaagcggccctgccgcccgggtgctggatgtgcctccacgccagcgctgacctcggcctagcacagggtccctccaggcatctgggctcgcgtgcgcattagtaagccagccattcctcccctagcagactggggagtggccagaccctaccgaatccccctgttcccacctgagatgccagccccccacacccccgccctgccctgggctc

SEQ ID NO: 12978 - DNA, 1179 bp, Artificial sequence
  DNA replication origin
gccccaagccccagccacacacctttgtggtccttgcccttctccactgcccacttgtcggtctcctccttggggctgctgtcctcctttttgggtttctctggaaggtgcaaggtaggaggggccagtcagcctggctctgggctttgaggaccatgtggggtggatcaggcaggccccaggtggccttcagggcaggcctggtgtgggaagtccttggtcccactcactcagctcctccttctcttcgtctgtctggcgctcagcatcgggcttctggggcggaggaggcccaaagtaatagtccactatggggagggagagccagctgaggctgccctgaccctgctgcggggcctcagctcctgggtccacaggagctcagcaggacaggaccgcgccagaggggaggaggacgggagatgggggacagctgagttgggagagggtcttgcaggagtcaggagcagcccgagctcaggggcagctgagcaagaccctgctgaagtcaccagcccggccttccaggagcatctggcctggggaaaggactcgaggcccagggcatgggaaaggcctggagggacaactggcacctgtgcctggggttgcgggctggggggtgagatggggagacattggaggcactgatggggacctgggggcagggaaatggcgatgcacgggctgccacccaggaggaaagggaacctgagggctccagggacgcaggggcatgagcaacagggaggcaaaagccctcgggctccctgaagagagtggggcagtggccacgagccagcgggaagccagttagagcacaggactgggagggctggaacccacatgggtgacagggcagagtgtgtgcctagggacacccctgtgggggtcacagccaagcaggaaccagggaagcggccaaggaaagaccagcctgagggcagaggagacagggcagtggctggggtgggcacgcagggacagcagggacagcgaggtaaccacgggcacaggtggggttgcaaggtgggtgagttgccccagctggctcctgaccacaccccagccccgacccccacctgcctatgtccctcagactctggggtgctgggtactcactgtcatcgtagttggggatcacgtaaccatcaccatagtcagggggcagcgggggca

SEQ ID NO: 12979 - DNA, 1263 bp, Artificial sequence
  DNA replication origin
cctgggtcaggagaagctgcttgaacctggggggtgaggagggtctgagcaggagactgcgggggagtgactgcacagggaaggtgggtacggaggctcccatggcgcagggaagggttggctgcaccccaaagagcagtgtaaggccccgaagcacaggcagcccccctcactaggggcctcaccccgctctctgcttccaccacggtgctcctcatctggctgggcccatacttactcatccttgttcaccacccctttgccgctggggtcaaacatgcggaaggcactcaggatggcttcctcggggtctgtccctggaaggccgaggcagccaggtgagcatccatgtctccagcatcccaggtcccccgcaggaggaactgggctgcatgaggagcctcccacatcccagaagaggtgggggtattccctaacataaaatgtttctcggggatcagtggggctgggaatggtcatcctcctgaggcgggcagcttggctgggagactggaatttgggggtgggggctgaaggcacatttcctggctccaagtcagcactggggtgaccagtgcacatgggattctggggcagaggatgtgcttggaatgggtcatggccaggaagagtccaggtgggtccaggtggggttcagttagggttcaggtggggttcatgtaaggttcaggtggggttcaggcagggttcaggtggggttcaggcagggtgcaggctccctgcctggccaagggtgcccagctctgtcccaggctcaccattgagcttctccccaaagagcgtgaggaagacggtgaagttgatggggcccttgccctcttgcagcatggcgtccagctcctcctctgggacactcaccttccctggtgggggtggggcatgaggtgcacacagggaccctgggtgtcccccagaaggcccaggccgccctccctccatcctggccacaggggctggaggggcagaggcagctgtgggtcgggaaggtgaagtggaagcaaggcgtgacaaggggggaagggcagtgtgaggagacggggaggaggggaagcaggggagcagagtcctgtccccccagccactcccacccgcccagcagctcagagtagggaccccagtgcgcagggtgggaggtgggtgcacgcacccagctgggagtaggtctccctcaggtctgccttgcagatgatgccatcacgattctggtcgatacagctgaaggcctgtgggatgggggccttc

SEQ ID NO: 12980 - DNA, 2771 bp, Artificial sequence
  DNA replication origin
gtgccccacgtggccgcctcgtgacctcagtggggagcagtggggccggctcccggcttccacctgcatgaggggccctccctcgtgcctgctgatgtaatggacctgccctatgtccaggtatgagaagctcataggtggcaagtacatgggcgagctggtgcggcttgtgctgctcaggctcgtggacgaaaacctgctcttccacggggaggcctccgagcagctgcgcacacgcggagccttcgagacgcgcttcgtgtcgcaggtggagaggtgtgcggaggaggagggtgggtgcaaagggcaggggctggggacgcccgggcactgcagacttggtctcagggcgacgctgagtcccaggcccggggcgcagggatgggaaactagggcctggggcgggattccgggcgtgggcggggcccggggcggggcacagggggcgggggagtgggcggggcccgaggccgggcgctggaggcgagggcggggcagggacgggtccaagggcaggaggctgggacaggacggggatgcaaagggaggggcggggcccgagacggggaggagggggagggcccaaggggaggaggcggggtccggacggggatgccaagagcagggatgggagcgagcctgcgtccgggcactggtccccatccgtgagtcccctcggtgctccctgcccgccgtggccatcctctcacatcactcacaaccccaaggcgcggcatggttgacacccccacgttaggacggagaccctgggcttagttagagggggcagtactaaccagtccctggcggaaacgctttggctgggtgaggtgagcgggatcgcccccatttctccagagaggggtcccggctcagcgagggaaagaggccgccgctggggggacggctggccggggcccctccctggagaacgagaggccgccgctggagggggatggactgtcggagcgacactcagcgaccgccctacctcctcccgccccgcagcgacacgggcgaccgcaagcagatctacaacatcctgagcacgctggggctgcgaccctcgaccaccgactgcgacatcgtgcgccgcgcctgcgagagcgtgtctacgcgcgctgcgcacatgtgctcggcggggctggcgggcgtcatcaaccgcatgcgcgagagccgcagcgaggacgtaatgcgcatcactgtgggcgtggatggctccgtgtacaagctgcaccccaggtgagcccgccccgctctctccctggtaaagtggggcccaaaaagcgcgcgctccaaggttccttgcggttcccaagctccaagatttcgtagtcctcttctcgtcccccttggcctagatttgggggaagggtcgactgcgtgcagggcgcccggtaatgaatgtggaggatgaggtgggaggagggacggcagccctgcttctcttctgcccagcttcaaggagcggttccatgccagcgtgcgcaggctgacgcccagctgcgagatcaccttcatcgagtcggaggagggcagtggccggggcgcggccctggtctcggcggtggcctgtaagaaggcctgtatgctgggccagtgagagcagtggccgcaagcgcagggaggatgccacagccccacagcacccaggctccatggggaagtgctccccacacgtgctcgcagcctggcggggcaggaggcctggccttgtcaggacccaggccgcctgccataccgctggggaacagagcgggcctcttccctcagtttttcggtgggacagccccagggccctaacgggggtgcggcaggagcaggaacagagactctggaagccccccacctttctcgctggaatcaatttcccagaagggagttgctcactcaggactttgatgcatttccacactgtcagagctgttggcctcgcctgggcccaggctctgggaaggggtgccctctggatcctgctgtggcctcacttccctgggaactcatcctgtgtggggaggcagctccaacagcttgaccagacctagacctgggccaaaagggcagccaggggctgctcatcacccagtcctggccattttcttgcctgaggctcaagaggcccagggagcaatgggagggggctccatggaggaggtgtcccaagctttgaatacccccagagaccttttctctcccataccatcactgagtggcttgtgattctgggatggaccctcgcagcaggtgcaagagacagagcccccaagcctctgccccaaggggcccacaaaggggagaagggccagccctacatcttcagctcccatagcgctggctcaggaagaaaccccaagcagcattcagcacaccccaagggacaaccccatcatatgacatgccaccctctccatgcccaacctaagattgtgtgggttttttaattaaaaatgttaaaagttttaaacatggcctgtccactgttctttgacttctgtgcattaggactgtggggacaatctataaagagtctgcgtcacatgcatgaagacacttcagtatctcggcaatgccctccagacagctcctccagccatctgtgccaaggggagtgtgaggagtgacagaccaggctgtaggaacaggaatggggtgtcatgggggatggcagagcagtggacagtacactgcctggcccgggcccctgcttgcctgcccatggaatgtgtgcagagggagtgccaggccaggtgctgctctggagaagtggggga

SEQ ID NO: 12981 - DNA, 1859 bp, Artificial sequence
  DNA replication origin
caccatgccttactcactttgggttgccatccaaacatgtctcatgacaaagaagctcaaacatgtgcatggacagtgccagaaaacaagggtcgtacatagacaaaataaaatgataacgtcccacaaccatttctttgatacacactgtttctctcagtcctcccaaccacctaggtaacaggcagggaaggtgttactgttgcctgttaggaaagaggacagccctgaaagctgtccctggccactgaagcaacccaggtcttccagccccagggagagccgcctttccattgttccagacaaagcagagacaggcatgggggagcgggagagggactcctgtgggcaggaaccaggccctactccggggcagtgcagctctcgctgacagtccccccgacctccaccccaggcacgggctgcaatgcctgctacatggaggagatgcagaatgtggagctggtggagggggacgagggccgcatgtgcgtcaataccgagtggggcgccttcggggactccggcgagctggacgagttcctgctggagtatgaccgcctggtggacgagagctctgcaaaccccggtcagcagctgtaaggatgcccccctcccccacaacccaggccctgggccgctctggtgcagcggcagatgggagccgggccattgcagataatgggcttgtttttaaacaactctggggaaaagcaaactgacaatccgttcgtaagctccatcccttctgctcagtcatgacctgcccctgtgagagatgaagggttagtcccagttgtgatgtgataagcccagacctctttccttccgacaggtgatcgtgcatgcagaggaggctctgagacgcccccagcaaggttcctgggtttaacccaacattccccaaagtatgtatttggccacattcacagaaagaatattagtcttttgtggaatgctgcgggttgacagtcacagcttggaaaccaacccacagagagctcatcattaatcatggctatcacttgtttaccacctactgtgccaggcctatgctaattactttattagcgtcctctctgccgctcgcaggcctctattattataggtcagtagtattcgatttatttaaattaaatacggaaggtcatagattaagcaagaaagtgccagcaacatggtgcgtgcctctgactgggcactaaccctccaagtcttagttttcccaaccataactggccaatgaacagcagctctggatgcagctaaaggaagactgaagctgtaggtcccgtgctcggcgcagggccccctgcaaggaaggtttcggagggactggatggggtctttgaactatctgtctttccctttactgcagtgggcccaggggcaggccaaagttgctcccgtgattgacttgaacgtgcacgttcctaatccctgacatttctaaagctctggctcattaacgagggaaagacgtgaaccagctgggggagtggggatcgcagtgccccacgtggccgcctcgtgacctcagtggggagcagtggggccggctcccggcttccacctgcatgaggggccctccctcgtgcctgctgatgtaatggacctgccctatgtccaggtatgagaagctcataggtggcaagtacatgggcgagctggtgcggcttgtgctgctcaggctcgtggacgaaaacctgctcttccacggggaggcctccgagcagctgcgcacacgcggagccttcgagacgcgcttcgtgtcgcaggtggagaggtgtgcggaggaggagggtgggtgcaaagggcaggggctggggacgcccgggcactgcagacttggtctcagg

SEQ ID NO: 12982 - DNA, 1020 bp, Artificial sequence
  DNA replication origin
gcctcggaagaagagcacagacagagcctgtccctccccctggcagcctctgggaggcagccccagccagcttgcagaggtttctcttgctgacctcacccaagaggtcacaggacacataatcagggcccacagccaaacgtacaacttttcttgcctgaggacgcccccacactccctgcagggcatctgaccctcatctcttcagcagatgctcactgaatgccaggtgcggcacagggcacagaagcagagttgacagtgggaccaacccctctcaagggcggggatctgcaggaaagaacctcagtcaagttggggacaggctggggggtgaaggaatggggacagatgaagagggaccaggtcgggcagctgctgccagaagatgggagcaggggacctgcactgaggctggagcagaggcggggagggagggagtgaggctgagctgtgagcagcaggaggtgagaagcctggaggcgccgggctgcagagcaggggcatcttggggcagggtggaagcagggcgtcaggctgtcctaacaatccctgtgcagggatgctgggcgcaggcttggtgaaagcgataagagtctagacttattctgaagggaggtgggaggggctgaggagaggaacagaagggcctgggaagaagaggttccatctgacctgggagttgggttgtgggagttgggatcttggtctgggcatgttaacacatctgccagccaaggggcgatttgttccaagtagcagttggccatgtgaggcccgagttcagaggagagtctggctggagaggtagatgtggagccatcagtacagagacagtccttaaggccactggcctggacatggtcaccagggtgtacaggttggatagcagtgggagaggcggagctggtcaggcagggctgccaggggcaggatgctgtcccttttatgcagtgagcagtgctttgtgaccccacctccagaacgcagtaaaaaaggcaggatgccttctagtgccgc

SEQ ID NO: 12983 - DNA, 1481 bp, Artificial sequence
  DNA replication origin
atacatatgtaacaaacctgcacgttgtgcacatgtaccctaaaacttaaagtataataataaaaaaaatgcttactttaaaaaaagaaagaaaagaaaaaaaaaaaaaagaagggttcaggccgctgtgggaggcccagcaccacccagcacaagacagtacggtatcccgccgcgcgcccgactccacctggcgagcagggaggggccaagcttacgcgaggcgtggcatcccgcccctcgctgcattgtacttccgggctcacatttctgcatccggagtatgagaaccctcaaccaggctgaccggatccggaagtggattgcgagccaggaggaggaagccggcggtggccccgtcagcagccggctgctgagaggccggtaggcggcggcggtcccgaggggcggcggccgcgctgctccctgagaacgggtcccgcagctgggcaggcgggcggcctgagggcgcggagccatgaagctgtacagcctcagcgtcctctacaaaggcgaggccaaggtggtgctgctcaaagccgcatacgatgtgtcttccttcagctttttccagagatccaggtgagcggcacaggctggtgggccgtggcggtcgggcggagaggactggggtgggggtccgagtcggagtgggcctggggtcggcggagggatgaggggagggtggaggaggccaagggtaggggcagggcggggtggccgagtgcccggggtctgagaaggctggtgtccgagtcagaggcggggcggggtggggagggcccggggtctgctgtccgggcttggtctcctataatggaatctggccgtggactctacctttgaggaaccaacattagctctttaagagcttataccattctagaatatagttctctactcagtgtttttcaaatttctgtcgtgtaaaaattttaaggagactgtgaagtagtgcagatttccaagcttcatgccaagatgttctgaattagtagattgaggcctcggtatttatattttagaccaacacttcccacccagtgattctgactctgggagcttgggtgccgcatcttgagagccatattttgattttcttgcggggcttcccaacaattctgtatgagagatagtgatatacttttttttgtttgtttttaatgggtgaagtcactgaggtaccaagaggttatatcacaaccagctagaactgaaagccaggtttaacgctttttagttggacactagtggtacaaaaggattccacacggaagatgcaaatgaagcatgggatctgtagggcttacaggcttttacttgtttctggggcgctttaattgctggaacgtgttagaagtaacacagacacttccagaccattcgtgggagggattggggtgactcaggcacgaaagaaggaggaccctacatggtcggtatctatggtcatcttgtctcaaaatctgatggaatctgcc

SEQ ID NO: 12984 - DNA, 963 bp, Artificial sequence
  DNA replication origin
tcccttcctttcatcccctgaagggctaggtgtgggttttccgtgcccggtatccccacacacccagcacggacaacccttcggcagagcccaggccggcccctcaccccctggagtattgaaactggagtcccgtccccaaggccttcagagatgcccctacacacccagggctccagctctggtccttctgggggagtaaagtgcaaagaggggcacagcttagttttgggcctctcgccgagcaagagacagcactgctggctacagctccaacacagccagctgtggcaagaggactctgcctgggctggcccccctcctgtgtgaggtgtctgtcccttctctgctggccagcagcagatgcactggcagctcccaaccctgtttccgcccctcggccctcccccagcctgttcggcttctctgcagcccgcaagggggagcagacttttgacaaaggactgcgggcctcgctcaagtccctgagcccccagctgaagctgggaggggaggccaggctttgtgtctgggcatattcgtctgctgatggggtttggggaagcctggggcttggggtttggtcgggtggtgcagctagtggcagagcgggatcagaggtggtggctgcccagcttctgggctgagacaagggtctgtgcaggggtttactgaagtgggagtgcctttggaatctgggccgggagcagaagggagcaaaagctacagtgggagccagcctagggcacatgggaggcgtgagggcagtgctgcccgtgcagtgtcaggtgtgccagtgccttggcgggctgcagtgcgtgtgagggcaccttctaggtgggccagggatgcagctatggagataaggcgggctggggacagaaacaggtgggcacagggcccaggacaccagcggatggagggcagggtctagccctgtgctcctgagcgtcggctgcctgg

SEQ ID NO: 12985 - DNA, 1324 bp, Artificial sequence
  DNA replication origin
cagagggggtgtgggggacagaaggggtcatgggggatgggggtgcgtgaggggaccaaggtggatgtgggggacagagggagtgtggaggacagagggggatgtgggggacagagagaggtgcaggggacagaggagggtgcaggggacagaggagggtgcaggggacagagggggatgtgggggacagaggggaagtggaagacagagggggtgtgggggacagaaggcggtgtggggaacagagggggaggtgggggacagaggagagtatgggggacagagggggtgtgggggacagaagggggtgtggaagacaggaggtgtgggggacagacggagtgtgggggacagagggagagtctgggggacagagggggtgtgggggacaggagggggtgtggaagacagaggaagtgtgggggacagaagggggtatggggggcagggggtggaggacagaggagggtgtgggggacagagggggatatgggggacagagggagtgtaggggacagaggagggtctggggggcagagggagagtgtgggggacagggggtgtgggggacagagggagtgtgggggacagaggagggtctggaggacagagggagagtgtagggaacagagggggtgtgggggacagaaaagggcgtgaagggaccaaggtgggtgtgggggacagaggggtatatgggggacagaggagggtgtgggggacagagggagagtctgggggacagaggagggtgtgggggacagagggagaatgtgaggggcagagcagagtttggggaggaaaatggaaatgagggaaagaggggaatttgggggacagagggggatgtagggatagagcgtggacttagggggacgtggagaggttgtaggctgaccgagggggatatggggggacggagggagacagggggacagagggtgctgctgcggacagcgtggtgcgtggagaggaggctgcaggagtgaagggcagatgctctggctgtcgggtggcgtgggctgaagctgctgggggcagagggcaccctccagggagaggctgctggccagcaagaagctgtcaggtaagtggcccttgaggaacgctggacggggttacagggagaggagggagtcacgggcgttacagaggaggcctggcctggccccatgaggacagcccaggtcagcagaggccaggcttatgattctccgtactatccccttgttggtgagctccagagaccctggtcggggttccagttttggcaccttcctcagcctcctagactgagggagggtgctcaggggttggggccaca

SEQ ID NO: 12986 - DNA, 2009 bp, Artificial sequence
  DNA replication origin
ctccagagcggcttgtcctggggggatgctcagggcagacatgcatgtgtaggactcagcagcacagaccaccgtctccatgcggccccagaggggcagggtgtgtgtctgccccaagggcctctgcctctctggctctgctcctcaaggctctcctttcaggattcagaccccccagcagcaggcccagtggctccctgtgggcccaggccattcttaatgggggtctccggacccccagacctcgggggccaggaccagaagggcttggtgtagcccaggggccacctagcccagcccctcctcttacaggcgaggagccttgggggctgcctccctgcccttgtggtgggctctgctgggatgtgaccacacgggagcaggggctcccgggggcctggcggcctctggggcggctctggagcccggccagcggctgcgtgcagcagggggctgcatgctggcaggagggacgggcgggagcgggcgggacgctggtcgagacacatctaccttgttccaccagccccatggtggtgccggaggccgcggtggacattgtggccggagcggtggtctgtctgcccactgttagcaccgggttagagacgaggggaagggaggggtgggcggacacagacgaggggtgggcgaggtaagggaagaaaagagacaaaggaagcagaagaagattagagttaaagtttaggtgacagatggttccagaatcctttgctcaagagagtgaaaacaagattggactgattgacacggaaaagcatttgcctcctttctccttagaaaaccccagtgggggcttctcatgcccaaagggtgtggtgagcacacagcagacaggacagtcctattagtgttggtgtgaccgtgtgcacgcgttcccggcattacagcatcacagcaaaagtaacaggatggcgggtggggggcaccagatgcaaacggacaacgagagagacggatcacagacgctcgcacacggagtgtcggacgacggagaagccacaggtacagcttgtccagacctgggctgccggctccactccggggctaacatcatgcccgatgggtctgccagcgccctgggcctcaggggtctataacagaccccacccccctgccaagagaacttgcttcccaaccacccaccctgagcagccgggacaggaggctgcagctcatccagaacttggaaggaggcccccgagcctcccgcatcaccccgcatcccttctgcccacctcccgcacaaaacacaatgttcagagcactcaaaatgacaaggaggccacatagatgcccgacaaacgcctggacagacacacacgatgctgtgagccccagtggggcagcacagacgctcgtgttcagggggtggagggacacagacccagcacgaaggtgatggcctcggggggctggaccctgtggtatcacccaaggtgggagcccagcggggccaggtgggcagtgggtctcagagctgagggcagacgccgagggcaggcctgccgcagaggaggagtggagaggctggtgaggaaggaggcgctctcctgcgtgggccagcagggagggggcagcgcctgtctccctggagaagaaaggctcacctgagaaattccgtgtggccagcatggtggtgaggatggctccctggggagagacacagataaaaccggggctatcccatcagtgttccctgctggcttctggccaggataagacccctgtcctcctgcccagatgctcagcctcattgtcatgaggctgacatgacctcagccttccagagaggcaagagctccaggaagccagcagccgcactgagacagatcacctatttccagaactacacacaccctgggcctaaacctgttgaccaactacagcttctagctgcttcaagacccctcaagcctcaggggtcaccagaacagctggtcaccacggcagctcctctggggtccagctccctgacagccccttct

SEQ ID NO: 12987 - DNA, 1213 bp, Artificial sequence
  DNA replication origin
gagagctcagtgacaaagtttcaggtgaccgggcagtgctgcggttggccatctgccttctgacagcagagtcctggcgtcatggcctactgggaggtgacctggcagtttcctaactaacagagcccaagtcttctacatagtggcagggcactccgcctgtcctgggagggcttctcagacgtgcagggtgtgtgcgaggaagggccttgagtggtgctggccccaagtggccctcagcatgtggatatgccccatcacgggcctccagagccctgctggcaatgatcagctctgggcactgcaggcagtgatggagcagacaggctcctgccctcacggggtctccctgccctcacggggtctccctgcccttgtggggtctccctgtccttgtgctgtccttgtcctgtggggcaggtcgaggacaaacaaaacccaaaatcagcacacagcaaatctgatgatgatgggcagaggcctcccggggcagctgctgtggttggagcacagatctgaggaggtggtggggagggactatggcaggggtcctgctggagccccaaggtggggtgtgccagagcgccaggtggggctgtggaggtgggtgcaggaagggtgggctgcctcactgaggtggcagccccatgtcactgccccgtatggtggggttccatggaggaggggctggccggatgatgccctggtagagggagccaagcgaagcccctgtctgcctctctgagcccctcccctcccagggcaccaccagcagccttgattagcatccaggcacaaatctgagctaattgggagctggagaggccctgacccatctggccaggctgccagatgctgagggcctaatgtgggcagagacgggcctcctctgggttggtgggagagctgcctactgtctgtggcctgcagtttacagtgatccagccacctgtgggggcgggcctgtgccatttgtggagcgatgtgtcggcgttgtttgagcgactgctgtgtattaggccatcagtgtttccccttcttgggagcattccctgacaccaggctgtggggaggtcctttaggctgcagtgggacctgctcctgtcccagcccttgtctgcctcctcgtcactgagccacgaaggggcttggcggtgcccagggctgggtcagtccccatgtgtgtgtcccagcccacgaggggccatgggag

SEQ ID NO: 12988 - DNA, 1221 bp, Artificial sequence
  DNA replication origin
gagcgagagacagagacagagacagacaaggagaaagagagagagccgattaatctccccataaacactccccattaagcattcagccaccggcccggcctcgggcagatggctgtgagtcagaaactgtgaggaagtgggtgcccctcacaagccactctcagctggccccactcaacaccagcagaacagaggccggcttcccgacggctggcagagccctggcagatggcacgccctggggggctgtgcagagaagaaggatcagtcaggccctcgggagggtggcggaggggccccgttcagctcctgtgtgacctacaggcctgtatccttgtgggtcggctggaccaagagtccatgtccacaggcctctcagcaggcatcctcgggggctctgtaccacgtccatgaggccctgctgagtcttccccagaggcaaataaagctggccttgtctggaaggcccagctccagagggcagttatattgggatttgtgcagtcagacatggggactcatggaaggttttgtagggagagagaaacatcacatccttaaactgaaaagctggaggagagggtcctgagagcctccactgtccaggtgtcaacgcagaggccatggaggcccagagtaagggcgaagggacattcacaaactgacagcctgggggtagggagaggggaggagggacgggggacagagggagctgaccagcatcaaccacagtccagagcccaagagacacaaggaaggaatcgggttaaggctgctgaggccatcgagaagaggccatgaacgtaccccacaaagcctggcctgcagaggagctcctgccctggcttcagggcgccctgagggagtcagtgccacccaatgggagccacagagtctatgaggcaggaggggagggggccggtgcccaccaggaggccccgcagaatctgactagtcaccacggttgatttaatttgatttcagatcattttctaagaacagcacacgtgaggcaaggggcctggtcaagaaatgtcacatgaagggtctgagtccagacaaaagggccagcggatgctctcaggctggggctgggagaaaggggggcttggaggaagcccaccaccaggtgggcacccacccgtgcaaacccgagcacgcagggccctcctgtgtttgcacctgcaaagtgcccagcctcccccctacaggaacagcctc

SEQ ID NO: 12989 - DNA, 1793 bp, Artificial sequence
  DNA replication origin
tctttgtaaaagagtactgttcaattccttggaaagataaataattacactaaatctaattgaacattttcttaacgactcaggtctcaagagcagtcactgtgcttgggcggccactgagctgcgtcttcgctttttaaagtcaaccagtgaacagggacaggggctgcctcaggagatgtggggggagacccagcggtgggagatgcggcgggggggaggcgcggcggagggggcgcggtgtgggggggacacggcgtggggggcgcggcgggggggcgcggcgggggggcacggtgaggtgttcactgttcactccgcattctcttgctctgcttgattttttcaccatgtgcatcagttacgttctcataatgtttttaaagaaaaatataaagaaaggattattatttttaacatatgacattaacttgggagactgaggtgagggcaaagaccatgggctttttgcctggtctggcttcaatcctggttagacggggtgacacagctctctgagcctcagtttccccatccatatgactgagcagaagagccttccggggccactgtgtggctgtttgccggacttcttgctcaggagaggtaagagcttcccgaaaccagtcctgagctaccatctgtcacgctctgacccctagagggctcagcggccacagggctgacgtggcaggcctccactgagtgttctggaccaggccctgaagggagcagggagtctgggcctccgtgcgccagaacgcaaccacacactgcagggttgaccctcagtaggaagttcaacagactgcacatctatgccaagctgatgatgcccgtatggcaccgctgtgtcgagcccgtccccggagcagggaggagacccaagcgcagcttcccaccagcacagcaggctcccagctgctggccagactcagacaggtaccggagcagagggcggcaagccacagctgttcctcagcacacgacatccatgcaccatatcaccaagagcctgaccgcaggtgggtgggacaagggcttcctccagttgatccctctcccctccctgggtcaggcagcccctttctcctctgcagaaggctccagagccgcccctgcaccatcagcctaggtcggagcagtcagcaatcggggaaggcgggggcagggaacacaggtaagactgccagagccagggggccaaggccaggcagcgccgctgaggaaggaggaaggcatggctgggggcctcgggatgagtgtggagtgggagcaccaggccgcacagctgtagtgacataggatgtggcaggcacagtgccaggcacccagcagacactcagcaggaagggaccaggggtgcagggaccaggggtgcagggcccgggggtgaagaaggccctgctcttggacacaggcctgcaggtagggtggagggcaccctcaagaatagaagacagggtcccctttcccagcgacttggatgcccccagagggagaaggtggccagctgggggaaggcgcaggagggctggctcccaaggacaccactgctccctgcgccccgctcctgggctctgcctctcccacgccttctgtccctcactgaagccccaaaccttctctgagtcccaatgtcatcgccgccccccaattttctccctctcctctctcctctgggggacttaaggaatgtatgcttaagtctcccaccccagttatttgcccgctttacccaccacttcccctaaagagcaccctgaaaggtgctcctccccataatggctgtc

SEQ ID NO: 12990 - DNA, 2053 bp, Artificial sequence
  DNA replication origin
aagaggaaaatgaatcacaggacttgagccaagtagagccctgagagtgggaagaagcagggccgggagttggcagcaggaccaagacaggggcgagaggccttgggtgccgtcttggctcactccatcactcggtcacgctggctgggccaaggcagaggcagtgggtgtcagagacagctcttccagctagagaacagactttcacattttctggattcttgcgagccagctgatgtcatgttgttagcttgacattggccacggtgggcatcttcataccacagaaatgggcaaacaccacccaccagggaccccacccctctgttaaacattgaccaggcaccacttgagaggggactgcaaggggggatgatgtggcctccctctacataccccaaatacccagagggaggggggttgagggtcaggagggaggagaacctgacaggccagaaaccacctaggggctgaaattacatgctccccatgggagtgagagaggagagggggtgagcactcttcctgaggagagggctcacaggggagccagtctgactgggggttctgaaagccacggtgggctgggctgggatccccgtaaatccagcctgtcctgtgcagcctcggtgggaagttcccccttccagggagggtctgggacttctgctcattctgtatcagcatccatctttctctttcacttctccgttctctcaggtgaaccatatcctccagaaatcttcagcaacaaatgtcttcctttagcaaccccacaggagctgtgccccagaacaatggccatgaccccagtggggaggtctgcattaagcaaagagcaaaataaatacagagatgaagacaggagggaggaccacccaggaacacctgtagcccactgtgcccatgctcttccaacagactaggggaggcctgcaggtcaggcctagcctctagggtggagaggtccagcctgtctcttagccctggacccagccttgaagcatgtggtggattatgcagataatgcacaggggttgctggagaactgtcactcaatctggccatgctgaaaccagtgagcaggaggagggtgtgggcaggaggaggagggtgtgggcagggggaggaggatgcgagcaggggaggagggtgtgggcaggggaggagggtaagggcaggggtaggagagtgtgagtagaatgaggagggtgtgagcaggggaaggaaggtgtgagcaggaggaggagggtgtgagcaggaagacggtgtgagcagggggaagagggtgtgagcaggaagagaagggggtgagtagggggaggaggatgtgagaaaggggaggagggtgtgagcaggaggaggagggtgtgagcaggaagaagagggtgtgagcagggagaggaggcggtgagcagggggaggagggtctgagcagggggaggagggtctgagcaggggatggagggtgtgagcaggaggagggtgtgagcagggggaggagggtgtgagcagagggaggagggtgtgagcagagggaggagggtgtgagcagagagaggagggtgtgaacaggaggagggtatgagcaaggggaggagggtgtgagcagagggaagagggtgtgagcaaggggaggagggtgtgagcagagggaagagggtgtgagcaggcggaggagggtgtgagaagggggaggaagttgtcagcagggggaggaagttgtcagcagggggaggagggtgtgagcagggagaagagggggtaagcagaaggaggagggtgtgatcagggggaggagggtgtgagcaggggagggtgtgtgaagaggagggtttcaggaggctcagcctggggcctcctgtgtcattggcgccatctggcccctggcactgggaatggtctgccagggctcactgcatctttggaattcctcccctgcccacatggagaggctgtcacgcacatcaggggccaacctactccctgggacaaggctacggtgcctgtgtcctagggccttggtcctggcctcatgagatgcgcttagcca

SEQ ID NO: 12991 - DNA, 1622 bp, Artificial sequence
  DNA replication origin
ccgggcgaggaggctgtgtcctttccacagctgggacgccgcgggcgcagagtcccgaccccaccgcactccagcccacacccgcaccctggggtcagaggactcctcggatggggaccgcttctgcctgtccttcccgagggccctccccatgccctgtgcttaggggcgcgacggagctggggacctgatgtggtccagggcagcccctggacgtgcaggagggagatgggggcgcagcaagggtgggccccggggctggaggcgcagcccagccctcctgctcctgctggctcagagctcgggtactcgggccgtcctgagagctcagtggccttaaaccctccgtctgtgtcccttctcccgtcaggccaggagcgcagatggcctgggccccaggtgggtgggctgacccctgccccagagcccggcttcagctgggcagctgtgaactgccccttgtcccagccccctgcagggaggagcaccagcctggctgtggtgagaccactctctcctctctggggcctggcctggtgcccgcccactcctctgggacagtgcacagcacagtcgcagtggtttgtggaatccgcgttggtggtaggagcctactaggccaggcgggcagtgctgggcagggctctggggtccgtttcagcctagccagacctgaggacacaacccccctgacagggctaagccaagccaggctggtcaccgcagctcagttccctcagtgcctttgctggacccttctgggccttccggctggcaggcagtaaagggcaggctggccatggacagaggccccggggagggatggtctgctcagcccctggtctcttgtgaggagagacgaggggctcgcacaccgcctgatgtgcaaggcctgctgctgggcaaagtgccttctctgtgcctcatggccagtcttggggctagtggtctgcattccctgagtaggacggggccttgccctccggacaaggtgggatatggggggcccgcacctccctctctctgtaatgtcactcctgccttcatcttcccaaagtagacacgttggtggaaccttgtcctgccctccgggtgtccctgtggatccagctcagagagggcagcagtgtggttctgaaggggatgaccaaggaagtggggggatgcacaggaggagggccagcagctcccaatcagggaaggcaagctgtgaggagaggagggggacatgggatgcgagccgggggcagggggatggggacccaggagcaggacaccatgctgggcgccaccacacacaggcatggggcaggccctgtctctcttcccccagccacctgggccttcctatctggcatcctggctccacctaccatgggcacttctttcatcccacagctcagcttgtccctggaatttctcaggtgagagtcaggatggcagctccggcaattagccatctgcacatctggattttaggggcaaagaggagaagagacgtgccttgtgcttaaagtgttcacattcctgttagggaacagaacaagaacgtgcctgccccatgcctcctgggcacatcccgtgtgggtgaggccacagcaggccctcccagcatttgggct

SEQ ID NO: 12992 - DNA, 1300 bp, Artificial sequence
  DNA replication origin
gaggagtcctctgaccccagggtgcgggtgtgggctggagtgcggtggggtcgggactctgcgcccgcggcgtcccagctgtggaaaggacacagcctcctcgcccgggcaggagcgcccgcgggggaccagtcagtccctcaccctagcagtgggacctgagtggatccaaaagccagagacaccagcccatcggaagaaactggggacgagagagattccgacgccagcaccgtaggggccgcactcggcgtccgtccgcgcagccttgcagcgaccttcaaaggcggcgcttaagagccggtcacgcccctcctggagcggcggcccgcgggtagtcaccgcgcctgagcagccagaaccaggccgaggccgcgcggctcgcgaaggacacgcgggaagagcctttccgccggctgagccgtgggcgccaccgccagggaccccaggctcaccaagccacgcgcggaaccgcacggtggccgagaccgggcgggggcgggggcgctttgggagttaggatacgctttgtgcccgcttgctgcttttttcctgcaagctgcgcatcaattaaagtactcgggtttttgtttggtttcagatcaatcagatttcatccttcgaaagttttattctcaaggaatgcaaaaggattttggaagcttagaaatgtccacgtaatcagactgtgggtcacctgcatgtgggagagatgagctttggggcaagtctcagaagaaagaaatggggcttccacagaaccacttcctggggccggaagggactggagagagtcatttgacccaaccctcctggttcgtaagtggggaggctgaaacccagagagttacgtggcagcccaaggccacacaacccagtggctatgtcatgcgcggtgggagggggccatgtatcatgtcctttaaaaatgtcctttgtacacccgcattcatagcagcattattcacaacagccaagaggcaggagcaacctgcgtctgtcaatagatgagcaaaatgcacacaatggaatattattcagccttaaaaaggaaggaaatgctgacacaggctacaacatgggtgaaacttgaagacattatgctcattgaaacaaggacaaacactgtctgattccacttatatggggtccctaaagttgtcaaattcatagaggcagacagcagaatggtgggtgccagggtgagggaagggaatggggagtcggtatttaatggggacagtttcacttagggaagacaaaaacgttctggagatggatgatggtaacagttgcacaa

SEQ ID NO: 12993 - DNA, 1123 bp, Artificial sequence
  DNA replication origin
taagagcctgactggattgcaaatttcagggtcatcgaggtggatgggggctggattttggactgttggcgggggcgccctaaaggggaaggggctttgaaggtttgtttgaagtgggacctcacggggaacaggtgctgtggctcccgttctctccttggcagtatgagcagtgtagggcgaaggtctggttcgtggtccccggacccggctttgcccctggggtgagatggggagcgcctcaggggcctcctgtctggcctggggtctcccgttctgagaatcaaggtggctgcacctggcatccctagggctagcttcagaactcctgaatctccagcctgactgggccagagccccatcctcctgcgtcctcccccatcctcctccgtcccttcagtgcaggcggtgggggcgctggcggtgctggcgagatttcctcttacacatccagcaacagatcctttttttcctttactaaataagtgtctggtgaaaccttgtggtgggtgagggacgctgatcattgataattgtggagtgcggagctggaggagtgtgggggtgtgttcattccccacttctccctgcacgtgtggagagaattctggtaggggttagggatgtggagcccagccctgcaagaagcccatgctggatgggtggggtggggggccaggctggctgggggacccttccttgggtggatctggagagcaccacagggctgagacctcgagggagagggcgagcccagcccccttcatgcggatccctgagtgggtggctggctccccggtcttcacccctcagatgcaccgatctacccccgtctgtcctcttggcctccagaggtgtcctggccactggaggggcaggtgggtggcagttaatgtgcctggttctctgaggaagagagcaacagtgggaagtcagtctttcctcaggagccttcttgttgtcttttctgcttgcgctcagaagcacagaggccctcacagcaggtgtccctggtcttctccaaagaagccactttcaagacctccccatgtgcacccagtgtcctcagactgcagctcactctggctgttccttcttccctttgctgcgagcctccctgcgt

SEQ ID NO: 12994 - DNA, 1077 bp, Artificial sequence
  DNA replication origin
gggccggggaccccagagggccgggacctccgggaccctccgcgccgccggctccaggcgcactgcgggcccgcgcgccgccggcttctctgggctccgggcccaagcgcacggccccgcgcggccccgacccgcgagcccccggccccgggcctggctgcctgacctcagcgcgcgcggccctgcccagctctgcccagcgcggctgccgggccggggctccgggctcgcgacttggcgcggcgggggcggcagcaggtgtccccggagcgcccggcagacgtgacgcatttggcggcggggaggtcagagaggaggggcgcgcgggggtggcccccgggcctggagcgccgggaggggtcggctgcggccccagagggtcgtccccgacgcgggtgcgctgtccccacccccacccgagcggcaggcggcgggggtggcgggacctgcttgcgcctgctcctgcgcgtggccccatccgcgctgggggtgccggcgtgggagagcctctgctgtaggtcccctggggaatctgggttctggaggattttcccccagattcttctggaaacaggaatttggaggtgtggggaggacgaggtcagggagcctggatcaggtcatggggatagcggggagagactaagagcctgactggattgcaaatttcagggtcatcgaggtggatgggggctggattttggactgttggcgggggcgccctaaaggggaaggggctttgaaggtttgtttgaagtgggacctcacggggaacaggtgctgtggctcccgttctctccttggcagtatgagcagtgtagggcgaaggtctggttcgtggtccccggacccggctttgcccctggggtgagatggggagcgcctcaggggcctcctgtctggcctggggtctcccgttctgagaatcaaggtggctgcacctggcatccctagggctagcttcagaactcctgaatctccagcctgactgggccagagccccatcctcctgcgtcctcccccatcctcctccgtcccttcagtgcaggcggtgggggcgctggcggtgctggcgag

SEQ ID NO: 12995 - DNA, 2059 bp, Artificial sequence
  DNA replication origin
ctggaagtctttctcccttctacccattttcctatgatagggagaagccgtctgggtctgagggtggggactgggctgttttttgagtgttagtgtggggtcaagctgtctgggtagggacagtctggctgcctctgatagcccagcccttccccactgtctggtgcccaatcatgccaaccttcctgcgctcgccagggtagctctgcttcatacctctaatatttcagctcggaggagggactgcctgggggtcccaggtgctaacaggtacaaaaggcgggaagaagtataggatacaatgaatctcaaattgcatctcttagtgaccccacattcttgtgtaaccctggtcctgggcagcttctcaacttttgaaaggtgacctcggccgggtgcagtggctcatgcctgtaatcctagcactttgggaggccgaggtgggtggatcacctgaggtcaggagtttgagaccagcctggcccacatagctggggctgtgagccactgtgagcttgttacaggcgtgagccaccgtgcttggcttgttatttgtattctgttgtgtggccctacctcgtctttccagagctcagaaagggaaaatatggatgcatccagcaggtgctggaagaaactcctgtggggttaaacacaacgccaagaacaaacctcagacttggcctccagtcctttctcgagcccatgccagtctgtctgttaggatggcccaggattctctgagtccaagtctgacatagacggggtctcccttcctgctatggtcctgctgaagtcaaggccaggatccctctgcttcctcagctggggacttccccaggtggcccagcatttgcctttggcctgagaatttctcgtcctctagtgtcttctgggtgcaggtgggtcgatggcagggacttgttgccgtgtggtctactaattgcccagcagtcccatgccaaatgcatcctggcccagaagggccctggctgccagcactcagaatgcctttatcccctcccttatccacatgacatttattgtggcttctggggcttgccctgggctggccacgaggtgagagggatgagcaggataggcccagaattggtccttggggagcagtaaggaagtcatatcagggcagcagcgtgacccaaatccagagctggctgctggaaaccccctcctcagagcctgcccaggatggaccccgtcagagaagagtgtggggatgctggagcccagtggtctaaagtcccggttctggacagcagccctggtgccaggcctcagggaaggctgttttgtgggaaaccgggtcgccctgcctcctgcctgcctccctgcactctcctcctccttggctgctttcaggagggggttggggtgtgtgggccctcctcctccaggcaaaagcagggggcaggcaggtggaccgtgctggaaaaggagagaatgtgcacctttacctgatcagggtggctgtgagctctcaggccccccaaattgctggtggagcagcccctgttcccctggctcagggtccgttggtctggactccgaatgttgcctcctgggacctccattccagacaacccagcaaccagtctttggagaagtgagggggaagggaggggctggggccaaggggagggggcaggccccaccctttcactttctcatgctagtgacccagtgtgtacactgccttctgggcggttcctcctggccaggcagcctttggggcatgtgtggctgatggagactgggcagaagggatctggcagcatctcttcctgagggtgtgaggaatgagtcctgtggagggcagcacatgagccctctacctccatgtgggccccagtcccctcctgctgtcaggctaggtgggccttcgagagagagagaggaggctgcgttcattatgtgcactcttctgtgttatgtgagagcgaggggtcggcagcagcaagtggcctgcgtgcgcgaggtgcgggcgtggtgcgggtagaggatgaaggcgtcagtacagggcgcgggtgtgtgtgtgggg

SEQ ID NO: 12996 - DNA, 1393 bp, Artificial sequence
  DNA replication origin
tactgaagtcctgagaagcatgcactcaactgtgaggaagacaccagctgggggtcagctaggcccatctcttctctgagaactgaccccctcacagggattgccctgtccttcgccccaaggaagcagaacatcagtcttgggatgtaagaccagcacccaaagctgccagccagggctgagtgggcacctagggagcagggtggggacagagtggatagaccagagacattggctgcagtgtgagaggccagtagagatccaaagagatcagagacagggaggaagagggacactcagagagggacccaggagggacaaggagggagagggacactcagggacacaggaggcacaaggagggagagggacttagagatggacacaggagggacagggagggagggagacacagagatggacacgggagggacagggagggagggacacagagggacgtggaagggacagggagggagagggacactcagatggacacaggagggaaagggagggagagggacactcagatgggacagggagggagagggacactgaggggacagggagggagagggacactcagatgaggggacagggagggagagggacactcagaggtgaacatgggagggtcagggagggagagggacactcagagatggacatgggagggtcggggggagagggacactcagagatggacacaggagggaaagggagggagagggactcagggtcttagagatggacactggagggacagggagggagagagactgacaggtgcactcggaaaggacatggaggaagtgtactttgggtgctcaaggcaggcctgcagggtttcagggtcctctctgtgttcaagataaatattcccgtttctaaaggttagtcatttttgtgtcttggagaaaaaaaaagagccctaacttaaggccaccgtcatgtctgctttgcagggtttgctgattccctgggaatgtcacctgccgctggcactggagcatgtagcagtgggtttagtcttcagaggtggtctcacgttggggttccagtggaagccaccaacacctgagtagatcagaggtgcaatttcccatcttcccctccccaacaggatcagaacccctcgggggggggttgggggtggaggctttgggggtgagtttgagaagcactgccctgaacaatgcctgaggtgcatcctacccataccccacatgacagctgaggaaaccaaggcaggtggaaggtgccagaacctgaaggtgagcatctccgcagcgccatgtctgacttttggttagcgatgggttaggcattacagaaatgtgggctgatggccccacacatgaaagaggaggcaacaccacccactctctgcggg

SEQ ID NO: 12997 - DNA, 996 bp, Artificial sequence
  DNA replication origin
aacctccttgctgcccttgtcgggctcttttgtctaagaccacctcaaggcaaagcccgtggggcagctgggtctggggaaaacagcccggggccgcgggggccgaacgagcacggaccggaagttccgcagccgcgccgtccggcggagccgttggctgcggacgccggaagtggccagtcggcaggtctgaggcggcgctgtgtgtgtgaagcgtacctagggcgggaggcgacatggagacaggggcggccgagctgtatgaccaggcccttttgggcatcctgcagcacgtgggcaacgtccaggatttcctgcgcgttctctttggcttcctctaccgcaagacagacttctatcgcttgctgcgccacccatcggaccgcatgggcttcccgcccggggccgcgcaggccttggtgctgcaggtgaggcgggcgggcctgcggtctggggagccgccgcccccggcctgccctgactcctggcgcccgctcctccaagctctcccagcctgtttcctccttttcctggtgtcctggggttgagcttgtgagaatggcttcagtaatttgaagcgcggattggatgtcagcttattccgctgaggtgttcgctccggacgtcctgaggtttcagaagtagtaagccgactgttaagagccctactcagcacccgccagcgcgtacccctcacggtgctgggggccgctagtcagggagcgaaatccatgcaggccagacagaaggaaggacatttacagcaacagaaacgtgcatgccccagaactaccaaagacttgagctggcggggatgacggaggcattgtgttgatcaatgggtgtggtcgcttgtttgaaatgtgacttcccaggtcaaagactgtcaatgtagtgcttattaaaatttctatttgagcttaattccgtaccctccaggttaagtttattgtatgttggaaacgctgtcaatactcattcagtgaagttgactgg

SEQ ID NO: 12998 - DNA, 1076 bp, Artificial sequence
  DNA replication origin
agggagagaaggaaagagagagagaaaaagaaagagaaaaagaaaaagaaagaaagaagaggaaagaaaaaagcaaaagaaaaaaggaaaggaaggaaggaagggagggtggcagggaggagacagagagagagaaagagaaagaaagaaagaaagaaagaaagaaagaaagaaagaaagaaagaaagaaagaaagaaagaaagaaagaaaagaagaaagaagaggaaagaaaaaagcaaaagaaaaaaggaaaggaaggaaggaaagaaggaaggaagggagggaggagagagagagaaagaaagaaagaaagaaagaaagaaaaagaaaggaaagaaagaaagaagaaagaaaaggaaagaaagagagagaaaagaaaagagaaaagaaaggaggaagggaaaggaaggggagaggagaaaagggaagggaagggaaacttagctgggcatggtggtgcattcctgtagtcccagccactcgagaaacagaaacaagaagatcacctgagcccaggagttcaaggctgcagtgagccatgatcatgtcactgcacaccagcctagacgacagagtgagatccaactcaaacaaaaataaaacggctatgtatacaggaaattgagaatgccgcatgcatgtacaaggcaaaacacatgttcagaaaagccctgaaacttttgtcgcaggctgatcctaggctcagaacaagcctagctaagtgttaaaagagtcccaaccccaatttgcaaaagataggagaggtatgcttgtgtgtgtacgtgtgtgtgtgtgtgtgtgtgtgtgtgtgtgtgttggtgttgttttttagctcctggcattcaaggaaatctctgtcaaaacactggctaaacacaagctgaagaaacagacactttggtgaccacaaaaaaacaatgaatagtctttgcaaaaatagcttgggaaagtataaaaacaaacattactacagtcttcagaaattaaaaaaaaatgctgaggaagagagagaatctgatttccagacttatcacattataatagtcaaatgtccagttttcaacagcaacagcaa

SEQ ID NO: 12999 - DNA, 1277 bp, Artificial sequence
  DNA replication origin
ctgggcctctgcgggcgatggggcggcaggccctgctgcttctcgcgctgtgcgccacaggcgcccaggggctctacttccacatcggcgagaccgagaagcgctgtttcatcgaggaaatccccgacgagaccatggtcatcggtcaggcgggctgagggtggggaggccctttgtacccagctcagccctcggcggcgctccctcctcccgagcccagccgggtcgctggctcccccagtacctagcctgagggtgccccgaggacgccaggccccctgcctagagctccgggccgcacgtcggagggggccgggcggagaggcggcccactagggccggtcgtgactatgtgtctgccccgcaggcaactatcgtacccagatgtgggataagcagaaggaggtcttcctgccctcgacccctggcctgggcatgcacgtggaagtgaaggaccccgacggcaaggtaaggctggcgttggcccacgcagccgttcttcagtggagctcccgtggggtgtaaagcactgcctggaggaggcctcaagggacaggaacttgcacttggagagcctgcggtataaaggtggggccttcactcacatatgttgcaggtggtgctgtcccggcagtacggctcggagggccgcttcacgttcacctcccacacgcccggtgaccatcaaatctgtctgcactccaattctaccaggatggctctcttcgctggtggcaaactggtaagaggattttctctttggcttcagcttagaatctctcacttgtttccaaattttgatttatcaagattgtgaaactttgtagcacagtcagaattggggagacagatgttgccttctgctccacagccagggacaatagtgggttccataccctggaacagacaactggaggccccaccactcatacattccatgtttccttgtagcgggtgcatctcgacatccaggttggggagcatgccaacaactaccctgagattgctgcaaaagataagctgacggagctacagctccgcgcccgccagttgcttgatcaggtggaacagattcagaaggagcaggattaccaaagggcaagtgcatatctccttgtaatttgagagggcagttgacctttatacccactatacctactcaagtttctgcttgggagatcagctctgcagagaatggaatgagaagtattggtttagataggttgtttgtttgttgtttttgagacggagtttcactcttgttgcccatgctggag

SEQ ID NO: 13000 - DNA, 741 bp, Artificial sequence
  DNA replication origin
gggcacaatggagccgccgccgcgccgctcatgcatatgcatgacgccgcgcagccggccccgcctcccaggccagagcagcagagccccgagccggcgctcggggcgggggcggccgcgagcccgagcggcccaaagcggcagggtggggccagggccgcaggtggctgggcgggcaggagacgcagcctgatcgcgacctgcgcccccagccccctccacacctttctgaacgcggcgtcggcagagccactgcgctcttcctgctcgcagtccgccgggagcggggcggggccgggcggcggaggcggggccaggacgccggggcggggccgagtggaaggcggggccaaggtgccggggcggggtcgggaggaggaggcggatccagagagccggggtggggccagggctcggggcgggccccggcggaggaggaaaggaagagtgagtccttgcccttcccccacccgccccgcccgcgccccgcccgcgccccccctgcttcctgggagtccattgctctggcccggcgggcggggacacgactgggagacagagagacccagggtgccacttttgggaggggatcttattaaaggactccggaagcccctcgttaaagcagaaaactaaacttaacaagttcgctgtcctcactgctcagttctctcttcccagtggttctccttctggaaaaagtcactattgagctagtctagcctgatggaatagcctctc

SEQ ID NO: 13001 - DNA, 1590 bp, Artificial sequence
  DNA replication origin
ccgagcgccggctcggggctctgctgctctggcctgggaggcggggccggctgcgcggcgtcatgcatatgcatgagcggcgcggcggcggctccattgtgccctcggagcgggcggcggcgcgatggcgcgggtggcggcggccccggggcggcgggcggcgcggagggcgggctgagcgcatggagcggcgcgggccgggggccgccacggcgaggggccgggccaggccgggcggaggtgagcggggtcctgggggtggcccctggcaacgccgccagcaggcaggtgtgggccggcgggggcaggcaggtgcggcaggtgcgggccggcaggtgcgggcgggcaggcaggtgtagctggtcgcccggggcgccccggttccgctgcggcgccacggtagggttcacagctgggctggggctagaggctctgccgcccacctgccggcacctgccacgcgtgcgtcgtggtcttgggcaggctcggccccgtgggcgtcagggtcatccagccctcccctgagtctttgttggaggctggccgaggggtgtaagcggcgctcggggttctcctgagcgatgaaggctggccgggccttcgctccaacctgatcgttcctagctttggggccaggcagtctcacctacatggtacgcccctccgctcctacttacgtgcccaccagcacggcgatgtgggggccgtctgaggccgtcacctgctcgcggaggagctgttccgctcctgggctgaacgacgctgagcggccagcccccagctgccagttttgatggggacacccctttccaaactggacatactgaagctcaggcgtgaggatgccctgctcccctgaggtgccttgtcttccctagtgccaggtgtccttcaccgcggcacccccacccggtgccttgtttacccctccacctaccgtgtctctcctcccattccctggaccctctgccctgcagtgttctgcctctccttctccctagggtaccctctttccagtattacagaacatccatggtggtgtctttaatttgtgtcatcgcagatttcacagggacacacacggaacatgtgacttggtctgagaccgtggtgattacggataggatggacacagactcaccaccaagttctggcaagctagaaccagagggcatcccttgatgcttagtgtggaaacaggagaagtgaaggaatcttaacttccagaggtactgacctctagcccttgtcatgcccaggggatagttacaagctggaagtgtaaatgaagagaacaagcaggtgacagttgccggttgtagatttctgaaggacaggcctaagatgtttggggagcatcctgattattgggattgagctcccaagggctgatgacatgaaggtggtcatgtgtcctcagtcctaggatgctaccagatatccatcttacacattgtaaactgatgccaggttaaggttgtcccttcagctgttcactgaaatgtctcatgcctgggccattgcttattcctggactttttgatgaactctgcatcctgacttagccccacgcttagacattttagtact

SEQ ID NO: 13002 - DNA, 2475 bp, Artificial sequence
  DNA replication origin
cagcagggcatgacccagtccctgtccgtgcctggccccacgggactgcattataaggtagggcaggctcctccaggccctgtgccgggctccgtgctgagtgctgtgggacaggggaccttggggcagtcctgtcctcgagagcgacagggtggctaaaggggccagcaggatgtgtaggtccatgtgtgctcatggaccacagctctacaggagatggggggtggggggtgggggcattctgaccagtgcaggagcagctcctggggtttgggatccagttccgaaaggaccctctacaagattcatatatctcaggggtatcctgtgcagggagcagcaggtgggtacccaaaacatttgaatgttctttatggaaaagtgtcattccttctacttgctgcagagaaatccattgagaggacaggccctcgctgctggccatgtaccctttctgggtgcatgggcagagcctacctccctgggagcctgggtgcgccgggtggtgcagcttgggggaggagaggaggagggcttagcgtgcttttgtcttttcagcccctccaacctgtttgatcattttcctctgtggctatgattgctttaagtagtgttacttgtagattatttggaaaatacaagagagtgtaaagaagaccgtgtatggtgggcttctagggtcaggtccagggggcccggcaggggtcaggttggagccccaggtgcatgcagttttctctcccgcagcccacagagcagttcaacgggcagggcgccagcttcaacgggggcagcgtcagctacagccaacctggcctgagtggggtagggggcctggccgggaggatgggccgggaggctcacagggtgggcatatggagagagggcgaccgggcaggcacccctggggccgcctcctgtccacctctgttatcatggttcccagtgggtgcgccgtgaacagactccactcccatccaccctggcaatctgccttgactgtttgtgctcaaccctacagcctacccgttccatcccgggctatcccagttccccactgccagggaaccccacgccacccatgaccccaagcagcagcgtcccttacatgtcaccaaaccaagaggtcaagtctcccttcttgcctgatctcaagcccaacctcaactccttgcactcatcgccctctggtaagtctgtccactcttgggacagcggggtgacaaggccagggtgggcatgggggaatcacaggactccagagagtcctgtaggagcttgggggacaggggatggctgccatatccctaagaaaagggctgggtgtggtggctcacacttgtaatcccagcaccttcggaggctgagcacaagagttcaaggttaccgtgagtgtgatcttgccactgcacttcaacctgggtcccaaagcaagaccctgtcttaaaaaaaaaaaaaaaaaaggccaaggattccatcttcttaaagacaagtcgcttagtgccaagccttcacctttttgttctgtttgtggctttctttgcaaaggaggctgtggctcttctctcccctgtgcacaaaatgttgtatataatttcaggggatttatgaaccccggaagcccattccagggagaccacagcagcagaagttgggatcgtagaactctaaacagagctatagggcaattgcaggaggctctcacacaccttggcctcccagtctctctgaaagcactggaaacaccttttgtctgggctggggacatgttcccctattatggtttaggggacactgggctggactgctgaggcaggaggcaagacagaacatcacgaccgaatgcccaggcctcaggagagatgctgcccatggccccagccccagggcaccactcaggcctgccaagcagtgcctgacaggaggggctcccttcaccaaggtccctgcggggaaggtggctggggagccgctgccctccttgagtgacacaagacgctctggctggggcaacccagctcacagccagtggcctctgctcccaggaagcgggccttgtgacgagttgcggctgaccttccctgtgcgcgatggggtggtcctggagcccttccgcctgcagcacaacctggctgtaagcaaccatgtcttccagctgcgagactcagtctacaagaccctgataatgaggtgagctccgcctggcccccacctgacccccacgaggctctgttcctcctcccacactctcagggcccgttttctgggtgtccacccatcttcctgagcaggcctgacctggagctgcaattcaagtgctaccaccacgaggaccggcagatgaacaccaactggccagcctcggtgcaggtcagcgtcaatgccacgccgctcaccatcgagcgtggcgacaacaagacctcgcacaagccactctacctgaagcatgtgtgccagccaggccgcaacaccatc

SEQ ID NO: 13003 - DNA, 1552 bp, Artificial sequence
  DNA replication origin
ggagccaggcccacctgcctccttggcgtgggaggcctgtcctgtcagcctgacagccaaggcactcggagttcacgtctgtccagagaatgacactgatgtatcgactcaagatattttagcagcagcaaattccggcaagactctgcagtaaccacctacctgtatgtggcgacagtcatgacctcgggcagggagctggatcctgcggaaggtgatggggcacttcagggacaccttgatagctgtctgctccaccccgtcctctccgttgggcccaggggtgccagggatggtgccgctgctgaagttccgctttactgacatcaacaaggtaaaggacttgagtaaagggtccccaagatggggaggtgtgaatggggatgccaacgaggcagggacccagtcactgacccactgacagctctgaggggccacctggaactaaccactgcccctactgcagagccacctgtccaaggagaaggcctggtgtgacacgaggaggtgcccacaaggaggattgttgggcttgggccacacagaatggggatggctgcctggcagctgaggggcaggagccactcactcttggtgatgcagtgctcagcaggcaggaggcgctttttgaggaggccctgcagcaccgagcggacggatgggcggtgcactagctgcagcacgaagaggtgggactgcaatacaacgggaggatgtcatcagggggacttgggccaggggccaccctggccaggtaaagggtgtgctgggggttgtgtgtcaggggctgccaggtgggggagggacaaggctgagggcagggtgagctgggggtggggattcagccaacaaaactcctcagtggcttggccccatccagctgcctttcctggcctcagcgccctgcccacgcttgtatccatctctacagctgtgctgggcatcctgccggtctaaccattgcctagtcaccacttctccatgaagagaatcacctcaagtccccttgaacgttccccctgctcgcacatccacagtcacagatgctgggtctgtgttgacatctgccacatcccagacaatgtggtgtgtggccaacccgtccccaaggccctcatgcccaggctgactagtgcactcataagccatgtctttcttctctagcccaagggtgaccctgatgcttgctagaaccggtaatgcttgatcagccggggactccgagctccatgagctttctgcatatcctggtttctcttacataattaatgtgagcatcaaatctagtcaatttactctaactggaaaacagctagggtatattactggatcgctttcttaaagggcaaggatgacagattaaaatagaaatacaaggcagtaacaaagagaagcaacgcatttttctgaaataataaagcccccacgtcctgctctccaccctgcaagggggcacacatgctacagcaggcggtggacagcaaaacagcagacggcggcatgatctgatggtgctgcaggccggcccgcccatgtcctggctccgctccca

SEQ ID NO: 13004 - DNA, 994 bp, Artificial sequence
  DNA replication origin
aagacgggcggtgcagcgtcacaagcgtcgggacagatctatccggctcggaacagacttcgcgctctacccggccaggcccagctctcacccggggacccgtgtcgggctccgcagctgggacatggcgccccccggcgggcggcgaggggctcggccggacgaagcccagacacccgcaaactcccgactccacaggtagcggcgccgacgccagggcctccgcgctctgctctcccaggccccgtgcccccggcccacccggccgcccttaccatgttctcggcgccgactccgcctccgctcggccgcgcgccctcccgctgccgacccgcgccgccgccgccgctctcgcagcaccgaccgccgccgccggagccggacaataccccgtgcccgcctcgcgctgctgtggccaatgcccgcttgtcttgctggttcgaaccccagcggctgttcaatcgcgcgcctccttctagccagaccccgcccccccggcaccgccttcctaacggctgtttgtttttgcacacggcacgcggaggcggggcctccagccccaatagtgacgcgctctctgcctttcaccaggcgcccaagcctgacgaacagaaaggcaaaccaatgagattggacgcctcgcagacgaaagccaataaaaatatcgcccgcgagcaagggaggcgggccactgggaaggacagcaaaattagctaataaggtgaagcgattgcaggcgctgtggctttcccgcccattcgcggcgttggttttcccgcttctgagacttgtttggggaggtaaagagtgttggacgtgcttctcctggtgggttttcacagactgtgaggatttattcgtcttagaacgtgtggatcaggagggcgctgggtttcaaggttaggcaggcctcatgctcagccgtattctggcggactgactaccctgacgtcctctcagcgcggaccctgacaaggtccgcggcaggctgagg

SEQ ID NO: 13005 - DNA, 1199 bp, Artificial sequence
  DNA replication origin
cctcacttcccagatggtgcggcggggcagaggcactcctcaccttccagacggggtggctgggcagagacgcccctcacctcccagacggggtggctgggcagaggcgcccacttccctgacggggcggccgggcagaggcgctccccacctcccaaacgaagggcggccgggcagaggcgcccctcacttcccaggctgggcggccgggcagaggcgctcctcaccttccagacgaagagcggccgggcagaggtgcccctcacttcacaggcggggcagccaggcagagacgctccccacctcccagacggggcggccgggcagaggcgctccccacctcccagacggggcggccgggcagaggcgcccctcacctcccagacggggcggccgggcagaggcgctcctcacctcccagacggggcggccagggagaggcgctcctcacctcccagacgatgggcggccgggcagaggcgctcctcacatcccagacgatgggcagtcaggcagagacgctcctcacttcctagatggggtggcggacgggcagaggcgctcctcacttcccagatgggggtggccaggcagaggcactcctcacttcccattcggggcagccgggcagaggcgctcctcacttcccagatggggcggccgggcagaggcgcttctcacatcccagatgatcggcggccaggcagagactctgctcacttcccagacggggtggcgggtgggcagaggctgtaatcttagcactttgggaggccaaggcaggcggctgggaggtgggggttgcagcgagccgagatcacgccactgcactccagcctgggcaacattgagcactgagtgagcgagactccgtctgcaatcccagcacctcgggaggccgaggcgggcagatcacccaaggccaggagctggagaccagcctggtcaacatggcgaaaccccgtctccaccaaaaatacaaaaaccagtcaggagtggcggcgcgtgcctggaatgccaggcacccggcaggcccaggcaggagaatcaccggagcccgaggcagggaggttgcagtgagccgagatcatggcagtacagtccaggctccgcaagagagggagactgtagaaagagggagacggagagtgagagcgagagcgggagggagagagacggagagggagagggagagggag

SEQ ID NO: 13006 - DNA, 1606 bp, Artificial sequence
  DNA replication origin
catccagaacaagcgcttctacttagatgtgaagcagaacgccaagggccgcttcctcaagatcgccgaggtgggcgcgggcggttccaagagccgcctcacgctgtccatggcggtggccgccgagttccgcgactcgctgggcgacttcatagaacactacgcgcagctgggccctagcagccccgagcagctggcggctggcgccgaggagggcggcgggccgcggcgcgcgctcaagagcgaattcttggtgcgtgagaaccgcaagtactacctggacctcaaggagaaccagcgcggccgcttcctgcgcatccgccaaacggtcaaccgcggcggtggcggcttcggcgcgggccccgggccgggcggcttgcagagcggccagaccatcgcgctgcctgcgcagggcctcatcgagttccgcgacgcgctggcgaagctcatagacgactacggaggcgaggacgacgagctggcaggcggcccgggaggcggcgccgggggcccagggggcggcctgtatggagagctcccggagggcacctccatcaccgtggactccaagcgcttcttcttcgatgtgggctgcaacaaatacggggtgtttctgcgagtgagcgaggtgaagccgtcctaccgcaatgccatcaccgtacccttcaaagcctggggcaagttcggaggcgccttttgccggtatgcggatgagatgaaagaaatccaggaacgacagagggataagctttatgagcgacgtggtgggggcagcggcggcggcgaagagtcagagggtgaggaggtggatgaggattgaaacgggcagcttcccctacaggcctccacccaaccaccatccccttggctagagaattccctttcctgctcatccccagtgagctagtggagagggagcaagggaggccgcagagggaaaaaacaaaacgtaacacagttaagagaaataatcgtaagagaacagtgacggacaacttgagaaaagcagtcaagttccaaggaactgacagcaacctgcaaagaggaaaacagcatctcctcacctgcgtaaaattgtctcagcttctgttgtttctcaactgaggttcgtaaacccatcaggataatccctggagggaatagatccttgcacatccagggcaagaaacatgtccaagttacccagaccattgataacagttgcatttaggttgcacctgggtaatctggcataaaagatctctctaggcctcactgttgcggtgtctatcccttcacctccattgaaatcagcattttggatctaggtcttcatggaatccttgagaagagaggcctttacaattacccagttctgagggttcaggttcacgaaaagaaatgcaacttgggataatcatgaacaggttaaagataagatttcaagaagccatctaagaatacagaaccaaattggatccatttttttaaaaaaatggttttgcatggaacctggaccaaggcaaatgtcttttcttcgcagaattgttttccaggatgccagtggattcagatagcaatgcttggagtagaatccgttactaaaatagtttcaaagttgacaaaa

SEQ ID NO: 13007 - DNA, 2756 bp, Artificial sequence
  DNA replication origin
gctgacatcatccccctcagtgcctcaggcacgtcatggaacctctgttttctcaccagtaactaggcaatgatggtaactctcacctcaaaggtattgggtgggggatatttgcaaagtgctggaactatggtgcttcgtgagtttttctattcactatagtgaatgctatgtatgggtttgtcaaagtggtgtgtgatgcatatgaaccttctgtcactttccccttcctagcatgtcgtcccatcccttgggctggatctcaggaccccaggaaccacctgtcaattatgaccttttcccctcgaggctgtgggcatgagcagggagtgcccaccagcaagctggaccccagatgtgtctcccactctggacttccctgaagttatcacttgtcactaaggccctccactcagcctgacagtggggcttcctaaagatctgggggagctttgggctctcctcccactcccagtgcactagggaggagaatgtagacaggaaatgggcagatgctgctgggctctctgatgaggtcacctgcagagggcagaggacccacctaatgtctaggactgtgtaggattgtgtgattgaaaggtacccttcatgtctgattgtcctgtgagggaggtgcctggcccagtcctgaagccacctaagccaaggacagactccggagctggctgtgtggaggcttctgggggcttttgggttgggctaggagagagctgccctccccaggacaggagcagcaagacattgacctgcaggccggaggtgaccctgagcccctacacctgcaggtgcctagccattcaacaggagaggccccagaaagtacagagactggacagtcccaaactgtcatatgccacccaaaggccctggtggaagacgtgaacctgcccacacaacaaagtggcaaaccaagccagggtgctctctgaatttaggttgccccataagaaggagagcacagctctgggggcacagagaacaccaactgatggaaaagaggaaggagctaaagggctgagggctgaggggattgaggggtctgagggggctgagggctgaggggctgagggctaagggctgaggggctgatggggctgagggctgaggggctgaggggctgagggggcagaggggctcaaggggctgagggctgaggggctggggctgagggggcagaggggctcaaggaggctgagggctgagggggttgagggggctgaaggggctgagggctgaggggctgaggggttgaggaggctgaggggctgaaggaggctgagagatgagaggctgagagctgaggggctgagggggctgagagggctgaggggctgagggggctgagagggctgagagggctgagagggctgaggcgctgaggggttgagggggctgagggctggggggctgagggctgaggggggtaagggctgagggctgagggagctgagggttgaggggctgagggggctgagagggctgaggggctgagtggttgagggggttgagggggctgggggctggggggctgagggctgaggggggtaagggctgaggagggagctgagggggctgaggggatgaggggttgaggggactgaggactgaggggctgagggtttgagggggctgagcactgagggggttgagggggctgggggctgagggctgagggggttaagggctgagggctgaggggctgagggggctgagagggctgaggggctgagtggttgagggggttgagggggctgggggtcggggggctgagggctgaggggctgaggggttgaggaggctgagggctgaggggctgagggcctgagggactgagggctgagggctgaggggctgaggaggctgagggggctgagggctgaggggttgagggagctgagggctgaggagctgaggggttgaaggctgaggggctgagggctgaggggttgaaggggctgacgggctaaggggctgaaggggctgagggagctgagggctgaggagctgaggggttgaaggctgaggggctgagggctgaggggtctgagggctgaggggttgaaggggctgaggggctgagaggctgaaggggctgaggggctgaaggaggctgagggctaaggggtgagggggattgagggtgctgaggggctgagagagctgagggctgagggggctgagggaggcagaggggctgagggaggcagagggctgagaggctgagggcctggtgccatgagggcccctgaggggctggcggagctgctggaggctgaggctggggtaggcctggagatggggtggtcagcctgggggctgcaggggtctcccaaggcctccctgtgggtctttcgagggcacaggccctgctcccggaggctgggagttctggccgcagggcctgtccttcagttactaggctccagaggtcggtcccagcgcctcagacacccacatccagcagggacagggacagctcgcggctgggatagcgtcagccctgggccacggcggcttggcaccacatcccgtgacagctctgtctccaggcgtgctccccagccctgcctgaagatgaaccccaagccctcgccagtggccaggtaggaacaaggccaggagccctgtggagaggagcaggggaccactgcgtggacggggcaggctggggcacaaagggcactgcttcctctggatagcgctaactccgagagctcgggctcctatccctagcc

SEQ ID NO: 13008 - DNA, 1456 bp, Artificial sequence
  DNA replication origin
tccggcctgggctccacggagatgaggcgccggaccccgcgatggcttagtgggatgcagtcggagacgcgaacctccagggtgcggccctccctgcggcaggaggaggggtcagggcggccacgcggccggggcttcgtgcccgctaccgcccagcctgcactcacccctggcagtgtgcggccagcacgcccaccagctccccaacgcggttgtccaatggcggccgggagcggtgcaggcacaccacgaggtcgtcctggccgcgggcgtgcagcaccaccagctggtctcctccgctggtcacgctcagccccgtcacctgagcggagcgcggggtcagagtgcagccgcctcaacccgcaccccagcctagccggactcaccccctccccaggaagcctctgccgaacccccaaccgcacccggggagcgccgccctcgccagggccaccagccccccaccgccccctcctccctctcggggccctgctgacagggggaagcttgggcgggacgctgcacaatacgattttctccaggactgatggttctagatccttgctgtccaacagggccgccactgctcacctgtggatgctaagcccttgcatgtgctactgcctggaggagccgtttttagttctaggtcactttcactgcatttaaacaaccacgccggctttgggctgtggcattacacagcaaggcactcaccgccctttctattgggacagtcatgggacccctgaaactgtgggagacccagaggtagcctggccttgatccctacccccgtcttgtgggaaagagaatttatgggaacagcagctgctaatgaagggagcaagtaggccacagagctcggcagaaggttccggagtggccgggacggtatcccacaggaggcccagaacattgtggtgggtactcaggtcccagaatgcccaggtgggagaaccccagttgggcacaagttggaagaggggaccatttggcttggctagagtgtgagagtgggggtggggggtgactgggctggtggggatcacaggatgggacctttcactctgtgggcgtgggaagccactgcaggattttcagcacgggtgccaccatcgctgagttttaggatggtctgggccatctcaggtaaacaggggagagaagactgaggcaggactctgagcagcccagcagtgcccctcacagatgctgcaccctactccccacccacattgctcaccgcctcaaggggcacggcccgcatcacccggtactgccggtcagggtccagcttgtagaggtgctggtctgtgagcaggagggcccggttccggatcttgtggaagcggttcacctgtgggagaggtggctggacccaggctggtgctgccctgtcacccaccagggccccaggcttcggcagtccctactgcctcccctccccgctggc

SEQ ID NO: 13009 - DNA, 813 bp, Artificial sequence
  DNA replication origin
ggtgccattgtcgtcactgtggcaaccttctctgccctggaggtggggaggcagggctatcccttcatacagaccctccacataccttttgtgccttgacctcagcctgtccccatagctctgccccacagacaagaccatggagtttggccgagacttccggatcaagcactatgcaggggacgtcacgtaagggccccctcccacccacatccctggctttcccacaggcaccatggcatgtgtcatggggcaggagcgcttcaggggagtggctcggagacaggtgttatggccacttctgccacccccacccctttaagacactgaaacatgccggacagcagattcacaagtgaagagcaggaaacagggtttgaggatagtggttaaccatggctgcattcttctgggagcctttaaaaaatacccacgtctcatgtctgggcccaaccctataccagcatctgtggggtggggggcttcaggctggtgatgtgggggtggggagggagtggaaggtgcaggggggccaagattctgcatttctaacaagctcccaggtgaggcctcgctaccatacttggaccacgctcccagtgccaaagcccaggtgtcttcaggggttgtcatgatggctattaacttatgtgttgcttgccgcatcccaaaacgatttaaggtgactcacatcaaggtataagtgtttcatgagaacttctcaaggagagggaatagaatagatgatgacaacaaagcagcccaatatcatctacctttatctgttcgcaaaatctacacccatgaggtcgc

SEQ ID NO: 13010 - DNA, 3059 bp, Artificial sequence
  DNA replication origin
tttcaccatattggccaggctggtctcaaactcctgactttgtgatccgcctgcctcccaaagtgttgggattacaggcgtgagccaccgcggccggcccggtcagtgttttatgggcgagtttttccactgtactgggctgttgtagagctgcttactcatgggaccccaggccagggcaggcagcaggctctttactgttgacactgtctcttaagtttacatgaaaatggacatgccctggaagcatcaggagaggctgaggacaaaccacacagtctcctgggctcttgccccctaccagagcccaccctgtgccagaaggttcagtgtcccccttccatccctctggttgaacatggccttgcatgggccttctgtgtggagtgtcaaaggaaccacatgcttgcccctccagggtccatcccaggtgtggcccccgtgctgcagtcgctggtctttgctagcagaaagagtagaggacatggagcagatgaagggacaccagagggtaatgaggggacaccagagagtaatgaagggacatcagagggtggtgacaggacaccagagggcagtgaggggacaccagggagtaatgggacatcagggagtgatgggacatcagaaggtgatgaggggacaccagagggtggtgaggggacaccagagagtagtgaggggacaccagagagtaatgaggggacactagaaggtgaggggacaccagagggcggtgaagggacaccagagagtaatgaggggcacgagagggtggtgaggggacatcagagggtgatgggacaccagagggcgatgaggggacaccggagagtattgaggggacaccagagggcagtgaagggacgccagagagtactgaggggacaccagagggtggtgaggggacaccagagagtaatggggacaccagaaggtgaggggacgccagagggcagtgaagggacaccggagagtattgggacaccagagggcagtgaggggacaccagagggcgatgaggggacaccagagagtaatgaggggacatcagagagtaatgaggggacatcaaggcggtgaggggacaccagagagtaatgggacatcagaaggcggtgaggggacatcagtaatgaggggacgtcagaaggcggtgaggggacaccagagagtaatgggacatcagaaagcggtgaggggacaccagagagtaatgggacatcagaaggtggtgaggggacatcagaaggcggtgaggggacatcagaaggcggtgaggggacaccagagagtaatgggatatcagaaggcggtgaggggacatcagaaggcggtgaggggacatcagagagtaatgaggggacatcagaaggcggtgaggggacaccagagagtaatgaggggacatcagaaggcagtgaggggacatcagagagtaatgagggcacatcagaaggtggtgagatatcagaaggcggtgaggggacaccagagagtaatgaggggacatcagaaggcggtgaggggacaccagagagtgaggggacatcagaaggcagtgaggggacatcagaaggcggtgaggggacatcagagagtaatgggacatcagaaggcggtgaggggacatcagagagtaatgggacatcagaaggtggtgaggggacatcagaaggtggtgaggggacatcagaaggcggtgaggggacaccagagagtaatgaggggacatcagaaggtggtgaggggacatcagaaggcggtgaggggacatcagaaggcggtgaggggacaccagagagtaatgaggggacatcagagagtaatgaggggacatcagaaggcggtgaggagacatcagaaggcagtgaggggacaccagagagtaatgaggggacatcagaaggtggtgaggggacaccagagagtaatggggacatcagaaggcggtgaggggacaccagagagtaatgaggagacatcagaaggcggtgaggggacatcggagagtaatgaggggacatcagaaggcggtgaggggacaccagagagtaatgaggggacatcagaaggcggtgaggggacatcagaaggtggtgaggggacaccagagagtaatgaggggacatcagaaggcggtgaggggacatcagtaatgaggtgacatcagaaggtgaggggacatcagaaggcggtgaggggacaccagagagtattgagacaccagagggtggtgaggggacaccagagagtattgcggggacaccagagggcagtgaggggacaccagagagtaatgaggggacaccagagagtattgggacatcagagagtattgggacaccagagagcaggggacaccagagggtggtgaaggtacaccggggagtattgaggggacaccagagggcggtgaggggacaccagagagtaatgaggggacaccaaagggcagtgaggggacactggtgagtattgaggtgacaccagagagtaatgaggggacatcagagggtggtgaggggacaccagagggaagtgaggggacacagggtgatgaagggacacaagagggtgatgaggggacaccagagggaagtgaggggacacaagagggtgatgaagggacaccagagggtgatgagggggcaccagagggcagtgaggggacaccacagagtaatgagtggacaccacagggcagtaaggggacaccagatggtggtgaagggacaccagagggaagtgaagggatgccagatggtgatgatgggactccagagggcgaggaggagacaccagagggcaatgaagggacaccgatttattgagtagcagagctgagggaaggcgtaggatggctccagcttccggtcagtggctacatggtcagttcctgcagaaagagatggtcatgttgggggaagcaccccgcagtggagccaacatcaggacctctcgaggcccttggggacagctcaggggtagggaaaggggccagtgctcactcaccatgatggcgttgacgatgtcactgtggttgtctctcagagccc

SEQ ID NO: 13011 - DNA, 1986 bp, Artificial sequence
  DNA replication origin
ctgtgccagtggcttcaggcctccttcctgctggttctcaacctccagggtctccttttggggtgagtcaggcttagccccatcacctgtgtgcgctcgcgcttccagacatgcttcccgtccaggcctagaaagggcttctgctatttcctccccagcaccagaggccggctcagggagactgagggcctccatgcccaaagtggaatccgcatcttcctgtgcggcccaaggtgtcccagcttctgcagctggctgtgggtcatcctgttggacctggtccaaggctgcaggctccgggactgtagggagggctgcattcttctcctcaggtgctggcctggggcctaaggcctcacctacttcctgctgagccatggtggccacaggctctgtccctggggcacagcctgcttctgcctgcaaggtttgaggggtggccacagccagaggctctggacctgaggtggggcctgtgtcttgcagaggcagaggtgctgtcatagcggagtcctggggtaaggtgaggccctcttcagcctgctgggacacaggcgtggctgcagccacaggctttggggctgacgagagatctgtgtcttgtaggggcagaggcggtgtcatagcggagtcctggggtaaggtgaggccctcttcagcctgctgggacacaggcgtggctgcagccacaggctttggggctgacgagagatctgtgtcttgtaggggcagaggcggtgtcatagcggagtcctggggtaaggtgaggccctcttcagcctgctgggacacaatcgtggctgcagccacaggctttggggctgacgagagatctgtgtcttgtaggggcagaggcggtgtcatagcggagtcctggggtaaggtgaggccctcttcagcctgctgggacacaatcgtggctgcagccacaggctttggggctgacgagagatctgtgtcttgtaggggcagaggcggtgtcatagcggagtcctggggtaaggtgaggccctcttcagcctgctgggacacaagcgtggctgcagccacaggctttggggctgacgagagatctgtgtcttgtaggggcagaggcggtgtcatagcggagtcctggggtaaggtgaggccctcttcagcctgctgggacacaagcgtggctgcagccacaggctttggggctgacgagagatctgtgtcttgtaggggcagaggcggtgtcatagcggagtcctggggtaaggtgaggccctcttcagcctgctgggacacaagcgtggctgcagccacaggctttggggctgacgagagttctgtgtcttgtaggggcagaggcggtgtcataacggagtcctggggtaaggtgaggccctcttcagcctgctgggacacaatcgtggctgcagccacaggctttggggctgatgagagatctgtgtcttgtaggggcagaggcggtgtcatagcggagtcctggggtaaggtgaggtcctctttagcctgcctggggacaatcgtggctgcagctacaggctttctgccagaggggaggtccagccctccttcttccttcaagttctgaggagagtctggacacaatgtgaggcttgtttcttcctgtggagttggaagtttttctgcagtgacagactcttggcctaagatctcgctgatgccctcctgggagggctgaggcattgccatggcagcagattcttgtccagcggtggagtctgtttcttcctccccagcctgtggggtcactctggtagccacctccacctggaggcctggggctacctgcagagtgtgaggggtcacagtggcagtggactcctggcctaaagcaaggccctcttctgttacttctgagatcaattcctgtctctgggacagataggcccctctgtctgaggtctgaggagcagcctccacggcccaggacacagtcccatcctgagcctgcagccccttggccccacctcc

SEQ ID NO: 13012 - DNA, 3258 bp, Artificial sequence
  DNA replication origin
aaagcgctccgagcatcccagaatcccaaccacctccccagcctcccacaaccagggttctaggggcgtccccgcctcttcctggccacgggcgaatgccaccctgaggcaacccagcttccaattggccctgaaaccctccctcgtaaatgctgtggaaagggtgggaccgggcgcaggcgcccacccccgctcccccacgaaaccgcccacagcgagagggaggccacagccgggtggggtgggggcggggagggagccccccctacgccctccgcagtgcctggcgagcccgcgcacgctcactcgctgggacaggcgggcggggcggcctgacgtcacccactgcccccaccgcccggccgaggggcggtggccgcgcaggctcggcggggcggcggcacggactgacggagggtcggaaggactgagggacgggcgggcgcacggccaggccatgcctggggaggctgcccgcgccgagctgctgctgcccgaggcggaccgacccgggccccgcacaggtgaggccgtggccactctttccctgccttcagcctctcccctctccagcccgggttctctttccatcgctcacctttcacccctctcccccatccccctggcccccctcgagtcccctcccctttccgcgccctgtccttccctccatctgaaccctgctaccgcctctctcagaactgcggggaaggtggggcgcacgaagtgcccgccgcgagccagaaagaacgtgggggcttaagcccttggcttccgacccagggatcgtggggctcgcatcccgcccgctgcatcccgttgtttgcaccgagctgccagcctgctggggctgggccgctctggacagaggcagcgggttctggaggcggggtgtccggctgatacccccagtacgatcaggtgaccaccgggagggtcctcagttgcacccggtctgtcctgggccggcgactggtcatggctctggagggaggagcaggactggccagagcctaggaagcccggatggagggccaggtggtggaataaagcctaagttgggtctggaaggtggaaggccttgggggaggtggcctgattagcaatggccctgggtgtgcagaccacctgtccttaggctgggtcaacaaatgctggtggaggctgatggggtctacggggcctagaaagagccgagcctggacagtcctggcgtggaggtcagccatgtgtgggtagggccaagggcaccttgctgtgggcaagaagtcacccagagatgggaccactgctggggcctggggcctggtttggggtgacacaggctgctgcctctgctctaggtgggaggcagggagtgcaggcccagacttcccagccccagggtcttgtgctggctctgttctggcttgcttggtgaccttgaatgagttataaaaacctttggcctttggtttctgctccatcccaacagctcagccgttcccctgccctgggggccacaccaggggccagaaccaagagcccagcttcagggcacccagtgatgccccaccagccacgcccactcctgatgttgggtgtcaggcatgcaagaacccaaaggacccccttgtctcaggaccccctggatgtcccatcaccccagcagcaaagcccttgggtgacaagttttggctggtggttcagggctcagggctctgatgctgctgaggggagctggagcagcctggcaacagggtcccccttctttcagcttcaactctaatcctggctctgctttgtagatgagaaagctgaggtgcaagagatgttgtcctggtcaccagtgagtgcgggagagcaggagccaccaggcaggcatctgcagcctggagagctggcccctgtgtgccgccgctcccccaccttgggcaagacctggcctgggctctgaagggccttcattggatgcttcaaacagaggtgcctttggcctaggtccaagtgagggagtggacataatggagacatttaaaatgaagcttatgagcatttagagcacacaggaaaatgcttatgagattaggttgggtgaaaatagctagattcaaaactgaatgtgcaatgtgatctcgcctgtgataaaatacaggccagtaagagtccaggaggcagaaaaccatagcggtctggtgtgccgcaacctcggaggggttttcttccatcttcctgagtcccctaagtcctttctgacccatgagggctacttcctatggactcctttctcagctggaggtgtgttagctcacagacgtttactgagtaccagagcctcctcatactgaagcctgcccagcgggttgggggagtgcatcatgggacccagagaaggcccacagggcagggtgggaactcccagcacccgggaaggaactggtggtcacccatggggtggctgccaccaaggagaggactcagccagaggctgctgttggccctctgaagctgtcctgtgctcttgctgggctccatggtctccgttcctgcccaccactgcccttgtggccagatgctccagcaaagcctccacgggacacttcatctctgttctccagaaacttggctgcgtgtggtggcccctggcttccccatctccctgggtgcaggaggggagcagggtcagaggggcctggtgaaaccctgacatgttggcctcaagtgtaggtagcaaggacagcagagagaggaggcagagcgaggcatgaagcccagagtgttcgagctgcgcgcgtcgtgctggtgccacctgcctcatgtggcgcatctattgggaggtcatgggatgggactggcactgcctggcagattcccaccaccagcccctcccaccgagcccagctgaaccacactgattctgtggaatggaaactgcaatccagtctccccagagaggctgaaatgctagttctttgctgaggtgtccttgagaaaagccgccagacaggtctgttcatgactcccagcaacacttccctcaaaacccctctctaggaaaccactagcatctgctctctgctgtcaaaactcctggaagttctccctcaaacgcagcgtgcagagggtcttctcttttctctcctgccttcctggatccaccttcctctgggccctatgcagccggaattcatctccccgggcctggcccttgcctgggagatgcatccaggggcacctcatgatcttctctatctccacagatctgtcctgcgatgcggc

SEQ ID NO: 13013 - DNA, 1556 bp, Artificial sequence
  DNA replication origin
ccaccttccccgcagttctgagagaggcggtagcagggttcagatggagggaaggacagggcgcggaaaggggaggggactcgaggggggccagggggatgggggagaggggtgaaaggtgagcgatggaaagagaacccgggctggagaggggagaggctgaaggcagggaaagagtggccacggcctcacctgtgcggggcccgggtcggtccgcctcgggcagcagcagctcggcgcgggcagcctccccaggcatggcctggccgtgcgcccgcccgtccctcagtccttccgaccctccgtcagtccgtgccgccgccccgccgagcctgcgcggccaccgcccctcggccgggcggtgggggcagtgggtgacgtcaggccgccccgcccgcctgtcccagcgagtgagcgtgcgcgggctcgccaggcactgcggagggcgtagggggggctccctccccgcccccaccccacccggctgtggcctccctctcgctgtgggcggtttcgtgggggagcgggggtgggcgcctgcgcccggtcccaccctttccacagcatttacgagggagggtttcagggccaattggaagctgggttgcctcagggtggcattcgcccgtggccaggaagaggcggggacgcccctagaaccctggttgtgggaggctggggaggtggttgggattctgggatgctcggagcgctttgggtggagttggcggcgcagcctccttccccgctgaccaagcagagggtgcagggcctggggagggagggggccccgcccagcccgatgcctccatgcaaaaggtgagctggagctgcagctctggagtgattggctggtcctggcagtcgtcggtctccgtggcaaccgcctcctgtctccatggcaaccagggatggagccgacgagagcgcaccagggaaggcgacccggatgggtcggtctccaggtctctaggcaactcggtgatctgtcctatcatctcccctccacccccacactaggcagtagaaggaaaaggaagaaagtgtttccctctattcctggcagcaccctctgccacacctcccaggaggaagcccgccccgtgaatttcctgaaatgcctcttgctttcacacaggctactgcgccacccagattcactgagcacccctcctcccccgtgccaggcaccagggagacagatgaatgagacattgtcatcacccctgactggggtggggggaatcagagtagccattgtcacaggcagggagggaggtttcaacatcctcagtcttctgtgggttctaactttgagctcatgaagccaggggctgccctctgactcccccagacctgcctcaaggctcagtgctacacacctggctgcctgctgggcatctctccccgctgtaccccaggagtcagacacaccacaccattagaattaacatcaacttcaaacaatctcttccagaaaacaaaagagaaggggacacttcctaactcattttataaggcaagaaatatcctgatgtcaaaactaacaatgtgtc

SEQ ID NO: 13014 - DNA, 932 bp, Artificial sequence
  DNA replication origin
aacgccactgccccctgccctgcaccgtgtgtgttgtcatccttgcatgcctgtggcttttcttccagaaatagtagtaatgaagggaataaaggagcgcagaaaggggaatggaactgggcctgacatgactgggggtgctagtggtgttggaagcagcctcgaactggccgcctggcccaggcaggagaaaggtcatcccctgaacccagatgacaggcaagagaaagatcatccctaagtcttcttaagtctaagaagacttagggatgaagaagactaagtcttccagagggtgggcacagccttgctgacagcctcgccctcctctctgaagtcgaagtaggccatttgctgctgggagtgggaggtggggctccagggccctgagagcagacgaaggtcgtggaagagtccctgggggaagcagggaggggttggtgggtgtgtgatgggagtcgtgccccggggcccaggcagactctgaacgcaacagctttggggctccacagagtgaactcatcggaagacgtccactggccaggcagagggtggctggggagaaaaggggaaagcgggagcctggagccccgagaggtgtgagggcagaggtgtggatcaggaggggctgagccggctggaagggggtcaggctgtggcagggcctagcctctgtgggacttgagacgtcagagttagagcagagctggggagtaggggccagggacagagggtctttgggacccctgggggcagccaagacagcgggtaaatcaggggctccaggtgtgtgccacttcatgccagcagcccacacaaccatgtgtccctaagcttggttcaacattctgctcttatgccttgaaatccttaatttcacctgtcaacatatgtgctagtaagtgaagtctggtgggacaatggaacaaaca

SEQ ID NO: 13015 - DNA, 1035 bp, Artificial sequence
  DNA replication origin
agccttcagaggccttggacccacatctgcccactgttgccaatgcagaacttggcctcctcccacatctcctttccctgggaatggttcctcacagccagagacttggagggcctcccttttgtgtttctccatctaatcagttaccaagaggttgggccactggtggatgcccctccaaaaccctcttgagtgtgttcctgtcagctcttctgggctgctgccctgggatgggctgttgtggcatcggccactgcaacaaccgccttaacacacttgtctgactacagacgatctgatttgttcatgagatgtcctgtatactgtcctccagagcacaggacctctctcatcttgttgaacagcacatttgcagcatctggggcattagcctttaatgggaaggaagggagggaaaaaaggaggaagggagggaggaaggaggagagggagggagggagggaaggagagaggggaggagggagggaggaggtgggagagggagggaaggaggcagggatggagggagggaagactatatcaggcctccccactttccagttagttgtcaatgctctgtccagcatggcctttcacgcctgggcatgatcctatcacaaccccatctgaaactcttcggcggtttcccattacctggggggagaagtccaaatgctggggtgtggcattcatgcccttcatgaccttgaatgaagtggcctagaggaagcgtttgagtgcatgcctgtgtgaatctagtcttggctgtgctagttgtgtgaccttgagcagcttactccttcctcatttgtaaaatggggtaataatgagacctattccaactaccagagggagctggggcccggggggccaggagggaacacatgttctgtgtggctggtggggggcagtggggaggagtgagaggtgttggcaggacaaggagttcgggttaggtgcacagctgcccttagagccctcagggccaaatggagaagccagagggttccaggaatgccattcctccaggctcac

SEQ ID NO: 13016 - DNA, 936 bp, Artificial sequence
  DNA replication origin
agtggtgtgttgaatgtgggaaggatctggcagagtgattcagtcctcagatgagggtatctggagggtggggttcagggagctgtcccttgtttgcttttctgcttgttgagtttgaggcacaggtagaggacagactgggggcagagaggtcagggtcatttcagatttgtctgcacagggtgcagaatgcatggtcttaatggtcatggattatattgccaagaggtgctgagggaagagagagactgccaagggccagtcttggagaaagcctgtgttcttagggcaagggagggagagaaagacactgagaggagtgactgaagaataccaggaaggagaaagtatggggggtggggtggagggagtagggagatgggggaggggaggtaagggggccgcaagtgccaaatgctgccaaagttggagaaaatgaggtctggcagtgttcacaggggttgggaaccaggagcgtactttggagctttcagtggcgccttttcaggaaatatcaagactagagggaaaggttaagatgaaaggtggcgagtagcgggaaagatggttggagggtagatgctccaagagttggtttgtaaggcaaacgtggcagaattggctttggaaacagaaccccatataccatccctggagtggagggagggtgaagatgaggcgtgtaaagatgaaacgggggagcagagagcacatcaacttttacccagtacaggaggccacggggccatccacagaaagtgatagggacaggaatgcagctgatgctctgggggactgggaggtctcggttgatagcaggcagctgtccttcgttgagcttcgggctgagctttgtgctcagggccttagacttcatcattatcttagctatctccacaaaatccttccagaccagacattaccctcattttacag

SEQ ID NO: 13017 - DNA, 1315 bp, Artificial sequence
  DNA replication origin
tgcccgccagagtccttcgccttcagcttctcccgggtggaaccctcccgcagagcctgggaatcccgccagggtcactgtgcgcccctcccgagctccggggcaagggaaggaccgcggcgcaggtgcgggaaggcgcgggtccacccgggtccggtgaaccccgaggagtgggggcgcccccggtgcgggccgtcgcccccttaccgcagagcagcagcagcaacgggagaagttgcgggcgccgcagcgctccagtctccatggctggccggccgcagctgggtcacgctcggtcccgctgggggcgcggctgggggacgcccggttggggttggggtggggcggggcctcagggggtccgccctcaggccgcacccccagaccacgcctgcggccgtgccccgttgcctccagatgtggggtgcagtccctgcaggcgcgccgggtgggagggatgggggcggctggagtctcagcggggtgagaggggggcgagggcagggtttcgagctggggacaagctggggtaaggtggggtgccggctgatgggctctgagggcggggctggggtgctgagctgcaaaggagctttttgggagcagattgtaggggcagactgggaggtgagctggggtgagcgtgggggccggctgacggtgggctgggatgcaggctggagagacttggggaacttccgtccaggctcaggggcagagggtgggggtagaccggggagggagctgaggtgaggatgaagcgctggctgatgatggcctagaggagtctgggggtagactggaggaaggtggacctgggagtgggctaggtgtgccctggccgaaagtagaccagagtccagagctgcccccaggcagggaggggaactttgagcagagatacatctaggagccaggtctccaaaggtcaggaaagtgcataaaagaggttggggggtgtgtgtgtgtgcgtctgtgtgtgtgcgtgtgtgtgttgttcatggagtacgtgtgtgtgatgtgcatgtggggtgtgtgtagatgcatgtgtgtgcatggagtgtgtgatgtatggtgtgtgtgtggcatgtgtgtgtttgagtctgagacaaggtgtgtttgtgagtgtatgcttgggaaacagtgtgtatgagagagactggagggtgtggcaactacacacacagagacgtatcacacaccaagaaccaagccacaagcaaaccaagggacaggagagtatctggcaccaccaaagacctggccttgaagagtgtcagggtccctgaggcgaaggagggcctcagtttctcca

SEQ ID NO: 13018 - DNA, 1570 bp, Artificial sequence
  DNA replication origin
attggcaatggccctcttttgtggtgttgccaggaatctgtctttacaccattgttctaacattgggtgggttgtcaggttttgctgggagcccctcaagcctcatgtgcactagaaatgagctccctggggagggcacttggtttctcagggtgcctgccttgtgcaggcccagggctggtgctgtcacaggcatcctcatagcacctccgtgggtagaggagttatcccagaacacctgcctgaggatggcatgtggtcctcaaaggcacatttacaatctgcctgagccaggtccttgcgatggggcatgtgaagattatggagtatgtagagatttggggcatgcagagattcagggaggggcatgttgtcagggacccctccttctctttttagatagctgtgcgacctgggtgggtatttgtagagccgtgggggaggggctgggcaatgccctggcactgggggtggtggggaattgatgctgtctttgcctggctcagtgagggagatcaggggctcagggagaataatagttgcctgagggtaatgaatacttatcaggaccttgtccctgagctgtgtttcagagcatcatagttaatgtgaaaatgtggcagacacaggccctgtgtagggaggtgggctgtaggaacagccatgacttgggctggctgcggcaaatacctccaggaaagggctggggaggagaaggcagtggttcagattcattctgacttccaagaagaggaggaaggaaggagaggagaggaaacaggggagggggaggagggtaaagaaggacaggggaaggaggaagagaggaagaaggggaaggagggggaggcagaggaggaagaagaactgggctgggtctcggtggcctgataggtgacagtcagagtaggctgaggggggaccaggccaagtggtccaggtctaggggttcagattcagacctaggggtccaggtggaccaggctgcaggtgtgggcactggccaggagggacagggtggggctagcctggctcgtgcccattgggatggtgggcggagctcaggagacccacccaagggtgctgagagaatctgttagggagtgacgccagacccaggggtgaggacaggagctggatgtggagagcagctaggcgaaccttcagagtccaaggcaggggcagctttagggtgaaggtgcacaggccgccttagtcctcgtgtgactccacgtggtccctggggcttgcaccccttggtcacttatgccagggctgtcttttcacctgcaggcaggtgcagttgagcagggtggcagagggaggccttgggaaagtcgctttcttttgggcctccatcgtcccatctctaaactgagggaggtggtgaaggaggcatgatgtttttcaggcccttcccaggatcaatgccgacctgtactccagaatctgttgcagagcccaggcttgacatggagcttggaagtgcccactgggagagaaggaaaggaaggtggggatcggggaccagggctaagtggggccactccagccaggagccctcagggca

SEQ ID NO: 13019 - DNA, 905 bp, Artificial sequence
  DNA replication origin
ttgagcagggtggcagagggaggccttgggaaagtcgctttcttttgggcctccatcgtcccatctctaaactgagggaggtggtgaaggaggcatgatgtttttcaggcccttcccaggatcaatgccgacctgtactccagaatctgttgcagagcccaggcttgacatggagcttggaagtgcccactgggagagaaggaaaggaaggtggggatcggggaccagggctaagtggggccactccagccaggagccctcagggcaaggaggtgagccttggatgcagccctgcttggcagaccaagggtgggaattggagtgagggtgtcagtgtgaggcaatggtgacatgccacctggagacagctctgtgggcaggtggcctggctttgaaccttgactcccctgccttgtctaagtgaggaagcagctgacccaccctgccacagggtttcagtctttaagtacctgccctgtctggctgttgtagggcttggcgggttgggccacacttagaacagggcattcagggagcactggtcagtactgaggggggtggagagcctggctgaagggaaagagaaatggggcaagggtctgccaggtaggtgccactggttctgtttctgaatggggacattgaggctcagaggggcaagtgagtgagtgtcagggtcaggggcagagccgaggtgagcacctagagccttctggctcctgcttgctgctcttccatcccccatgcccttactccttggagtgtggtcctcggacctgcagaaggggcttgcctggagcttgcagagatgagtgctttggcctccaagcctgctggactggaatctacattgcttgaggtcttcaggtgatggcctgcacatctgagtggagacacattgcttt

SEQ ID NO: 13020 - DNA, 1305 bp, Artificial sequence
  DNA replication origin
gtttgggaaccagtggtcgagagcagtgaggttctcagccctcgttgcatattagagtcacctgcagagcttgtaaaagttccagtctggggccctatccccaaagaccaactacgtcaaaatctcaggtgtggtgcccctgaggtgactttagtaggactaagactgaggacccttagaccctcaggccctcagggcctcggaccaggctccatgactgcaggtatcaagctcagccgggtgtccagtttccacctggctggtgcccacttttctggtctggggcagagccacccagaagttggtattttttacaagctccccaggtgattcttaagtttgagaactactgcagacttacgatactcaccctggacttagtgtccccaaaaggagggcgagggttaagactttgaaggaggaatgggtgaggggtgtgcgaatgatggggtggggcgggcaagatttttctggtgtggggagaagcatttgcaagtttcagcctctgtgatttccaccttagaagaccactgtgacccctgtggagaatgcaggatgcaatgcagggcaaggaggttggggggatctcagggagtccaagggagaccccagcaggtgtgctggtgtcacagtgcggggtgcagaggggtgggttgatggtggaggagggagggatgaaggttatctcctgggccttactgttttctgagatggtgaagaccagacaggaagtcttccagtccagaaggtgctccagccacaggatgcgatgacatagggcagtgagggaagccagcagggcagttggaccgctgagtctggaccttgggaaggtttgggctggatgtggacatttaaagccatgggctttaaagagcacagagctcacttggggccgaggcccgaggctgggaagaggagatgcagccagcaggacaggaggggctgaggcccttgttcttgagtggaggctgaagtgggtgaatctgggggcttggcttagagggagggggcagaagagctgcccaatttctgagagatcctttctcccttcaggatgtcagttggctgtcattttgcctggaatgcttggctgcagcccgctggactagtgtgtgcgcaatggaccggcagcctcctcttagggttgactgctctggtgaaaaggcaggtgacccacagtgagctcacagggtgctatgacttctggtctgggtggacagtctatggagggtgagatgccttccctctgccaggaccagcagaattagagagcacctgctggatgccttcgcagagtctgtg

SEQ ID NO: 13021 - DNA, 1436 bp, Artificial sequence
  DNA replication origin
tcagcgtggccgcctgctccagccgcagcgtgtagccgcggaacagcgcctccagctctgggcaagcgaactcctcgtcgcacgcccggagcccgcgccggcggcttgtcccggccgcccgctcggcgcccccgggctcgcccgcgccgcctccgccgccgcctccgccgcgcggcgcccccgccatctcagcgccatgcagcggccgcggccgcgggcgcgcccctcgccggcccggggcgccggggcgcgggcggcggcgccggggcgggcgggcggcgggcggcgaggcgccggggcgcggggcgcggggcgggcggagttggggcgccggctgccccgcgcgcgcgcccggagcgcgtcccctcccgcccgccgcgcctgcgcactggagcccgcccgcgccccgaccgtggtcctcggcggcgaccgcgctgcgacagccgagccccgggagccgcgaacctgggcgcgcacagcccgcgccccaactccgcgtcctgcgttcccgcccgccggaggagccgcgtgacctcgagtaccttccttgtcccctccgagcctcagtttccccaccgtgcacagtggaacccaccctcttggcgtcacctggggagtcgaaaatactgaaatcctgcgaaattccctgttgcggggcagttaatcttggaaaatatgtgccttcccccactcaataaaaccaggccactagatttgagaggggcccgcgtctgactgcgaacccagggccctcgcccctacgagacggagaatcgacgtccaagaatccccggggtcaggaggaaggtggaggcctggggcgtacgtcccttccatgcgcatgagggaccccccgcccctcggcaattcttccctaagctctagggtcgcggagaccctgtgggcgggtgcgggctgcgggagctgtgctggggaggcggcggtggtgaagtccaagaaacaaagtcctgggagtcggcccgagggattcctcctgggtactgaactgaaccaggatgggctcctggcagtgctgtgtcccgggaagaaggtgtgaggctgtaggtgcagaaatggggcaagagatgaaaggaaaaggggcgctgctgtttgccttaacgattagctggatacccgagagagagcgaaacgttttcttctagcaggacaattgggagggaaggacgctggcccatgggggttaaaacccgcgagtcgaattccactgcttacattcattcactatgagggagacaactttgtgctggtgcttcaagtacatgatgtcatttggtgctcagacggcccctgggctgcctgcatcccccttacagtgaggatctctcatgatcagctccctccaggaggcctagagaggagtagccactgcaagaacccctgcctcctccgttatcccggctgcttctcgtcccctc

SEQ ID NO: 13022 - DNA, 1008 bp, Artificial sequence
  DNA replication origin
gcggcggcggaggcggcgcgggcgagcccgggggcgccgagcgggcggccgggacaagccgccggcgcgggctccgggcgtgcgacgaggagttcgcttgcccagagctggaggcgctgttccgcggctacacgctgcggctggagcaggcggccacgctgaaggcgctggccgttctcagcctgctggcgggcgcgctggcgctggccgagctgctgggcgcgccggggcccgcgcccggcctggccaagggctcacacccggtgcactgcgtcctcttcctggcgctgctcgtggtaaccaacgtccggtccctgcaggtgccccagctgcagcaggtcggccagctggcgctgctcttcagcctcaccttcgcgctgctctgctgtcctttcgcgctgggcggccccgcccggggttccgccggggccgctggggggccagcgaccgccgaacaaggggtttggcagctccttttggtcaccttcgtgtcctatgccttgctgcccgtgcgcagcctgctggccataggctttgggctcgtggtggctgcgtcgcacttgctggtcacagccaccttggtccccgccaagcgcccacgtctctggaggacggtaagtgcagccgcgcacccctcatctggtctcggacacacttgctgggacgatgctgggaatgcccggagtcgggcgcgctttttcctatgcggcgggtggggacactgaggctccgagtgggggtgtgttcaaggtcactcctacgagttggggacgcagtcggggctggcaccctccggccagggctctcttcagagttacaatccacgaagcgcccctggcgtgaagtgtggagaggggagacaggtgtggagagagaaaggtttggccaaggtcagggagctgatgagcggccagacggcggccagaggggtccgccggtcttttgccgcacccatccccacagagggactgaaagtgggcgaggagagcagacccccagggcaagctc

SEQ ID NO: 13023 - DNA, 1239 bp, Artificial sequence
  DNA replication origin
cgaggagagcagacccccagggcaagctccaaggccggctctgcgcgcagcgctgggctcttcccctgcgcacctagagcgcgtgctgggctcgcctcccaaccctgcggacccgagggtggtatatgggtggtgggaaaggacttcggctcttccagccttgctggccacccttctgtggacatgcctccggcccagaaagagtggggtttgccaaggtcaaacacagtctagtccctgccgctgccactcggcggttgccctgaccctgccttttctgcgcccgaactttgtcactgtcttcccagtcgggcgggcgagatggttgcaaggacggggacgctgtctgcctcccgcggactcttcctgggccctggaggagcctgctcttccaactgcccggaggtggacgtggaccagaggtctttgccccacggcggggctttgagagcttccccttgtgcccatctccaacgggccgcagggatggggctggggagttggggggtggggagatttggaagaccctgaggagggttttgtttctgcctctagctgcagtttagcagggggatggtatgactcaaatggagtgggggagcccatctcacgaaaggaagcagtggtgggagcaaactggggagaggtaaggggtcggaggggaagctgaatccagagagattagggaagaataactggggggcggtggtaaggagtcccacagcccggccccgggggaccagcacccaaggatctaaggaggcatccttagactgtgatgccaggggcagcacacagtcagaggagccatgagatgctcaacctggcacagggatagacacatcactggacttgtgtcttagggtcagagagagaccaccatgtgctcaacccgtgggcaggggcgggagggaagaaggcaggagtacatggagaattgtcaaagagggcgtcggaggaagagaggaagagaggtagaggtgaagggcagaggcacaaaaggatggctaaaggctgaggaaaggggaaaggagccagaggacttcatgtcctggaggggaaggaggctcttccacagcctcctgtgggcagcacgtgggccttgccttatcagtctcagggggcattcctgtatctcctactgcctccaccccccatctgtctgtgtttagcctgggcctcatgctggcccccacagccagacccgcaaccgcaagacggcctccccaatctgaccag

SEQ ID NO: 13024 - DNA, 1392 bp, Artificial sequence
  DNA replication origin
agaggcagggaggccccggcagctgcagactccacccctgtgtctgctcccagctcttctccggtccatgaaggagctgccccccggcccctcagcccactttccatcagtgcgaccagactcagcacatgtctagggctccttccacagtgcagcccctgctgggcacattgtggaggggcagagaaaagcccctgggcccactggaccacttcagaggtggagtgagtgggagcccctggcccgatgcccaggaccattctccctctcttttgtctagactcatttcctgctcaccctcatcccagctgccctgacaggggcaattctggaagctttttatgttaaagttaactgcccttgaggaaggataagcctgggggtgaagggaaatggaccaggggaccacccacccctacgagaaaaacaaaaatgggggcgaggggggaagggggaagggggggacggggcagtttccaggggcatggatgtcccctgctgttgctccctaaacactaaacacaggcctgggggcaatctggagctggaggaagcagcgaggctgccacaggactgaagccagagtcaggagcacactgtggggggccatgcccaggacagcagcaaaactgacctcaggaagagtgtccagccaaggacaaggagactaccttcaggtcgccaggccaccacacagcaggaggcagggaagcccactccctaccttcacacagcctgacccctgtgccaggaggagcaccccacctcttaccctccctgacccggctctaaccctagccctgtcgctgtaggcagtggctccaccaaggcagatggatgcacagcagatgggtactccatggtgacaggaccaggctgcaggccacgaagataagcgggccagtgggaggggaagtggaggaggggtccgtgggggagtaggggccagccacagaaggtggggcccagccaggggaaggaccagcagcgggaggggctggtgggggaggaggatcccagccggggaggaaggcccagccagaggaggggccagcaggggaggtagggccagcagagggagaggctggggaaagggaggcagggcatggggttaactgggagttgacagcatgttgggcagtgggcacagggcacacaaaggcatacgggacacagcctgagggctggcagattggtgtcaccagcgcacacctaggccacgagctttgctatcaacaaccaggtcatccagggcccttgagccctatgattctgcgtgctggggttaggttgtttcacctccaagcaaccaagccatggttctgaaccagagctcagacataactggggctgcacagggaaatttcagctgactcccatttctccgtgata

SEQ ID NO: 13025 - DNA, 2086 bp, Artificial sequence
  DNA replication origin
gagggcgcggtgggagggatggagcttcttcccctcttcagcctgtttccgcgcttgtcagtgggatgttctacctgattctacgtgggatttaaactctgctcttttgcttttcttttcaaagcagagtgggaggggcatgggagggactgagggatgagtcggggaccctcacaccacatttctggaacatggtctctcagacgtaggggtgtgcccaacaggtcaagggccagctggggttggggtcagggaacatccaactggaggatgagaatcaaagtcctacttactccctcagtccagacaaggaaactgaggtctaggaaggggaaaggactctccaggatggcatagtttattttgaaaaatccaaacatttattcttttctcttgggggaaaaaagaaaatgcttgacctacacagctaagggagaagtaagaagacaaagaccaagaaagaatgccacatggtcccgtagcccgcctatctgtgtaagaacaagaggactctgtgggtacctcaggaggacagcttgtttttttaagccaatgtgaaagactctttctgggatattgttggagcagtagggggagggagagaagccaggttggggccctggtggagacagcagtgttttcacagctgtaaccctgctgtacactgaagcacaggccgagactcaggagtgtgtccagggagtagcatgaggagcgccgcagggaggcttgggtgttggggaggctgtgccagccctggctagtgctcctggagggagttgcttgttcagtggcagtccagccctggacgtgggcctacccaggctcaggggcccggcgcccttactggggagggtgaggtgaggaggagtggagggagggggccctgctgtctaacccgggcccttctcttctgtccaggagcggctcctcatgagcctcctgccccggaacgttgccatggagatgaaggaggacttcctgaagccccctgagaggattttccacaagatttacatccagaggcacgacaatgtgaggtagggctggtgctgacccggcacagcggggagcctgggaagctgaggtgtggagataatggtgaaggtggggaggtgatgacagaagtggggaagggatggatggaggtggggaaagaatgggggtgtggaggtaatggtgaaggtggggaagtgatgatggaagtgagaaggtgataggtggaggcgaggaggtgatagtggaggtgatggtggaggtgaggaggggatagtggaggtggggaggtgatgatggaggtgtagaggtgatagtggaggtgtgggggtgatggtggaggtggggaggtgatggtggaggtatggaggtgatagtggaggtgtggaggcgatattggagttgtggagatgatggtggaggtgggaaggtgatggtggaggtggggaggtgataatggaagtatggaggtgattttggaggtgaggaggtgatagtggaggtgtagaggtgatggtggaggtggggggtgatagtggaagtgtggaggtggtggtggaggtgtggaggtgatggcaaagttggagaagtgatgatggaagtgaggaggtgatagtggaggtgtgggggtgatggtggaggtggggaggtgatggtggatgtgatggtggaggtgagtaaactgatgatggaagtgaagaggtgatggaggaggtgaggtgatggtgcaggtggggagatagggggagtgtggacaaagggtctcagttgtgaagggaggagagggcagatgtggtcaggaggttcaggtggacatctgcctagcagggaaacaggtcctacgtgtagggggctcttggcttcttgggtgatgcatgttacagttatctttccaatttcttatttcagtattcttacacttcctctgttgactggagagggtaaaaaatctgtccctaaacctggctttgagcagtgacattttgggctcagaatttgccatgtcagaatagtagctgagcattatgctagttgttgctgggtctggtatatgtgtgctcttctgtcttactctgttcatttcatgaca

SEQ ID NO: 13026 - DNA, 939 bp, Artificial sequence
  DNA replication origin
ttcacctgggagaataaacaaatgaaaaaagccaagagacatgtgaggagggtgaaaaacggatgtggacctagcagcttgcaggtcatctgcacattccactataggaagtattaactgtgcacgtgaatcaccttggtaatcagagggtattttctaaattaacatttcttattcagtgttttccagggtgcctgacgattcagattcgcactgtcctgtgtattttcatagtggtcttaatctactcagtagcccaaggttgtgtggtgagcatctccagcttgtggcatgcgctggggcgggagagggcatggcatggaggaccagcccagaagccaggacccagggctgcagagacagggaggtcatcagagacgtcagtaacaggcatggggccccaaggagccagggaacaagagactttacttagcagaggaaaatgcaaattctccctggtgaaaggagcctggcttcttcatacggtgcagaggacagaagcaggggtggaaaaacaggacagacagggcaggaggaacaggatggagctgggcagcagtaacaggatgaagctgggccaggaggaacaggatggagctggggcttggagtgaaaggatggaagtgggtgggagtaacaggatggagtttgtagtgggagtaacaggatagaagtggggcaggagtaacaagatggagctggaggcaggagaaacaggaaggacagagctgggggcaggaggaacaggacggagctaggggcatgattaacaggacagagctgggggcaggaggaacaggacagagctgggtgcatgattaacaggacagagccgggggcaggaggaacaggatggagctggggcaggagtaacaggttggagctgggggcaggagtaacaggttggagccgctgggctggggagcaggcagggctgat

SEQ ID NO: 13027 - DNA, 1284 bp, Artificial sequence
  DNA replication origin
tgtagagtccgacagtagacagaagttgggcaaaaggctgatttgaggaagttttgggcttcaagagtcagccaggaggcaggcactaggcctggaaatggcccgacagtcatgagttgggcctaaatgggccactgtgagggaagagctgtgcctgttgaggctgctggcaggcaggcagaaacttggcctggggcagccgccatgaggcaagagctgggcctggagaagcccctgggaggcaagagcagggcctgcagaggctgttctcaagtcaaagctgggcctgttcatgccaccaggaagaaggcaggcctggagagtttgacttgaggaagttttgggcctacattggtcgctgtgagctggacaggaactgggccaaaaaaggctgttgtgaggcagcagttgtgcctgtagactcagcccagaggaagagctgggcctggagaagcccccatgaggcagaggttgggcctgtagacgctgacaggaggcaggagctgggcctggagaggtcaacttgaggagattttgggccttcataggccaccaggaggcagcagttgggactagagaggctgacttgaggaagttttgggcctggagatgacgtcctgggacaggagctgggcctggagaggccaccgtgaggcaagagctggatgtagacaggccagtgtgaggcaagacctgggcctgtctaggctgctgggagacaggcaggaatgtggccagggaaggttgccatgagacaaaagttgggcctggaaaggcccttgtgaggcatgagcttggcctaaagaggccactgggtggcaggagctgggtgtgtagaagctgctgaaaggttgggagcttggcttgggtggtccacagtgaggcagatactgggcctgaagaatctgctgtgaggcagatgttgggactgtagaggctgacaggaggcagaggctgggcctggagaggctgccaagatgcaggagctgggcctggagaggctgccaagaagcatgagctgggcctggtgaggtcgacttgagaaagctcagggcctggagagaaggctgggaggcaggagctgggtctaaagaggccattgtaacggtggagctgtgcctgtggaggctgttgtgaggcagtagcctcatctgcagagactgccgtgaggtagggtatgggcctaaataggccattgtgagtcatgagcttggtctgtggaggctgactggagaaagttctgggcctggagaggctgccgggaggtaggggctgggccaaaag

SEQ ID NO: 13028 - DNA, 1353 bp, Artificial sequence
  DNA replication origin
ctcccagcaagcaagctcttttggctcagctcccgccggcgtttgtagaccccgaagtttctgcagccaagctcttcaggcccacatcctgcctcccagtggcctgtacagtcccagctctggcagcagaaagcatctgcaggccccgctgttgcctcccaggggcgtctccaggcccagctctcgccccaccgcggccaagtccctgcctgctcccggcagcctgcgtgcggccctgctcctccctcacagtggcctgttgaggcaggggctcacgctgacctcagcgtgggaggggccagtgtgaggcaagggctcacgctgacctctctcggcgtgggaggggccgctgtgaggcaaggggctcatgctgacctctcttggcatgggaggggccggtgcaaggcgaggggccagtgtgaggcaaggggctcacaccgacctttgtcagcgtgggaggggccagtgtgaggcgaggggccagtgtgaggcaaggggctcatgcggacctctctcagcatgggaggggccggtgtgaggcaaggggctcacgccgacctctcagcgtgggaggagccagtgtgaggcagggactcacgcctctgggcagggtgtcagaggcatgagttgggcatcaacaggccaccgtgagggaggaactgggccgcacgcgggctgccgggaggcaggcagggacttggccccgggaggccgccgtgggggcgagagctgggcctggagaggtccctaggaggcaagagcggggcctgcagaggctgttctacagccagagctgggcctgtacaggccaccgagaggcagtaggcgggcgcgaagagcttggctcgagaaagttcggggcctacaaaggcggctgggagctgggcaggagttgagccaaaagagcttgcttacttgctgggaggcagggccgggagacgccgacttcaggacgacttgggcctgcagaggtcaccgggaggcccaagctgggcgtggaggagcccactgaccggagaccatttggggcctggagacgccatcggagggcaggagctgatcctggagaggccaccgtgaggcctgacctgggcctggggagcttggcttgaggaagctgtgggccgaccaaggccgccaggagatgcgcaggcgctgagtccaaagaggttgttgggaggcagcagtcgggcctggagacgcagccgggaggaagagctgggcccggagaggacgccgggaggctgcaagtgggtctggagaggccgacttgaggaggttctgggtccgcagaggccgccggaagggaaaaactgggcctggaaaggccgttgtgaggaatgagccccatgg

SEQ ID NO: 13029 - DNA, 1331 bp, Artificial sequence
  DNA replication origin
gtgtgaggcaaggggtcagcgtgggaggggctagtgtcaggcaaggggctcacgccgacctctgtcagcgtgggaggggctggtgtgaggcaaggggtcagcgtgggaggggccagtgtgaggcaaggggctcacgccaacctctctcagcgtgggaggggccggtgcgaggcaaggggctcaggccgacctctctcagcgtgggaggggccggtgcgagacaaggggctcacgccgacctctctcagcatggcaggggccggtgcgaggcaaggggctcatgcagacctctctcagcatgggaggggccggtgtgaggcaaggggctcatgcggacctctctcagcgtgggaggagccagtgtgaggcagggactcatgcctctggacagggtgtcagaggcatgcgttgggcatcaacaggccaccgtgagggaggaactgggctgcacgcgggctgccgggaggcaggcagggacttggccccgggaggccgccgtgggggcgagagctgggcctggagaggcctctgggaggcaagagcggagcctgcagaggctgttctacagccagagctgggcctgtacaggccaccgagaggcagtaggcgggcgcgaagagcttggctcgagaaagttcggggcctacaaaggcggctgggagctgggcaggagttgagccaaaagagcttgcttacttgctgggaggcagggccgggagacgccgacttcaggacgacttgggcctgcagaggtcaccgggaggcccaagctgggcgtggaggagcccactgaccggagaccatttggggcctggagacgccatcggagggcaggagctgatcctggagaggccaccgtgaggcctgacctgggcctggggagcttggcttgaggaagctgtgggccgaccaaggccgccaggagatgcgcaggcgctgagtccaaagaggttgttgggaggcagcagtcgggcctggagacgcagccgggaggaagagctgggcccggagaggacgccgggaggctgcaagtgggtctggagaggccgacttgaggaggcccggcctctgcctcccgcatggcggcctctgcaggcccagctgttcctcctggctgcatctctcggcccagctcctgcctcccagcaagcaagctcttttggctcagctcccgccggcgtttgtagaccccgaagtttctgcagccaagctcttcaggcccacatcctgcctcccagtggcctgtacagtcccagctctggcagcagaaagcatctgcaggccccgctgttgcctcccaggggcgtctccaggcccagctctcgccccac

SEQ ID NO: 13030 - DNA, 1090 bp, Artificial sequence
  DNA replication origin
gggaggaagagctgggcccggagaggacgccgggaggttgcaagtgggtctggagaggcctggcctctgcctcccgcatggcggcctctgcaggcccagctgttcctcccggctgcatctcccggcccaccccctgcctcccagcaagcaagctcttttggctcagctcccgccggcgtttgtagaccccgaagtttctgcagccaagctcttcaggcccacatcctgcctcccagtggcctgtacagtcccagctctggcaggagaagagcgtctgcaggccccactgttgcctcccaggggcgtccccaggcccagctctcgccccaccgcggccgcccggggccatgtccctgcctgctcccggcagcctgcgtgcggccctgctcctccctcacggtggcctgttgaggcaggggctcacgctgacctctctcagcctgggaggggccggtgtgaagcaagggctcatgccgacctctctcagcatgggaggggccagtgtgaggcaaggggtcagtgtgggaggggccgctgtgaggcaaggggtcagcgtgggaggggccggtgtgaggcaaggggctcacgctgacctctgtcagtgtggaggggccggtgtgaggcaaggggctcacgctgacctctgtcagtgtgggaggggccggtgtgaggcaaggggctcacgctgacctctgtcagtgtgggaggggccggtgtgaggcaaggggctcacgctgacctctgtcagtgtgggaggggccggtgtgaggcaaggggctcacgctgacctctgtcagcatgggaggggccggtgtgaggcaagggatcagcgtgggaggggccagtgtgaggcaaggggctcacactgacctctgtcagcatgggaggggccggtgtgaggcaagggatcagcgtgggagggaccggtgtgaggcaaggggtcagcgtgggaggggctagtgtcaggcaaggggctcacgccgacctctgtcagcgtgggaggggctggtgtgaggcaaggggtcagcgtgggaggggccagtgtgaggcaaggggctcacgccaacctctctcagcgtgggaggggccg

SEQ ID NO: 13031 - DNA, 973 bp, Artificial sequence
  DNA replication origin
ggggaggccgcagtgaggcgagagctagctgggcgtggagagtccgctgtgaggctgaggctgggcccgtgcaggccttcgagaggcaggaagccgggcctgcaaaggccgactggaggtcaagttctgggcctgaagaggccaccaaaagtcaaaagcggggcctgggaaggctgctgagagccatgagctgggctgggccaaaagaggccactgggaggcaggaggagctgggcctggagaggctgactcgaggaagttttgcacctggagaggccaagaggacggagctgggcccagggaggccaacttgcagctcttccaggcccacttccaggccgacttgaggacaacttaggcctgcagaggctgccgggaggctggagctggacctggagaggccgacttcaggacgatttgggcctgcagaggccgccgggaggcccaagctgggcctagaggagcccaccgaccggaggccgtttgggacctggagatgccatcggagggcaggagctgagcctggcgaggccaccgtgaggcctgacctgggcctggggagcttggcttcaggaagttgtgggcctaccagggccactgggagctgggcaggagctgagtccaaagaggttgttgggaggccggagtcgggcctagagacgcagccgggaggaagagctgggcccggagaggacgccgggaggttgcaagtgggtctggagaggcctggcctctgcctcccgcatggcggcctctgcaggcccagctgttcctcccggctgcatctcccggcccaccccctgcctcccagcaagcaagctcttttggctcagctcccgccggcgtttgtagaccccgaagtttctgcagccaagctcttcaggcccacatcctgcctcccagtggcctgtacagtcccagctctggcaggagaagagcgtctgcaggccccactgttgcctcccaggggcgt

SEQ ID NO: 13032 - DNA, 1575 bp, Artificial sequence
  DNA replication origin
ctgaagggagcagcagggatcatttccttgaatgtaagaatgactgtcacttgaggtgattcagcaatgctctactgttttagagtgttttagccagattacagagaaaggcatttacttagggcttgcttacagtaaacaggactgtatgggcatcagaaatgtgaattcttgttcaggatccaccgttatagcctctgtgactttgacctggcaatagccttccttctctggcctcagtgttctcctctataaagcaaggggctggacaagccatctccagtttcccagtttggcaacaccactcctaaaggatctgaagggacaacaggaggcccaggcctggaggtagggtagccctgagcctgtgcctagaatgggaggcaaagatggtggcaggtgggtgggaaaatgtggggtttgggggtcacaggagagaccaaggggcaggcctggagcatggcacgctccctgatcacagctctccactggaaggccatggagggagtgatggggagagcctgcaactcctggagataagcctgattctgactttctttgaaggatttttttctttcgacttctttcctgtgaaagagaatatccgagaaatgagaattttaactaaagagaaaacctttgcatttgctactgataaatatctggcctatgcgggaaagtcatgggtgccctgggattctggctccactgctaacaagaccttgttagaccttcttaactgcccctccagagaggagaaaggctcttggaggtagagtgagattggggagcttggcagagccctaggatgaactgtgtttttgttttgttttgttgcaggttggagcctttttcctgcagaaagagaagcaattccgggcttttccacagataacctgctagggctcgcagagacctggattctaaccccatctcgcctttcctcacctggggcattgttttctgcgtttgagaactgctgggtgggctggtgttacccaggatttttaaatttttgcaggagacgctttgcaggagatctctagggcttttttctgtgtcaattaaagagcctggccagctggacctgggctgtctttttgacaaaaacaaacgtcatccccctcccagctgagcacttgttagaactggactttaactgagggcctgaaccccctaacaacgggacaaacagtatgaaatcaaaaccgtttaccctcctcccaccagcggtttgcgtagggccttgggtgcactagcaaaacaaacttattttgaacactcagctcctagcgtgcggcgctgccaatcattaacctcctggtgcaagtggcgcggcctgtgccctttataaggtgcgcgctgtgtccagcgagcatcggccaccgccatcccatccagcgagcatctgccgccgcgccgccgccaccctcccagagagcactggccaccgctccaccatcacttgcccagagtttgggccaccgcccgccgccaccagcccagagagcatcggcccctgtctgctgctcgcgcctggagatgtcagaggtccccgttgctcgcgtctggctg

SEQ ID NO: 13033 - DNA, 1055 bp, Artificial sequence
  DNA replication origin
gtgccccggttgcaggcgtcatgcagcgggcgcgacccacgctctgggccgctgcgctgactctgctggtgctgctccgcgggccgccggtggcgcgggctggcgcgagctcggcgggcttgggtcccgtggtgcgctgcgagccgtgcgacgcgcgtgcactggcccagtgcgcgcctccgcccgccgtgtgcgcggagctggtgcgcgagccgggctgcggctgctgcctgacgtgcgcactgagcgagggccagccgtgcggcatctacaccgagcgctgtggctccggccttcgctgccagccgtcgcccgacgaggcgcgaccgctgcaggcgctgctggacggccgcgggctctgcgtcaacgctagtgccgtcagccgcctgcgcgcctacctgctgccagcgccgccagctccaggtgagccgcccgcgccaggtgcgctgcgtgcagcacccggcgcactggcgccgaagggcctgggggttgctgggtgccgctgcgggagactccgcttttcttctcactggagataatatgtggggaaactgaaggcgctccgggaaaggtgaaggcggtcgccggagggaccctccccagccggccctctacttgctcgattctctaagtgcagagtacttgtaaattgcaaagcgctttcagtgaaaatgggttaaaggtttccggagctgaggggagcggtaccgatgtttagctgttggaaagatcctggacacaggagattctcctcgccccgcacgggggtgcacacggactgcaatcccagggatgcttggggatgggggggatataggcggatttggaccaaggaaggtgggcaggcacgttgtaggaaatagtacctctcttttaaaatactgactttgcacagccttttggtttgcaaagcaatgtctagtcccggtatgtccaaaaacaagtaaagtggattcgggttttgatatcttctgcggttggaaaacctgaagctgaaaaagaagtaacttcttaaggttacccagcggccacaacagagtgtaggtttgaactcc

SEQ ID NO: 13034 - DNA, 1115 bp, Artificial sequence
  DNA replication origin
acggcgggcggaggcgcgcactgggccagtgcacgcgcgtcgcacggctcgcagcgcaccacgggacccaagcccgccgagctcgcgccagcccgcgccaccggcggcccgcggagcagcaccagcagagtcagcgcagcggcccagagcgtgggtcgcgcccgctgcatgacgcctgcaaccggggcacgctgcttggcaggctgggcgcgcagggatggggcgacagtacacggcgcgaagctgtggaatccaggcaggaagcggctgatcctcagcgcccagccgcagtgctcgcatctgggcggcccgggcgcgccggccgctatatagaagccggggtggcccaggacacgccccggaacggcgcgcccaggagtgggggttgggaggggggcgggtcggcgcaggcacggctgcgggggcccgtgcttcgccctgagcagccggggccgagctcgggggcgtgcagctcgagactcgcccgggcacctgctcctcgtgcgcacgcccggagcccgggtcaccttgtcgtctacaagaaccaaggtgtgcccggccaccccggcactccaggccacctcagcacccccggtcaccccagtcactcctggccaactcagcacccccgatctccttgaccccgccgcccttaccccttccgctctcggggtgaggtctccctgcggcgagccggtgtcggggaaactggcatacagcgctccgcattcgtgtgtacctcgtggagctttctaaaatttaattccgttggcaggcgaagtcttgggacatttctgacttacatttgggtctcagggagccaaggcactgcggggtttaatttacacccgctgggctgtttatatccccaggggcccacaaatacgcatctgaagatgcgcccggggccttcgcccctttccaggcttacttctcaacgcaagaagactctcacgtgttgctacaccgcaagtctccaattaagagtggaccggcaagcgaatgcgtccttaaggcagggcttttcaaatattttaaatgacaactgttcttcttgtcttgggtattctccctgattatgttttcaaatggagtttacacccatgacaaaagaa

SEQ ID NO: 13035 - DNA, 964 bp, Artificial sequence
  DNA replication origin
gttcggctagagtagagctgttattgtctaaaagctttctctcttgctaggctgccccttttctggtccttttgttagaaggggaagcttttgatgggactcttgttgcctgtggctattggagtttccaagttcctgacttctccagctccaagtctgagacataggagacaaaaaataaaaccccggggcctcatcaccatgtcatttcccaggcctggagatcctgcgtagttctctcttctctcctcctttcagtgttttctcatgtttcagcccataatacccagacatttgttttttatactctagtgttaggaatagggaaaagtgtgtctgctccatctctccagaactgaaagtccaatgtgatgtttttattgcacatttttgtcttagcttaatatactgcctagaactgggctactttgtgggtgagggagtgtgtgtggggggaaaatgggtgtgtccatgtgagaaagagggggcgggtgctttagatgatgagtgtgagtgtgagaggtgacatgttcaaggcttattagggaggcttgtggaaaagggggctctgtgtgtgtgaagtggtgggtctacatatgaggggtgtccagggaataggcatgggctgcatgttgggaggtgtgtggtgtcaggaagtgtgtggtgtgtgtgtgtgtgtgtgtgtgtgtgtgtgtgtgagggatagctgtggactaggctgagagagaatggtgtgcaggcctgaggcatgtgtatgaagtatgcgagaacctccccatgagggcttgtgtggaagtatgtatgtggacatgggaggatgggcagtgcccctatgtgtgtctagaagcagtgcccgagaacacacaagaaaatactagaagaatagacaatgggagagagaaacagagaaacagtgtgagatggagtggggtgcagaatttagagtttgtgcctgagagatggt

SEQ ID NO: 13036 - DNA, 1040 bp, Artificial sequence
  DNA replication origin
gaatgttaagtaaatcctcagatgctaaaggcgatgagaaaaataagatctagggtggtgaaatgtgaacagtgctgggagtttactttagtaagaactcttgattctgggttaacttgctatacacatggccctatctccaaagccatgagaaggaatataatcattcaagaatgggggggtggagagagagagagagagaaagagagacagagagagagagaagaagaagcagacgaagaggtggaggaggaagaggaggagaggagggagaggaggaggagaggagtaaagagaggagaagtagaggaggaggaggtggaggaagaggaggagtagagggggaggaggagggggagggagaggaggagtagaggaggaggaggaggtggagggagagaaggagtagaggaggaggaggaggtggagggaaaggaggagtagaggaggaggaggaagaggtggagggagaggaggagtagaggaagaggaggaggaggtggagggagaggaggagggggagggaggcaagaaaaacccaagacttgcctgagtagaatgagaaaccagataccctgtacaggccaggctgccagaagagtaacagttgcaggggtcaagttatagaaatggtccacccttcagatggagatatgggatgcatgcttgatttggtcttgactttcaaaccgggtggggaaaaaaataagtcatcaagaaattccattctgattttgtgtaggctagtgcctacattcattctctgtgcaccctgaaaactaagctaaaattcaatttaagattgtcctgtgctagtagtttcttggtaaaaaacatattctcttcgaaggaagacattggccttacaagattcacaggatttttacacatagaattctaaagaatatggttttacaattaaaaaaattataaggaggaagaaagaaatcaccataagcaagtgtcaagagaaacatcaattcatagaatgatagctgtggaaaagtcagattttgtcatttttaaatacagaatatgaa

SEQ ID NO: 13037 - DNA, 1190 bp, Artificial sequence
  DNA replication origin
ctgtgggtgccgctggtcccggtgtggccggcagggggcgcgcgcgccattcccgggctcgccgggcggggcgggggcgcttccgaagctgagccgaggacgccgtgttccgccggtccggagcgccgctactccgcgacctgagcctggctcagcagctctgccaggcgtgcttccgcgcagggtggccggacgttctggggaagttgccccgggcccagcacaacgcctgcgggggagggggtgagcggctccagcaagggacccaggggcggggctcagggagacggggagggagaatggaatagataggaaccgtcgagatctcgcaggggggcccacaggccacccccagggtcgcctccgcccccgctgccctgcgggctaccggctccagtggcgggccaggacagggcagcgcgaagaggaaacgcgccccggcgctaggcccccctcccaaggaaggggtcaagcgggctctgccctgccctactagtgtgactgctggcttctgggggctcagctccccgactgtagaggaagagctagaaaagcgattcccgagaaggggaatcattgtaagcagttactgcactgtaaagtggcagagggcttgcttggtagcggagaatcaatcgggttactcttccttcctcacgggaagggcatttgtaaattccgcgttgcagagacagccggtgctggccagttgcctggcaagcgtgtgctcacgcacacatcagctgcatccatgagggagatgatcctatcttagcgtggcagggccagaaaggggctgagagtctgggcccagtactgctggactgtgcagccttcgctctgttctccttcagtgatgactcactctctcctgaaagaagaccacactgccccggagacacaggaggccttctgacctggcccggttgcccttcctggagatgcccctccttccccagaaggcaggctcagctcatggatggtgcagtcagtaaggggaactcagtgctgcccaggtcccagtccactgtggacacctgcatgatctgacacttccccatgaggacttttgagaagccagatgacttgtttgaattatccagttcagctcctgagcctcctctgcaagatcctaccaagcaaacttggggtgtttcccctgctcccctatttctggtattaacaccttc

SEQ ID NO: 13038 - DNA, 847 bp, Artificial sequence
  DNA replication origin
acaaggaagggggcagagcagctcccgttagcagctacagaaggctggagagaaggcagtgggtcatgggctgtgggccaaaagccatgggctgtggcatccccgggatccgtccctcccatggtggaggcgagggcccctctgagaagcctgtttgggagcctctttattgccttctttcagctatcctgggatcctaatctactgttcccaaggaaaccacaaacaaacactgctgtgcctgccccacacctggctacgtgggtgcctgggtacactggcatcaataaccttgtccccaagccagcaggtccacaggacagaggggcagagggacaagtgcttgccaccaagtcatgactgtgtccttgggaatgtgagtgtgtgggtgagcgtatgtgtgtgtggatgagtgtgagtgtgggtgtgtgaatgtgggtgagtgtgggtgtgtgagtgtgggtgtgtggaggtgagtgtgtgtgggggtgagtgcaggtgtgtgagtgtgggtgtgtgggtgagtgtgtgtgtgtgagtgactacatgtggtggtgtctgtgtttgactaggtatattttactgtggatatctgcaaatatattcttttgtgtgaatgtgtgtaagtttgagagtgttgtgagtttgcatatgagtgggtgagtcagtagttatgtgcatgggagtgtaaaagtgtagggggtgtgagcgtgtgtgcttgtgagaatgtatgaacgtgcatgtgtgaaactgagttttgtaagtgtgtctgtgtgtgtttctatgtatgcctatgcctcatgtgtgtgtattgatgtgagagcgtgtctgtgtgtgtctccgtgtg

SEQ ID NO: 13039 - DNA, 1006 bp, Artificial sequence
  DNA replication origin
gtaagcgtggaagagggttcaggcttagctctttctaactcaactgcctcttgaaaaggcttcttgggttcatttccctgcaatggaattgggatactggccattgcgcagacctgctatccctcgcgtgtttcttgcaaaggtaaagggcattttagctctgcaatgaagtgggggatgcgctgggatgtaggaatccttacaggttccctggggaccgcatgggttccagcggtgctctgtggtccacaggacggcctttcacggtgtttgaattaaacagagcggtgctggttggctccccgctaggttcagcctccctttccctaagttattgctgaattaaacagagcggtgctggttggctccccgctaggttcagcctccctttccctaagttattgcatttgtttttctgaagcttttgtaaggttctgtggggtgaaaaactgtcaaaatttcagctggttaacttgaggtgtactgcgttcccttttaaagtttagtggtcaaacgctgctgcctggaagtgtgggaacaatatgtgttggatgtggagggtgtccctcttgccccagataccggccccctgtgggctgggaaatatccccgaggcccggaagtgttcctggctgtttaacatcagagtaaagttgggctgggaatgtgtttttgatcagtgtctgcctctccagaatgcctctgaaggtttcccaggtgcctgaatgcctacctaaatcctcttactatggtggagctgaatatttcctgaaaggaaaacatagctgggattgtgctgatgcagctttgcacttttgcgtgtgtaaccattttgccagggcgacctttagccgggagaacctatccgagagatccctgcggttttgcatttcggcagagtggagcattcatgtggagcacctccctgttcaattttgcagagatttttctttctcaaaagagacctcacaatcaagaccagcactaattactgtgtccccctcag

SEQ ID NO: 13040 - DNA, 1085 bp, Artificial sequence
  DNA replication origin
cctccgcgctcgctcggagctgcggttggggcgggcgggggagggagggctaattcgtgtcagatggagggacgccgtgcgggaccgtgcgctcgcgcctggcttttgttcccggcgtctgacttctgacgggcaggagtggccgtggaggctgcggcgcgcggctgggacctgggccggcggccacggagagcccttggcccctcccgtgttggccatttcctgggacttgtgtccgcaggggactcgggaggcatcctccccccagatagccgctggggaggggtcagcggccaccctcgcccggccgagcccggctccccgcgggcggcaggggcagccatgaggctgcgcgccctgacccctgggccaccgggagggttcgcgcgcggaacccggtcgcgccggcgccggcgccaggtgagtgcggcccggagctggtgtgcatggccaggggcgcgaggcacgggcgccttcagggctgcacgcacgtgggctgcgccgggtgtgcactggtgcccgtggacgctgtgctggtgtgtacccgcttgtgctcatgtgtatgcgtgtgcccttgtcagtgcgcgtatgtcagtgtgtgtgcaccccgtctgcacgtccacgcgtgtgtgcttgtgagcgcgcgtctgtgtgtgcaggcatgtgtacgctggtccgtgcctgagtcctcgtgggtgcgtgtgtacccttgtgtgtgcacgcgcaggacaaggagcgagagggccagtggagctttgcctagtgggggcgtcttctggtaagcgtggaagagggttcaggcttagctctttctaactcaactgcctcttgaaaaggcttcttgggttcatttccctgcaatggaattgggatactggccattgcgcagacctgctatccctcgcgtgtttcttgcaaaggtaaagggcattttagctctgcaatgaagtgggggatgcgctgggatgtaggaatccttacaggttccctggggaccgcatgggttccagcggtgctctgtggtccacaggacggcctttcacggtgtttgaattaaacagagcggtgctggttggctccccgct

SEQ ID NO: 13041 - DNA, 916 bp, Artificial sequence
  DNA replication origin
caggagaggcataaactgagcagggatctgggggaagtgagcccgtttgtaaggacagcaagtgccaatgtcctgaggcagcacctggctgaggaggttggagagcaggccagagacaggcaggggctagatcacattggtctgtgggctcatgaagagaacttttttttttgagatggagtttccctctgttgccgggctggagtgcagtggcgtgatctcagctcactgcaacctccgcctcctgggttcaagtgattctcctgcctcagcctcccgagtagctgggattacaggcacccgccaccacacatggctaagtttttttggtatttttagtagagacagggtttcaccatgttggccaggatggtctcaatctcctgacctcgtgacctgcccactttggcctcccaaagtgctgggattacaggtgtgaaccaccgcgcctggccaaaagaactttcatttatttattttttaagggtgtagattctaaaagctggagagggttttgtgctacattgtcatgtcctgattcctgtcttaagaagctccatttggttggcctgtggatgcacagagatggtcagttcagtggtgggtggaccaggatggtgggagtggagaccggggaactgggcctttttggggctttattttgcagggcttgctgacagattggctgtgtgctgtaagagaaagagaaggagccccaaggttgagacttgactgtgtggggaagtggtgctatttgtgcagaccgagcagcagggaggacatgttggggagaaaactgggagttcttatttggagggttgaagtgagcggtgcttcggggatggcccagtgaaggtgggagcaggtggtgctcaggactcagcaggtcaggggagaagaagcttggagtggtcag

SEQ ID NO: 13042 - DNA, 739 bp, Artificial sequence
  DNA replication origin
tggataggtgaagggcagggtgagggtgcagggcttccctgtgatgtaagaacttttgtggggccctgaggcctggggccagaagaccttgcccgatccaccctgagaaggcctcgcaggggagacctcagtgttgcatttggggaccaatgtttagctgagtggggatgggtgggagggatggaagaggggagaggagaccaaggcatgggtctggcacccctgtcaagagccaaacgaagtaactaggttgtggggatggggtgggagggcggggacgtgggtagagttgatactgcagtgttctggtcagagcatgaaaaacctggaatgggccagtaggtggtctgtgtgccagggcccatcaggagtatcattcattcattcagcaaatccttagctgtgttctaggcagggggatccctctgaaccggatggacagatggactagagtttatgccctcttagaggtgagtttttcatacccgatgactgtaagaccaaggtggatggacttttccctagggcctcatgcaggagaggcataaactgagcagggatctgggggaagtgagcccgtttgtaaggacagcaagtgccaatgtcctgaggcagcacctggctgaggaggttggagagcaggccagagacaggcaggggctagatcacattggtctgtgggctcatgaagagaacttttttttttgagatggagtttccctctgttgccgggctggag

SEQ ID NO: 13043 - DNA, 1859 bp, Artificial sequence
  DNA replication origin
ccgcgggcgccggcagccagccaggaggacgggcccgcccgcgcgctactcggagcccagcctcgttgcggccatcgccctgccggaccgcgcctcaggctcccccaggtactggggccggggaaggaggaaacgcggccacgcgccgcggtcctctttgtttcgggcccggcgcgggctttcgcgctccgggcgcaggaacgaggcttggggagcacagagatctggagctggggcgcggggactgagttcggggagcgcggagacagagttcggggagcgcggggtacgggagctcagggcgcggggatggggtcacgggagaacccaggttagggagcgcggggacccggttgggggcgcacgggcaaggggtttggtgcgcgcgggtacggggtttgcggcgcgtggggggcgggggctcggcaggagtcccaggacaggggctggggcgcgggccagcttcgccggagtccggggacgggggcgctgactggctgggtttggggactggctggggcgcaggaccactcgagtgggacccgtggcgcccgggcgccctggactgagggcagagaccggagcagctatgtcgcagtcgctgtcgggaccgagcggactttgctccctaggactccgtctcgagactccaggtggagagcgcagctaggggcttcaatgggcaggctcaagacccttctcctactttttctaggcaagctctccagtgcgtctctttccctttccctttggtgggtgggaggcagggggtctttacgcgcttcctttttttccctgaaggacgggacctcggggtggggggatattctggggtggggggtgctgtcccaggctgggggccagctgtgtggcatgtgcctcctggcacgcgggagctgtcgctgacaagcaggaggagggagggtcccggacggcccaggggtctctgtgtcggtgctgtgcagcggcctgacatgtgagtcccgggtcctttgcttggagtgatttgagtgtctgtggcgggaagagattcaggcgttcctcaggcattctccagacagtgtcagcagatgacccgaactccagcgtggttgaaaaactcaaagcgccatcagggtgtggggccagcagagagcactactgagggtggtcacaaccccctgggaagcccccaggcttccttggggcgcattcacacactttgatcttccgggttggctttccccccatttttttcactatttgaatgcatgatcatggaggactctgaaaatatactgaaaagtatgaatgcagaactcattgtattaatattgcatggcccttctgaactaaccaaccctttgacattttagattttcttgaggctttggtctgtgcatattaattttttaaattgctttcatgctttcccttttgaatgaggtttacttgttctggtgattctggttcttctctctttggggcctgtgaggttatatttgcaaatcaatcaacaagtattaagaaaggcttttctgtgctgaggccttgagggccagggagggggtggggagtcgctgcagctggagggtggaggggcaaggccattacacagagatggaggtgcactgggtcctggtgggggtgtggtagcacagggggtggggggtgtgtacacagggaattgacaggaggaactggcagcaagcccgactcctgaccttaggaatagtaatggtgaccccgaagacaaagtaacaggcataccgattgagtgtttgcctgtgctaaatgctttgcatgcattcatttcatttcacccaaattacattccttggagggagttgggattatgattaccccattttacagacgag

SEQ ID NO: 13044 - DNA, 1146 bp, Artificial sequence
  DNA replication origin
actctgtctccgcgctccccgaactcagtccccgcgccccagctccagatctctgtgctccccaagcctcgttcctgcgcccggagcgcgaaagcccgcgccgggcccgaaacaaagaggaccgcggcgcgtggccgcgtttcctccttccccggccccagtacctgggggagcctgaggcgcggtccggcagggcgatggccgcaacgaggctgggctccgagtagcgcgcgggcgggcccgtcctcctggctggctgccggcgcccgcggcagggccccctcgaggcggcgcgggcaatcgccacggccggcccccgcgcccgcgccccgagcctggcgggtcacctggcctcatcaccctaacaatgcagcgcgcctccaggcgcccttcaccggggtcccccgccctgccgaggtgcgccctgggacctcccttcgctggccgcagagaggacctggaattatcagacccattgagcagcccaggctccaagtggtctggaggcttgcaggttccgccgggccggtgttagagtacctggggaggcgggttcggatcctggttcctgcacaaccagttcattctttcattcagcgcctgtgattaaggtgctctccgggagcaagacctaccctccctcctgtagctcatagcctagtgggagtcgcgcatacataaaggagcacagccgctccggaaagcctagggtgccgtagaagcccctgaaatacccagctaatgaagggaggaggtcagggaagtctttagaagtcacatgacttcttaaaatgcgccgggacaaatgagcagaatttaggcaagccaggggaaaccagaaaaacgatcccgagcagagagattctcagaggaggaaaggcctataggttgtccatcctgactgtccatccctgagattcagatggccctgaactcagtcgcttagcctcagtttccccatttgtgagatcgggggaatggaaaaagtttgcagaaatcagaagtgctcttcctccagggaggtcacaagagaaatttcatcagcggtttgtcctgtggtcctttccaggaaaacatcctccccgccagcctctcacagaagagacctagatttcatctgccacgtggagcaggcggtctcagaat

SEQ ID NO: 13045 - DNA, 1071 bp, Artificial sequence
  DNA replication origin
attttgtatttttagtagagacgagctttctccatgttggtcaggctggtctcaaactcctgacctcaggtgatccgcctggctcggcctcccaaagtgctgcgattacaggcgtgagccaccgcctctggccggcattattttcttttctctttttctttcttttttttttttttttgagacagagttttgctcttgttgcccaggcttcagtgaaatggcgtgatttcagctcactgcaacctctgcctcccaggttcaagcgattctcatgcctcagcctcctgagtagctggggttacaggcatgcaccaccatgcccggctaatttttgtgtttttagtagagacagggtttcaccatgttggtcaggctggtcttgacctcctgacctcatgatccaccggcttcggcctcctgaagtgctaggattacaggtgtgagccactgcgcccagccctgagaaatagttcttctaattgtcatccagttttcatctgagtcctgttgttctttggatatgtgtcctaagagagagaaagaagaagagggaaggtgagaaagggatagggagagaaggattgagaaagggggagagacagtgaggggcagggggagagaaggagaaaggagagacaggaagaaagataaaggggagagagaaaattatgccactgtaatctaaagagagaggaagagagagagagtgagagagagagagatgacagagggaaggggggagaagaagggaagatggaagaaagaaagaagtgagagagagagaaagaaagagagagaccataagagagaagaggaaagaaaaggagaaaaagagaaggagaggcagaaaggaagaaaaggcagggtcagggagagaaagaaggggagagaagaggagagagagaggggaggaaggagggagggagggagagggagtgcctgctcacacaggtgtctcatgccacttccactctggctgtcttcctgctgtcagattcttagctgctcattgctcccccacaggctgtgccagcaacgtcccaggcccaagtatgggagtgagcaggatgc

SEQ ID NO: 13046 - DNA, 828 bp, Artificial sequence
  DNA replication origin
agtaagcacctgcccccttgtgctagtgtctgaggagactcagcatgctgaaatgtcccgcagtgaaggggaaatgtggaatgagggacaccggcatgtgcgatgggcaagaaccagcttggagctggttcggccaccaggcactggctcggggcagctgagcaggcccttaactagctcgccttcctgcaggcatcttttgcacacctgctgtgtgccgggtgctggttgaagatgcaacctctgacctttagggattgcaagcttgagctcggtggggacacagatgatagataaataacacagtgtgataaccatctggtcagggatggaacctgatgaggaagaagtgactggaatcctcctgggctggaaggtgggggagcttttatgtctgcagtctctttgggtagggaagaaaatgaagcaggggaggccttcctgtaaggggagtcagtccagggtgtcagggggtgggtgggagaggaacctgggaaggctgcagggctgcacactgtgcgtggggcagtggaggctcagaatttggcaccctgggtgatgtccagccatcagagtgtttgaggtgggggcagtgcttcaatcagatgaatattttaggaagaacaggctgaaggcagccatgtggggctggggcaggatgggggcctgggaggggacataaggttggggctgagaggccctctgacgggggctgggaagggaaggaaacagagaaggaagtgatggtgaaatgaggttctgtaggaactttgggctcgtatagcaatccccactcttggcgcctgtagtcccagctacttgggaggc

SEQ ID NO: 13047 - DNA, 919 bp, Artificial sequence
  DNA replication origin
tgggtagggaagaaaatgaagcaggggaggccttcctgtaaggggagtcagtccagggtgtcagggggtgggtgggagaggaacctgggaaggctgcagggctgcacactgtgcgtggggcagtggaggctcagaatttggcaccctgggtgatgtccagccatcagagtgtttgaggtgggggcagtgcttcaatcagatgaatattttaggaagaacaggctgaaggcagccatgtggggctggggcaggatgggggcctgggaggggacataaggttggggctgagaggccctctgacgggggctgggaagggaaggaaacagagaaggaagtgatggtgaaatgaggttctgtaggaactttgggctcgtatagcaatccccactcttggcgcctgtagtcccagctacttgggaggctgaggcaggaggatggcatgaacccgggaggcagagcttgcagtgagccgagatcatgccactgcactccagcctgggcaacagagtgagactccgtctcaaaaacaacaacaaaaaaagaaatcaccactcttgtgtatgtcaaaacactctcctaaacatacatgtttccccacgtcctctgaccttccccaccaaactgtaaaaggcatcaacacaatcttagtagatagagaaggagagaagtaagcaggcatctttcgaagtcttcttatgtgctagacactgtggtggcagattccagcgttcctttaattcaactttacaacaaacctgtgcagtgtggcctgtatgcccactccacggatgaggacacaaggttaggttaagagaggtgcaagggcagagtgggagaggggccatttaagccagttctgccatgctcgaacactgggaactccaggctcagcagtcactgcatgaggaagaggggacag

SEQ ID NO: 13048 - DNA, 972 bp, Artificial sequence
  DNA replication origin
gagcctgatgcctgtctggaatcctactgatgaactgtgaggaccaggctggcagcagccagctcattaggtcttgtcctctgagaaacgcctggcagagggcggggcagccggccaggagcagcgctgggaggagggtgtttgtttttgacacagaagagctggagaacactgccattcgtgagctgacctggaaatgctggcggccccttggcaagggagctgaaaagggcagccccctctgtggaaggtggtcgaggggtggtgctgggttgtctgagaagacatgggctgggcctaggtgagactgagcagagcgtgggagcccagggaaaggttcagggccaggacagggaaggagggaggggaagagggagggaagacaggagagagaggagagggaagcaggggggaaaggagagatgggggagaagagaggggagaaggaaagaagaggagggaggaaggaaaggagaagaggagtgaaggagggagaaaggagacaggaggagaggaagaagtgagggaaggagagaagggagtagggagaagaggggagaaggggagaagggaggaaagggaagacggaggggaaaagaggaagggaggaagcaggggcaccccagaaagggccagacactctccaaagttacagcatcctcacagcatgccccctgagaaggcagcattcatgccattttgtttaagtgaagaaacaggaatgagtgccagaaatgggacctgggccgagttggtcacagccaaacagagagcaactgggtggcccatgggtgcatccagcctgtacccgtggtttggcctgtggtatttttgcatttgttttcagttgagttcgttgccagcctttaaacatcaggagactttacacaaaaccagggactgttggcttctttttccacacaggcccttctggacccacagagtccacattccccaaagtgaaagctgcct

SEQ ID NO: 13049 - DNA, 2037 bp, Artificial sequence
  DNA replication origin
ttttcattcaatagctaagaatccatttttccctcttaaggcccattgacttcatgtttctattcatatgtgttcacggctttctcatccagtgttttgttttacctagggtaaaactgcttatttataatctttccctctgtgcctttttcctgtcttcaagttcttccagttgtggagcccactctctatgctgtgctcctggagaccatccttcaagagctcttgaccccgtctggtctctgatatcctggagccagtcccctcctcttccattttggaattcatcttcagagacttcctgcaaaaacatctgtgggttcttaaaagtctaaaagaatttgttctgccaccatacttgatagtttctctaatgtatagatattccctcagacctttttttttttttttgagacggagtctccctctgtcgcccaggctggagtgcagtggcacaatctcggctcacctgcctcagcctcctgagtagctgggattacaggcatgcgccaccacgcccagctaattttttttgtattttgtttgcattttttttagtggagatagggtttcaacatattggtcaggcttgtcttgaactcctgaccttgtgattctcccttctcggcctcccaaagtgctgggattacacgcatgagccaccatgcctggccccctcagaacttttaaagctttgttctttgccttctaacatttacagttaataatggaaagtctggtgccagtaatagtcttattatttatgagtgactttttttgttcctgggagattttaccaccttttcttcattcctagtgttctgaaatttcaccctacagtgttaatgtgctgactaaataagttaaaatgtgggaagtacctgaaacagtgactggattgtagtaagtgctcaataaatagatgttatacttattgttcctggtggtaagcatggtggtgacagtggtgatggaggcggtggttataatgctaatgatggtggtggagaggatggtggcaatggtggcagtggtgatattggtagtgttggtggtggtggtgctgtactgatgatggtggtgataatggtgatgattgtagtggtgatagtggtggtggtgatagtagtgattatggtgatggtggttgtagtgataatggtaatggtagtaatggtggtagtgataatggaggtggtggtgctgatagtgaaggcaaaggtgattatgatggaggagacactaattgtggtggtggtggtggtattggcagtggtgataatggtggtattggtggtggtgatgatgttagtagtgacaacagtgatggtggtgatggtagtgatggtggtgatggtgatggtgaaggtgatggtggttatgatggcggagatggtgatggtagtgatggtagtaataacagttacattggtggtggtgatggttattgtggttggggttgtaggggtggtactactggtgatggtgatagtggtggtagtaatggtgatgatgatattggcgattgtggtgataacggtagttatgatcattgtggtgatggtggtgatggtgatggaggtagtaattgtgatggtggtggttttggtggtggtggtggtggtgatgatagaagtggtagtgctgatagtggtagtggtgacggtggcgatggtagtgatagtggtgatggtgatggtgatagtggaggcaatggtggttagatgatagagatggtgattgtggtggtggtggcagtggtgatgatcatggtattggtgttgttggtgacaatagtgatgatagtcgtggtggtaaaaatcctggtggtattgggggtgtggtgctgatggtgatgatggtggtggcggtggtggtaatggtggtgatggcattggtgattgtgatgatgatacaagtcatgatgattgtggtaatggcagtggtggtagttatggtggtggtggtaacagtggtgatggcattggtgattgtggtaatgatgcaagtaatgacggttatggtgacggtggtggt

SEQ ID NO: 13050 - DNA, 1028 bp, Artificial sequence
  DNA replication origin
gcagaagaatttttcttagtacagaacaaaatggagtctcctatgtctacttctttctacacagacagagtaacaatctgatctctcttttccccacatttcccccttttctattcgacaaaaccgccatcgtcatcatggcccgttctcaatgagctgttgcgtacacctcccagacagggtggcggccgggcagaggggctccccacttcccagatggggcggctggccggggtgggggctgccccccacctccccaacggggcggctggccggacggggcggctgccgggcggagacgctcctcacttcccagacggggcagctgccgggcggaggggctcctcacttctcagacggggcggccggtcagagacgctgctcacctcccagacggggtggcggcggggtagagacgctactcagttcccagacggggtcgcggcctggcagaggcgctcttcacatctcagacggggcggcggggcagaggtgctccccacatcccagacgatgggcagccgggcagagacgctcctcacttcctagacgggatgacggccgggaagaggtgctcctcacttcccagactgggtggcgggcagaggggctcctcacatcccagacgatgggcggccaggcagagacgctcctcacttcctagacggggtagtggcagggcagaggctgcaatctcggcactttgggaggccaaggcaggcggctcggaggtggaggttgtagcgagccgagagcacgccactgcactccagcctgggcaacattgagcactgagtgagctagactctgtctgcaatcccggcacctcgggaggccgaggctggtagatcactcgtggtcaggagctggagaccagcccggccaacacggcaaaaccccgtctccaccaaaaaatacgaaaaccagtcaggcgtggcagcacgtgcctgcaatcccaggcactgggcaggctgaggcaggagaatcaggcagggaggttgcagtgagtggagatggcagcagtacag

SEQ ID NO: 13051 - DNA, 1266 bp, Artificial sequence
  DNA replication origin
tgcatgttcagaaaagcaatatttcgccatggtacattgacatacctatcagcactgttatcacaatccagaggcgcctgtgttttttcattaacaacagcctgtgttttttcattaacaacacttaacgctgcttcactagttgttttccaaatgttctgtaagaaaaaataataaaataatgtgagagagctgcttatgaaaacccagtacatttgggaaagtaatattacttcattaacaaaatagcagtggacccctgctgtgcgcccagcactgtgctgggcaccagagaagcaacagcgaggaaagcagacagcttcatcctcccagggctcctgttctgccagaggaagccagaaagcaaacatgtagccataacagcatctgctgggggtcgtgctgcggaagaatagagctgcaggagggattcgtgcggggtcgggacggggtgggggtggggggggggggcgcggtgcttttttatacacagggtcagagaaggccgctgtgtgtgacgacatctaagcagagctggaagaggaggaatgcagagctatgccgaaggtggaggcacacctgcttcactgcaggagcagcagaagtctcgtggggctgcagccacaagtgggaaccaagagagcacaggaggtgacctcagagttacgggaggccaagtggggtcagactcaggaagtggagtttcattctgaatgagatggagggttctgagcacaagagtggcacgctccaatgcacagaagcaacagtgtggttgcggtactgaagagagcctggcaggcaggagtggcagcaggggatccactcagagggctatgaggatggcaggtcttgattgtggagtgaaggcagagggtgaacacctctgaggctatggggtggccgggctggctgctggactggaagtgagatggagcccaagagagaactcagagacaatgccactgggcttgctcggcctgtgcacactgagagcttaggtggggtgggggcattggagggcaggtgaggggtgctgggagcccatcttggtcatgaggcctctgttgaccttgcattgacctgtgcagctctccttgtgacaaaatctcaatcctggtggcaccaggaaagcagggaggtgcccacggcacaggaggaggggggacacttttggcctacgggaagctggccaccttgtttcctacacaggacgcctgtccagagacaacgccccactgtggacatgattacaaaaagcagcca

SEQ ID NO: 13052 - DNA, 1166 bp, Artificial sequence
  DNA replication origin
agtacagaacaaaatgaaaagtctcccgtgtccacctctttctacacagacatggcaaccatccgatttctcaatcctttccccgcctttcccccctttctattccacaaaaccgccattgtcatcatggcccgttctcaatgagctgttgggtacacctcccagacggggtggtggctgggcagaggggctcctcacttcccagtaggggcggccgggcagaggcgcccctcacctcccggacggggcggctggccgggcggggggctgacccctccacctccctcccggacggggcggctggctgggcggggggctgacccccccacctccctcccggacggggcggctggcctggcgggggctgacccccacctccctcccggatggggtggctgccgggcggaggggctcctcacttctcatatggggcagttgccaggcggagggtctcctcacttctcagacggggcggctgggcagagacgctcctcacctcccagacggggtcgcggccgggtagaggcgctcctcacatcccagacggggcggcggggcagaggcgctccccacatctcagacgatgggcggccgggcagagacgctcctcacttcctagatgggatggcggccgggaagaggcgctcctcacttcctagatgggatggcggccgggcagagacgctcctcactttccagactgggtagccaggcagaggggctcctcacatcccagacgatgggcggccaggcagagacgctcctcacttcccagacggggtggcggccgggcagaggctgcaatcttggcactttgggaggccaaggcaggcggctgggaggtggaggttgtagcgagccgagatcacgccactgcactccagcctgggcaccattgagcactgagtgaaccagactccatctgcaatcccggcacctcgggaggccgaggctggcggatcactcgcagttaggagctggagaccagcccggccaacacagcgaaaccccgtctccaccaaaaaaatacgaaaaccagtcaggcatggtggcgcgcgcctgcaatcgcaggcactcggcaggctgaggcaggagaatcaggcagggaggctgcagtgagccgagatggcagcagtacagtccagcttcggctcggcatcagtggg

SEQ ID NO: 13053 - DNA, 980 bp, Artificial sequence
  DNA replication origin
cgtctctgcccggccgccatcccatctaggaagtgaggagcgcctcttcccggccgccatcccatctaggaagtgaggagcgtctctgcccggccgcccatcgtctgagatgtggggagcgcctctgccccgccgccccgtctgggatgtgaggagcgcctctacccggccgcgaccccgtctgggaggtgaggagcgtctctgcccagccgccccgtctgagaagtgaggagaccctccgcctggcaactgccccatatgagaagtgaggagcccctccgcccggcagccaccccatccgggagggaggtgggggtcagcccccgccaggccagccgccccgtccgggagggaggtgggggggtcagccccccgcccagccagccgccccgtccgggagggaggtggaggggtcagccccccgcccggccagccgccccgtccgggaggtgaggggcgcctctgcccggccgcccctactgggaagtgaggagcccctctgcccagccaccaccccgtctgggaggtgtacccaacagctcattgagaacgggccatgatgacaatggcggttttgtggaatagaaaggggggaaaggcggggaaaggattgagaaatcggatggttgccatgtctgtgtagaaagaggtggacacgggagacttttcattttgttctgtactaagaaaaattattctgccttgtgatcctgttgatcagtgaccctatccccaaccctgtgctctctgaaacatgtgctgtgtccactcagggttaaatggattaagggtggtgcaagatgtgctttgttaaacagatgcttgaaggcagcatgctcgttaagagtcatcaccactccctaatctcaagtacccagggacacaaacactgcggaaggccgcagggtcctctgcataggaaaaccagagacctttgttcacttgtttatctgctgaccctccctccactattgtcctat

SEQ ID NO: 13054 - DNA, 1376 bp, Artificial sequence
  DNA replication origin
cgggtctgtgcgccggagcactcgaatgagggaaccacctgcgaggtgaatctcatatggagtctgcgagcggccccgccctgcccgggggttaccgctaggctcgggccccgcctgccctgggccggcgaactcagctgaccgcatcctgggccatcccgcagacaagccccgcccgcccccaccttcctctgcccctctggccccgcctcccccgccttcctcctctccaccctcccgcgaaggtcccgggaggctcagcccgcaattgcttctcgcctctgcagagcagctgggcaattgtaaagaaccagcagccagttctgttactcattaaacagcccctactacagaggaaatcttcttacccacgtggtcctaacctggggcggaggaaaccgggctagaagcggctctaggactaacccaaggtcacgccgccaggcaggatccccggtctgtctgtctggcggtggccccgcggctggggccagcggagagaaatgacagcgtggaaccagccctggcccggtggtcgggaatgtggagctggcactgtcactgtgtgtaccctggatctctctggacggcctcggcttcccccctggggagtttctctgggaccttcctgatcctgggagttcccgcttgctggggcaaagccaggagctcgcccgaggaggggaagtgactcattcacttcgagtcgcagctaagtggccgaactgcctcaaaccggcgctgcactctgacccccaggggccggacctgcctgcccccggccggtgcccactctccgtctcaggcgtctttcctggtcctctccctgcttcccgaacgcgcactctggtgagagcacagagcctgggaaagaagacgacctagaggcccgggcagcccagcacctctgttacttgcttcctaaagggaactccagttcctgagaaaacatggggttgggccgggagtggtggctcacgcctgtaatcccagcactttggaaggccgaggcggatggatcacctgaggtcaggagttcgagaccagcctgcccaacatggtgaaaccccgtcactactaaaaatacaaaaaattagctggacgtggtgtcgcgtgcctgtaatcccaggtactaggcaggccgaggcaggagaattgcttgaacccagcgaaggatgcagtgagccgagatcgcgccattgcactccatactgggtgacaagagtgaaacacacaaacaaatcaaggaaggaattaagggttttattgaaaatgaaagtacggccaggcgcagtggctcacacctgtaatcccagcactttgggaggccgaggcgggtggattacaaagtcaggagttcaagaccagcctaacca

SEQ ID NO: 13055 - DNA, 1324 bp, Artificial sequence
  DNA replication origin
cgtttgtcgccggtgtcgcagtgcgaggatggcgccgcgggtgtagcggctctctgcgcaggccgagtggtgagtcgcccgcggcccggctcccgccgttctctcttcccaggggtctagcccgtcccctgccttggccacgtgcccatttacctgtaggggcggtgacggaggctctggtgcaccttggctgtgagctgcagaggagcagagagcggcccggcgcggctgcgcggggaggcgggcgcgcggccgggaggttctggggctggtgtgtgcggagcgaggtgggcgtgggggaagcgcgcgggcgggatgtgcttcctcgggtccaccccgtgcctacctctcccacgtcccggcgacggagcgcgcggggctctgggcggggagcccaccgggccgaggcgcagcgagggtgaagccagagccggcagggtcaggtcccgcagggcgcaggcgggcgcttctcgcagcccaaacccgggcggggagtgcgggaacccctagaactatgctgggagccccagataagaggaaggagatggtgacttaagtgacgaagtgatgttttgtccccaccgccttttaaagggagaagggggtaaaatttcatttggaggatgattgttacgcgagctttcagagttcagatggcgtcaagtggccatcgagtcaacatttaacaaaatgttaccgcataaaatattgtcatcgagttatctggcagctccgcagagaaacttcacaggcatatgcgttatatgacataatttgcatggggaagggggtcccttcacgattcttttatatggcaacctgttcttggacctggcagggcccagagaagcgaggaactccgcagctcgtcgacacgtctcgtctcctgtcccaattcagggcttggtgaggtgactcgcggtcgcgggtgactcgccggcaggacactgcctggaacgcctggagcgcctcccactgcagacgtctgtccgcctccagccgctctcctctgacggtcagtttcaaagaaacacagtctgggatccggagtagaaagaggccgtttcccgtgaaggccatagaggcagtttccaggcgcctgggtgacctgtctctgcacttccctctctgcttctccatccctgtttcctttccccactgtcccctgcctggcctttctttggctcattttctgccttcctggggtcttctggttaaaaagaccattggttccattcattggctgtaaccgcgggtctttaaaaaactttgtgacttccttgaatagaaagaatgtcttactctggatttctacaagcgctgc

SEQ ID NO: 13056 - DNA, 875 bp, Artificial sequence
  DNA replication origin
tcgcgtcagtgcccgcgtcgccctcagtcgctcatcctccggcctcgtccccgcttctccgagaccaagcgcgccccgggggccaccctggcgccgcctcgctcctctccgcggaggggttcggggagctctccagacccggcagccggaatgtctgggcagccgtggcgcgtcggagggaaaagagaagcccggagcgcggccggcgcgcgagtggcaccgaggccagcatgggagctagcgcgcccgcctcccgcctccccctgccgcagccgcctccgcccggctcccgttccgctccctcctctgctgcccccgctctggaggccccgccttggcccgcgctgccccgggggaggccctcgcgctgcccccggagaggccctaccgccgcacccgctccctttgctgcgccggaccaacctgtcactcgtccgcgcggccgcgtccccacctccgcagccggccgcagaccctgccagggctgccattctccagtcgagtcattcactttgcgctggacctttcatcttggcttttctcttttctttaatttcttccttcctaattggccccctctggctttcctctttgtggacagcttgtttcagctactgtgttcagattgggattcgaaggccgtgttagtttagcagactgttgagactttctcgtctttgcattcagaaacccagagaaatagacgtttacgagtaagaaacgtaaaaatctcaagcgcgaactttctgaatctctgccaatctctccccgctcccatcttcctctttctgcctgctctctcttctactacaaatagaaacctgtttcctaactttgctagaatcctcaactgttaagcagaggcccggttgttt

SEQ ID NO: 13057 - DNA, 1053 bp, Artificial sequence
  DNA replication origin
tgtccccgcgcggccggacgcgctccagctgggttcagccgctcagctgctccggaggaaccccctcccccgcccaagtttgtgaatatgggcgcttcgcccagtgttgaggtcggcagggaccgggcagggggtcagcagggccgggcacgtccggagccctcagggaggagggctgagggggaggggacagacgcaccggagtgcgcagagtgggggcgttcggggagtgaggcggagagaggctggattgccggtgtcctgcggcgtctcgggctctcccagcccctttgggcggcagaaactttggaatccagaaaggctggccgggatccagcgagtaggagggtctcgcgcccactctgcgccctggggccccagcctcccgcactgcacaccttggtgctgcccgggcgcttctgctccgcagccaggacactacaagactgagcgctgcggccggcgacctggctcccaaggctcggaggggcgggccggcagaggagctgaagccccgggaatccccgacccggccctctggcaaggggccgagggcatcctttcatgcagcggggcttagagagcggggagggggcgtctgctcccgagacgggagtcttttaagaagttgttagaaatgaatcgtggagtcctaggagaagctttgtttaacctccccgcattttcccagcacaaccccctaaagcaaatgaggaagagtttccctcttatcttcctgtacattcgtccgtctctaactccactgctgaattctccatttaataaccttcgggaaatgtggccaggacctagggagggacaccctgggtgcctgaattacgtggttcaaggcagagctttgcaggggggcgcgggcctggctcgctgcgttccctgggctccgcaagccgcccttggccatctccaacactaatcacgactacatcagaaacacgccggccggtgtcgttcttggatttcgcttccaatgtatcgctccacagtttgtgatgtctaagaaccccggccgtgcaccgacgctgggcatgctgc

SEQ ID NO: 13058 - DNA, 1537 bp, Artificial sequence
  DNA replication origin
tgggtgcaaagagtccctttctgtgtgagtgagcactgctgtgtcttctccaccagagcttaaaactccatggaaagggacttcatcaaacggagaaaccacagtgggtgtcctgttctaatttcagcctacttttgaataggcttagcttcaagaagagattcagggccagtgatgggaacccacagtgcctgtccactcctggctcgggctgtggtccagcacttcctgggtaattggcagctgatgtgttgaaggagctttaacaagacaagcaaaccctgacttcaggcagtgtccagacgggcatccatttgggtcactctacagttgggggtgcgagcagggctgttggagcccggccagctttgggcaaaggcagactgatgggtgcctttggtcatcttcacttcctgcttgtagtgggcattgtcactgccatctcaaagaatgccaaacgggagcactgtagttctgttttcccctggcctgtgtgtgtgtgtgtgtgtgtgtgagagagagtgtgtgggtgtgtaagacagtgtgtatgagtgtgtgtgagtgtgggtgtgagacagtgtgagtgtatgtgtaagtgtgagagtgtgtgagtgtgggcatgtgcgacacccacacctacttatccacactcttatgagtggtgggtgtgtgagtgagtgtgtgggtgtgagtgtggatgtgtgggtatgagagtctgtgagtgtgggtgtgtgagggtgtgtgtgtgtgagaggatgtatgggtgtggggtgtgtgtggatgtgtgtgtggatgtgggtgtgggggtgtgagagagggtgtgtatgagtgtgggtgagtgtgactgtgtgggtgcgtgtgagagtggatatgtgggtatgagtgtgtgtgagcatgtgtgtgagcgtgtgtgtggggggtgtgagggtgtgtgtggagtgagtgtgggtgtgagagtgtgtgtggcctgcatgtgtgagaatatgagtgtgggtgcatgtgtgtgcatgagtgtgtgtgagcatgtgtgtgtgaggtgtgggtgcatgcttgaaagtgtgtcagtgtgagcgtgtgggtgcatgtgtgagtgtgggtgtatgtgtgggtgcgtgagtgtgtgagagtgtaggtttgggtgtgagagagagattgagagagtgtagtgtgtgtgtgaatggatgtatgagaatgtgagtgtggctgtatgtgtgtgttagcatgtgtgtgggtgcatgtgtgagtgtgggtgtgtgtgtgtgagtgtgggagagtgtgtgaaagagtgtaggtgtgggagtgggtgtgtgtgagcgggtgtgtgtgagagtgtgagtgtgagcgggtgtgtgagtgtgggtgtaggtgtgtgtgggtgcgtgtgagtgtatatgtggctgtgtgtgtgtgtgagtgtgagtgtgtgtatgaagtaggcatagtggtttcattgcattaacatttccccccattggccacagtccccaccactccttattacacacttagttcatggcctcattttcttacttgactg

SEQ ID NO: 13059 - DNA, 2287 bp, Artificial sequence
  DNA replication origin
ggacacggagagggtgcgtcgtcccgtccccgccccgtcgccgagtcccccggctcgcgcggcgcgcgtctcagccgcaactccgggccagaggggccgcgcacgaaaactttgcaatcgcgccgggctccggctcagcccccaaaggccgccggggcggcggcgggtgcgggccgtacctgctggcgccgccgccggctgcagcccgctcgcccgcgccgggcccgctcggcgcgccgccgccacccccgcgcgcaccgcgcccgggccctcccctcgccgccgcgcttcctcattccagcgcagcatcgcgccgcggccccgcacgggatgcggcggccggcgctgtgtccgcgggccgggcagcccggctcggccgcggcgctgcgggacccgcgcgtaacccgtgggggcgcggcgcgggcgacacgtgcgggccgccaggagggggagggggacgcgcgccgccgggcccgccaccctgcacccggggccgctggtcggtcggggcaccctcacgctcgccccgctggcgagactggagggactcgggacatcgtaaagcactttccccagtgtctgggagcgcccgctgtacgctcagcttcacgtccctggaactggggccccttggctcccgggttcaggctccggccccaggatgcgagtgcccacccgagggggtgggaaaagttgatcctccgcaagggaggggaaggtgcaattcattttcccagacaaccaatggaatacctctcgtctctcttccctcccacctgctcacggcagaagttaggatggcgccttccatgttggcctgggtgcacacacaagtgcgtgcggaagggtggctgcaggcggaggtgacagcgaagcaatcccgcagcccgctcgacggctctttgcgtctcagacctctccctggcgtgtaagacaccgtgtgtctccgtaaaacgggaatgccacatctgacagcgcaccccttcgccctacggggagcccctcactctaattagccgggctccacccgagcaggagccagcaatgtgttcagcttgagcaggagagaaaaagtcatgaattccacaaatgcagcctgggctcccgccaggcgctaggggaggggacccagaggagtgagatgcgcctcctgcccttccagacttgtaggagccaccaggaaggcacagaataaaaatcccgggcacccctgtgaggaggagcgccctgtgaagagggccgagaacgtgctcctgcttgggcgcggtggttcgggaaggcgtgaagacccatagggagagcgatgaaagaccaagggagcctcctcagggtaggacatgcaggcgaagaaggcacaggccttccgggtggaggacacagccgggcaagggaataagcaggaaatgtcccttcagggcagttgagtgtggctggagaccatcgctgccggggaaggtcttggcctggcccaggaggcctccaagtcgggggccagggcacaccagagacaggatctgcctctgctgcctctgggagaaggccctttacccgtgaatcacaaacagcgtctatccacattctccctgagcgcatatgcagctcttactacagtactcagtgtgtcctgaagggcattccgctgggcaagtctgagccagttaactcactgctacagcccagagaaggggaaggtagtgaaaggtccattgatttaccttctagtcctctcctccactgcgtgaccttgggcaggttatccaaactcctgagcatcatcttccttgtctataaaaagaatacatgccaccaatcctaaagactccttacctggattaaatgaggcaataaacataaggtacaaggcccagagggaggccaacaatgttgtaaaggggacacgggacacctctagttcttggatgcagaagtacctttagccgctggtacgtctctctaaacctgtgccttggtcttcaggagtggaccagtggaccgaaacataggcatctcaccaaggtgtagcccactgaggcaggagcatgtggggctaagagcccagatagtttgggcttatgaatctgactgaggtccttaatctctcaaagcctgaatttccccatctgtaaattggtggtgataatataaccctcctggtggggttgtttgtgggttaaggagatcacatatggaagaccttgccacatgcctgacagagaggagtactttccaagtaagaacagttattccctgctagcccaaccaatgtcccaatgagatgaggagtgca

SEQ ID NO: 13060 - DNA, 990 bp, Artificial sequence
  DNA replication origin
ccagcgtgcgtcaccccaaagtttgcggggtggcagggcgcgcgctctggccacccgccgctctgggcggcagctggtggcaacgcaagggcgcggcgggggcggccggcgcggagggggccaggtacggggcccgcgggcggcgctgtgcgcgcggggcagccggtcggccgggagcgcgaaagcctggtctgagccggctgggggcggggagtgtggcggagaaatggggaacaatgcgagtgagcaacttcaggaagtcattgtgaaagaaagctgggaagagctccgcggccaagttagcaggacactctaacaagtgactgcgcggcccgcgcccggggcggtgactgcggcaagccccctgggtccccgcgcggcgcatcccagcctgggcgggacgctcggccgcggcgaggcgggcaagcctggcagggcagagggagccccggctccgaggttgctcttcgcacccgaggatcagtcttggccccaaagcgcgacgcacaaatccacgtgagtgttttcaaattgaatttcaataggaaaacttggggtaactggtgaatttaaaaaaaaaaaaacacagtaaagaaaagcggtaaggttggtagaccctggtgtcgctcaggtccgcctctcttttctgaggacagtgagagagttcacttctgtcaagcgtctgttgctctgcactgtgccagcaggtgcaggaccaggccgacatgggacacttctgagcagccccgctgtcaccaggagaggagttctagctcccaaccatatttaaatttatgtagacctacatatacccacggaagtcagcctttataaagtcgtgtgtaaagagttttccttatatttgagccgggagctttctttttatactataaatatgatgagatcgagtctgaacttaatttctgcaagagaggaattatcccggctttgaaaagttagtccttttgctgaccgcaggtttgacgctca

SEQ ID NO: 13061 - DNA, 1268 bp, Artificial sequence
  DNA replication origin
cagcatgaacatatccaaacccagatgatcccggttggaaagcctcccctttttcaaatttcccaaacatgaaatatagtattacaaaatgatctgcccacctctaagcttttccatgtttgataagagaggccatcatgtaacaggttcattgcttcgcatttcaaagtaaattttaatttacagtcttccagattcgttttgggtaggatttttatgtctgctaatttgtcaaatagttcaaaatgtttagggatcatgatgtcttccacagaacttcatgacagttttgattttagattaaagtaagtgacttttgtgctatatcagataacatcttgtactaggttttggaatagaccggtgagatcaggcagcagaagtttaataactttccttggaaaactgaaattgatgtgtgtgtgtttgtgtatatgtgcatgtggtacatgtgttgtgtgtgtgcaggtgtctgtatatatgtggggggtatatgtggtgtgtgatgtatgtatatgtatgtgtgtggcatgtgtgtgtttgtatctatgtacatgtggtatgtttatgcatgtagttgtatgttgtgtgtgtcatatgtttgtgtgtgcatgtatgtgtgtggtgtgtgtgtgtatgtgtagtgtatatgtgtatgctgtgtatatgtatatggggtgtgtatgtgtgtggtgtgtgtatatgaatgggatgtgtagtgtatgtgtgtgctgtgtatatgtgtatgggatgtgtggtgtgcatatgtagtgtgtatatgtgtgtgagatgtgtagtgtgtgtgtggtctgtatatgtgtatgggatgtgtggtgtgcagtgtgtatatgtgcatgggatatgcggtgtgtatgtatggtgtgttcatgtgatgtgtatatgtgtgtgggatgcatgatgtgtggtggatatgtgtgtttgggatatgtggtgtgtatgtgtggggtatgtgtgtgtatgggatgtgtaatgtgtggtgtgtgtgtgtgtatgggatgtgtggtgtatggtgtatatatgtgtataggatatatggtgtgtatgtgtggtgtgtgtgcaagtaatatgtatatgtgtgcaggatatgtggagtgtggtgtatatgtgtgtattggatgtgtggtgtgtatgtgtagtgtgtgtggtgtgcatgtgtgcatgggatgtgtggtgtgtatgggatatatggtgtgtggtgtgtatatgtttatgggatgtgtggtatgtatgtgtgatgtgtatgtgta

SEQ ID NO: 13062 - DNA, 1541 bp, Artificial sequence
  DNA replication origin
tgagccactggggtgtttgctgtgcctgggagcaggccatgtgggtaggtaggcctggctctattgattcctagctgttggccctggcaggtggctctgctgttccttcattgtgaggtgagggcgccccctcacccgatcctggctgtcatgtctgtgaagcctgacccagcagggcacagcatagagggctgtccagagcagctgcactgatatcatcatcatctgcattttggcctgctccatgtctgacattcctgttaagcaggtggctttagggagaagcattgacacactgacccctacaaaaagcttacagttcctcagtgataaaacacagggtgcagcccgtggccaggctgggtccccggagaagactcagttggcaaacgccatgtggttgccacagctggaagcactgggggaggaggagccctgcctggccccggcgggggcagggggagggtgcagggggagggtgcagagggaggggatgagtcattttgccacaggcacgcatgtgctggtgaaggggcgtgcgtggggaccatgggtcacatctcggctgtccccttctttaggaaggggtggaggtggcaggagtggggcgggttgcaggctcagaggcacaggaggcccgcactcgctctgaggctgaggaataaagggtgtggtgctggaaagggaaccctcaaacctgctgacctgggaatagcccttcagggggcctgtcagatagctcgcccttgggacaggcggtggcgagaggccaggaggcctttggtgcaggaggggaagaaaggcagggaggggcgtctcagagggcagagaagggcatctcagcagccccgtggtgtttgcccctttgaggcggttccatccgttggctgcattgtccacttcggtgactggggccacagtgattctgctgaatgcaatgggaactgtacccagagtaggggttcgcatgagaccaagggatggtgtctagccacggaacagtctggaaggtagggatgtaagtcatagggcaagttccatctgtgggacactatcagctcaggagggacagccaacaaaacagcaggaccacaggggccctggggagtaaatgcctttaattgtctaagagaggagcaaagaaggagacagagtgagttgtgtgattcgggtaaaatttctagaaagaaacatggcgagaggagttgctggggacaggataatgccctagaaagaggtgtctgggggttggcggtgggtttcccacaagcggctcggtaggattggggcaaaaccaaccatgtgagagggaccgggagcggcacaggagaggaggcagcagctgtgggctgtcaggcatcaggaaccaagggaagaaagaagacaaggagctggttggggtcgggggtcacaggactaggggatggtatttacagggtagtctttttaggagaatgtttaaatgtgattgaagtccagtaagtgggagctagcagaatagaaaggattaaaatctaactagcagccccagggtaggccgg

SEQ ID NO: 13063 - DNA, 925 bp, Artificial sequence
  DNA replication origin
gcccatttcttaactcgttgcctccctcccactccgtgtgtcctgagctaacttctccaagtcttcgcgtcctagctgttaatgagtttatgaaatgaggccctctgaatagcccacactacacatcagggaggaccatctccaacttgggcattccacagatgtgtgtgcaaaccccgagggagtctccagagaaattatagagggaaaatccaagatctgtccagggatgttgcaatttataaacagcaggaggaagatgcaccgaaactcacgtgccacggtgcacagcagccctgggtactgggaagcagcacatgttcttaggaagactaagccatgccaactggagggaggggtggcaggggggttgtgagaagtcacagaagggtgacattcaaaatgagaagcaggaagagggaatctcaacaagtggaggtggggggctacagcagggtcagcagtggacttggcggtgggggggtggtggggtggtggctggctcagagaatcatggggacagtcatgcccaggatgcagggcctggttccagaggccttggaagctgagatgaagtccccaggcaacaggaactgtgagaggtccctgcttgtgggggtcctgtggtgggaggtggtttaagggaactggtctggggttgggatggagatgcctagaagaaggagtcggttataacactccacaggcagagagagagaagtgggagaccaccagggtgggctggggaagtaggaggatcacaagtggaatcacacacccatggccctccgaagcccggtgagtcggcagtcaggggtgcagtcatcctgctctcggttactctaggttttagagcaccaccagcccagcgaccacgagaccccagcttccagaagaccggacagtcgggccttctgccaccccg

SEQ ID NO: 13064 - DNA, 1311 bp, Artificial sequence
  DNA replication origin
cagaggcgcccctcacctcccggacggggcggcaggctgggccaggggctgaccccccacctccctcccggacggggcggctggccgggccaggggctgacccccccacctccttcccggacggggcggctggccaggcagaggggctcctcacttcccagtaggggcggccgggcagaggtgcccctcacctcccggatggggcggctggccgggcggggggctgaccccccccacctccttcccggacggggcagctggccgggcagaggggatcctcacttcccagtaggggcagccgggcagaggcgcccctcacctcccagatggggcggctggccgggcagggggctgacccccccacctccctcctggatggggcggctggccgggcggggggctgacccccccacctccctcccggacggggcggctggccgggccgggggctgattcccccacctccctcccggacggggcggctggcctggcgggggctgacccccacctccctcccggatggggtggctgccgggcagagacgctcctcacttcccagacggggtggttgccaggcggagggtctcctcacttctcagacggggcagctgggcagagacgctcctcacctcccagacggggtcgcggccgggtagaggcgctcctcacatcccagacggggcggcggggcagaggcgctccccacatctcagacaatgggcggccgggcagagacgctcctcacttcctagatgggatggcggccgggaagaggcgctcctcacttcctagataggatggcggccgggcagagacgctcctcactttccagactgggtagccaggcagaggggctcctcacgtcccagacgatgggcggccaggcagagacgctccgcacttcccaaccggggtggcggccgggcagaggctgtaatctcggcactttgggaggccaaggcaggcggctgggaggtggaggttgtagcgagccgagatcactccactgcactccagcctgggcaccattgagcactgagtgaaccagactccgtctgcaatcccggcacctcgggaggccgaggctggcggatcactcgcagtttggagctggagaccagcccggccaacacagcgaaaccccgtctccaccaaaaaaatacgaaaaccagtcaggcgtggtggtgcgcgcctgcaatcgcaggcactcggcaggctgaggcaggagaatcaggcagggaggctgcagtgagccgagatggcagcagtacagtccagcttcggctgggcatcagtgggagaccgtggaaa

SEQ ID NO: 13065 - DNA, 975 bp, Artificial sequence
  DNA replication origin
gatcccctctgcccggccagctgccccgtccgggaaggaggtggggggggtcagccccccgcccggccagccgccccatccgggaggtgaggggcacctctgcccggccgcccctactgggaagtgaggagcccctctgcctggccagccgccccgtccgggaaggaggtgggggggtcagcccctggcccggccagccgccccgtccgggagggaggtggggggtcagcccctggcccagcctgccgccccgtccgggaggtgaggggcgcctctgcccggccgcccctactgggaagtgaggagcccctctgcccggccagccgccccgtccaggaaggaggtgggagggtcagccccccgcccggccagccgccccatccgggaggaaggtgggggggtcagccccctgcccggccagccgccccgtccggccagccacccggtccaggaggtgaggggcgcctctgcccggccgcccctactgggaagtgaggagcccctctgcccagccaccaccccgtctgggaggtgtacccaacagctcattgagaacgggccatgatgacaatggcggttttgtggaacagaaaggggggaaaggcggggaaaggattgagaaatcggatggttgccatgtctgtgtagaaagaggtagacacaggagacttttcattttgttctgtactaagaaaaattcttctgcctcgtgatcctgttgatcagtgaccctacccccaaccctgtgctctctgaaacatgtgctgtgtccactcagggttaaatggattaagggtggtgcaagatgtgctttgttaaacagatgcttgaaggcagcatgctcgttaagagtcatcaccactccctaatctcaagtacccagggacacaaacactgcggaaggccgcagggtcctctgcataggaaaaccagagacctttgttcacttgtttatctgctgaccctccctccact

SEQ ID NO: 13066 - DNA, 1824 bp, Artificial sequence
  DNA replication origin
actgcaagctccgcctcctgggttcacgccattcccctgccttagcctcctgagtagctgggactacaggcgcccgccaccacacccgtctaattttttgtatttttagtagagacggggtttcaccgtgttagccagaatggtctcagtctcctgacctcgtgatctgcataccttgacctcccaaagtgctgggattacaggcatgagccactgctcctggcctcaagttatatttaaagtatataaatataatttgactataacttgcattgtcactgatcctcttgtggtactttaaagattgtgttgtcaaaattattaagtgggtagtttagagattctgatcttctgatttctcagactgttaagttactctagaactcatgatcgattaaggtactgctacatgttgactattctaacaaattaatattatgttaatacatgtggatattttggtgtctgaatagttgcctttttgttgaagttggggatggaggaagtggtgaggaggggtgaaggtaggggaggaagaggtagaggtgatggtagaggtggtggtggagggggaggaggatatagagataatgaagagtgtggaggtggatgtgttggtagcaatggaggtgttggagatgtaagaggtgaagggtggtgggaaggagcagaggtgatggaatgggtggaagtggtgatgaaggggtaggtagtggaggaggaggaggagctagaggtgagggtggaggtggtagaggaagtggacgaggtggaggtgatggtggagatggtggaagtgatggtggaggtggtagaggagatggaggaggtggaggtgagggatagagatggtggaggaggtggaggtgatgtgatagtagaggaggtggaggtgaggatggaggaggtggaggtgacaatggaggaggtggaggtggtggtggaggaggtggaggtgatgggggaggtggaggtgatggtggaggaggtggaggtgatggtggagatggtagaggaggtggaggtgaggatggagatggtggaggaggtggaggtgatagaggtagcagaggaggtggaggtgatggtggagatagtagaggagatggtggagatggtagaggagttggttgaagtgctggaggtgatgatggaggtggtaatgaaatgatggtgggggtggtagaggagatggaggtggcggtggaggaggtggagaaggtagaggaggagctgatgtggcaggagaagtgatggagatggaaggaggtggtgggaaggggtggagtgctggtggaaatgtcgggaggggaggtagtgaccgcagaggaggaggaggcaggggcagtagtggcagtagtaaaaatagcagctgagatttactgagccgtgctttccatgtgtgatcacactaaatcttcaatagtccttggaggttatactcacacagggtggtttaatgtcttccccaaggtcatgtagctactcttctgtagaaattctagagctagtgctgtccccctttcggccaaaatgcctcattgatgtgggaataccagatgcaaaaacaggaacaaaactgacttggcaaaggcattttattttgggaaaaccatttgtcaagattgacaggctctgggcaggaggtttctttgtagggtgatggaaatgttctaaaattagattgtggtgatggttgtacagatccttaattatactaacattcattggtttgtacacttccaacagatgaaatttatgttatgtaatttatatctcaatagagctgtttaaaatgtaaatgattgatagactcctcccctt

SEQ ID NO: 13067 - DNA, 1507 bp, Artificial sequence
  DNA replication origin
gccacctttgtggggttgactgcagaggtggaagaagccactgtgtcagaccgcagaaaagtctcatatctggagtctggaaggaaagccaagttctcccagtcagtaacctgctctggactttggataagttacataatttctccacactttggtttctccccgaatctcagggtttgattctgtgcttccatttcccattctgtgccttgcgatgttcactatgtgacatcttctctgaggggtgcgcagttagagtcaaaagcgctaacaccttcaatgtttcttgcagtagccaggccatatgtggtcagcccggactgtgagaaaagaaagccttgtgttaccctttgtgttgtgttgaaaactgctcttggctgctttcagaaccagccttaactctgcttttgtttgatcgacttaaacatattggaattttgtggtcatgaccaccgtggaacctctccttttggagtgcatatctgcactttttccagcctcctcctccagtgaccttcaggggcctgacctggcctccgagcagttggactagggtagcttttccactctttgaaccccagactgagatggggttttcccagcgccctgccccttaacgtgtgtgaatgcagtataggatctcagtttcagaatccattgtccactgttgactgttaggttcttactgctgtctacaatgtctagcttttcctaccatgttctctgctagaggggagtagaaaatctgcttactgcttactgtggccttgtaaacggcagtgaatatctccaaacgttctgttttgcttccatcattgcaggctcgtgtgtatgtctgtggtgtatgtgtgtgcgggggtgggggagtatgtgtgatgtgtgtgtgtggtgtatgtgtgtgtgtggtgtgtatgtatgtgtgtggtgtgtatgtatgtgagtgggtgggtgggatgtgtgtggtgtgtgtgtgaggtgtgtgtggggtgtgtgtgtgtgtgaagtgactagcacatagcagatgcttggtatgtataggatctgttctttccctcgctgactctcagtttaaatgggaccctactttgtcctcgttgttcagtaacgttatgcctgtggcttccagaaagagcctctcccttcctggttcttgctctgacattttggggagaagggtgagacgagagtgatcctggaagagtagaactggccggccctgcaggtggaaggttgctcgagcaggcggcatctctagcttgccgcggccgcgatgtcccccgcctgtctgcgaatgcggcgtagcgggtagacatggagggctttcggcatcgtcagagtggccagtgtgcgcgtccttgcccatcaggcgggggggctgtgggggaggagaggaggcagtggagggaacaaggggttcttcagggttgccatgagaaccagggatccggggattgggcagcagagggcccccgccgggcgttggggcgtggccgcgtcacatgggttt

SEQ ID NO: 13068 - DNA, 1198 bp, Artificial sequence
  DNA replication origin
ggcccgggacggccaggcgggtccccgcgccgtcattgtctgagcgctgggcggccgcggccggggacgccgggccccgcggaggcgcggcgggcggaagggcgtcgcctccgggccgggggctccggcgccccgggcccgcagcgggcggtgctcggaggcgggactggggctgcgggcgcgcggcggaggcggaggcagccgggcgccccgcggggctctccgcgctgcgttcccgacccctggggggaggtgtggagtccaagcggtgcattcttgaaccatcttgtcagacgccggcggctcgcgggctgtggcgggggctgcggtcaaggccgcgctcctgggggccgccgcctgggagggtgggcgcccaggcgtccctgcagccccgggtgctccgactgcgcggcggggccgcggcgcgcgcgcccgggcgtccgggcgtccgggacagtggtgccagacactcccaaatcccgagccggcccagcctcgtacggaggaccttttttttggttctgttggtgacccgttagccgccgctggggcctaacaccaagttgagggctcgcggattagccgcccgccagccgtggaaatgtgataagagcggtaccgtttgcagaaggaaatttctgatgcaactcttcgcctttgctgattgcctctccaaacgcctgcctgacgactgccttggagcatgtgcgttatggaaattagggtatcctttactttttattgtgtgcgtcttttcttgggattggaagaaacgcgaactttttatggtttgctttcaccgaaacgttgggtaatgtaagagagccacaggtgatttttacagggtcctggatctttacaatgcgtttgaaagaatattttcttgcaaacttggtgcccagtttcattcaagagatgggggggaggggggaaagaccaaaacaaggagagctcgtgagtaaatatgcgttattgcacaacttgctcgttgctgctgtttaaaaggccaggcctagaacactttgtttctgaaaatgctgattcagccgtttggagcccccgagtttcagaaatggtggtctatttaaagtttcaagcagttttaccaagaacacatgttgttagcgcagcaaccggagttgactagggtttacaacacaatgctggcaatattttaacgagctgaccccgagttcct

SEQ ID NO: 13069 - DNA, 1505 bp, Artificial sequence
  DNA replication origin
ggtccccgcggggcgaggccggcgctcaagactgtcccgggcgccccgcgccgccggcgctgccgccacccaggggctgcgcggaaactttgggctccaccgggtctccgagcgccgagcccgcccggccgcagctcgcttccctctctgcctcctcccgacctccccaccccctcgatgggctttaaactcgcccggccccgcccgccctccccgcctctgccgccgccgccgcctccgcctccgcctcctcccccggctacttttcctgctcctcctcccgccgccgccgcccggaccgctcggcggccgccagcgcgggaggagccggggcctgggcgcagggcgtggcgcgggggcgcgggccgcgggccggacggccggggggccagaagctcccggaggttcctgccccgggctgctgagcgggttcccccctcctgctgtcctcgggactcgggcgcgggaccacgaccgccgcggctcaggaggcttcgccagtgaaaggacaaattggacctgtcccgaaagacaatttataagcgaactgtttgaaacgcacaaagtattaactgcgcagtccagatcctttatcctgggcgcagcaggacgggacggaagagctggggctgccccgtactctgtcgtgggctgaaggcacccggcctgggaaaaggaaacctgggtttgctcacagccagccaggtctggggcctcacctctttgagcctcagtttgccccatctgcgtatgagtatcgaagtgcgggtggagtgagaggcccttcattttttcttaatgctgccaagcctggtgtccttatctttacaatgggctaataacgcccgcctgagggttggtgtcctggggattaaatgaggtcatactgggaacataaagtgactgcgaaaaagactcccctaccccccaattgacggaagccattgtcgttagtgtgattcttaatatctctaccgagtcaaaactctaatacacatagcataacgataagtatgtcttttcctgggtcttggcgttctaaacgcagctgcgacaatatcttgccttcatagagcgtgcactttgtgcaaaaccttcatgaatccttgcatgtaacccccactgtggccctctaggtgttactgttagagtcccactgtgtacggactgggaaactgaatcttggagaggttaagtgacttgctgaaagtcaagtagctggtaagtgcagagcaaggattggaagccatgtacggtattgtaccaaagcccctcgtaggcacctgcttctagcaggagttattccaccttagacagatgttactcatggaaaggtcatccttccctgtaactgaaacagacctccctaaatttttgcctattggtccaagctcagaaacacgtaagatgaaaatcaagagaggatgatatcaaaggattttagattcctagaagaaaggaacacagaggactcctgttgcagacaaaggactcaaaagaaaatt

SEQ ID NO: 13070 - DNA, 1210 bp, Artificial sequence
  DNA replication origin
ttttcttagtacagaacaaaatgaaaagtctcccatgtctacttctttctacacagacacggcaaccatccgatttctcagtcttttccccacctttccccgctttccattgcacaaaaccgccactgtcatcatggcccgttctcaatgagccgctgggcacgcctcccagatggggtggtggccgggcagaggggctcctcacttcccagcaggggcagccgggcagaggcgcccctcacctcccggatggggtggctggccgggcggggggctgaccccccccacctccctcccggacggggcggctggccgggcggggggctgaccccccccacctccctcccagacggggcggctggcctggcggggggctgaccccctacctccctcctggacggggtggctgccgggcggagacgctcctcacttcccagacggggtggctgccgggcggaggggctcctcacttctcagacggggcggctgccgggcggaggggctcctcacttctcagacggggcggttgccaggcagagggtctcctctcttctcagacggggcggccaggcagagacgctcctcacctcccagacggggtcacggccgggcagaggcgctcctcacattccagacggggcggcggggcagaggcgctccccacatctcagacaatgggcggccaggcagagatgctcctcacttcctagatgggatggcggccgggaagaggctctcctcacttcctagatgggatggcggccaggcagagacgctcctcactttccagactgggcagccaggcagaggggctcctcacatcccagacgatgggcggccaggcagagacgctcctcacttcccagacggggtggtggccgggcagaggctgcaatctcggcactttgggaggccaaggcaggcggctgggaggtggaggttgtagcgagctgagatcacgtcactgcactccagcctgggcaccattgagcactgagtgaacgagactccgtctgcaatcccggcacctcgggaggccgaggctggcggatcactcgcggttaggagctggagaccagcccggccaacacagtgaaaccccgtctccaccaaaaaaatacgaaaaccagtcaggtgtggtggcgcttgcctgcaatcgcaggcactcggcaggctgaggcaggagaatcaggcagggaggttgcagtga

SEQ ID NO: 13071 - DNA, 791 bp, Artificial sequence
  DNA replication origin
ggccgtgaccccgtctgggaggtgaggagcgtctctgcctggccgccccgtctgagaagagaggagaccctctgcctggcaaccgccccgtctgagaagtgaggagcccctccgcccggcagccgccccgtctgagaagtgaggagcccctccgcccggcagccaccccgtctgggaagtgaggagcgtctccgcccggcagccaccccgtccaggagggaggtagggggtcagccccccgccaggccagccgccccgtctgggagggaggtggggggggtcagccccccgcccggccagccgccccgtccgggagggaggtggggggggtcagccccccgcccggccagccaccccatccgggaggtgaggggcgcctctgcccggctgcccctgctgggaagtgaggagcccctctgcccggccaccaccccatctgggaggcgtgcccagcggctcattgagaacgggccatgatgacagtggcggttttgtgcaatggaaagcggggaaaggtggggaaaagactgagaaatcggatggttgccgtgtctgtgtagaaagaagtagacatgggagacttttcattttgttctgtactaagaaaaattcttctgccttgggatcctattgatctgtgaccttacccccaaccctgtgctctctgaaacatgtgctgtgtccactcagggttaaatggattaagggcggtgcaagatgtgctttgttaaacagatgcttgaaggcagagtcatcaccactccctaatctcaagtacccagggacacaaa

SEQ ID NO: 13072 - DNA, 1276 bp, Artificial sequence
  DNA replication origin
cccaggtgccggaggattccttccccggacgctcgccgcgggccgggtcgggactctgagcaggcggggcggggcggggcgggggcggcgctccggtgggcgcggcagagcagccggggcgggggcgcggcgcaccttgctcccggcgcccccgccccgcgccgccgccagcccctccctgcgctcccggcgcccccgcccgctagagacgattccagccccttccgtccgccgcgctccgccgctgtcctccgccggcccgcgtgggaggacgatgggtcagcgcggaaaaagtgaatgagggcggcagcggtggcggcggtagccagcgcctgactcggcgggcccggagcaccgcccgcgtcccggcccccggcaccatggacgcgccgcgcgcctcggcggccaagcccccgaccgggtaagcggccccgcggtcgggcggggtggagagggggcttccctgggctcggacgcccgcgtccgcaccgcgcgctcccgggcagggcgccctctctgccgccccagcgggtgctggtggtagtggtggagcaggtggtgcggtgctggtgttgggtgctggtgttgggtggtggtgcgtgctgtgtactttgggcacccgggtcgttgcccaggtaaccgtgtcgggccggggccggagcgcacttttcgcgcggggtggtttgtatgcaggcgtccttatgggggtccccgccagcacagcccccactcagctccgagctttcctcaggccccccaagtgtttgccgtaggggtggagcggggagcgaggggacgcccggcctttgactccggcctcttccctgcgggcttgcccctggccggttcccatcaagtcttccctctcccggcctcggcggcagccccaggatcggctctcccggcagcgtggaggggagggctccccggcttcgcagccgcccgggccccgcgttctcggaaggtgttcggattgcccggagggtttcatggcagcagctctccctccctgcctttattccagggtctcccctggcagtggaaggggcgtcctagtggggccaggcctgaggcgcagacatccgtagcggacccgcgagtctggcggcccatccctgtcttcgcgattccgcttttgcccaaacctctcccggtttctgtttgctatccccacaccttgcgtgcagggattacacgtcacattcaggatttgactctcagaaagagtaatttccctcaaacaggacgagcagccctgctcattattcagaccccg

SEQ ID NO: 13073 - DNA, 1503 bp, Artificial sequence
  DNA replication origin
gtccatggtgccgggggccgggacgcgggcggtgctccgggcccgccgagtcaggcgctggctaccgccgccaccgctgccgccctcattcactttttccgcgctgacccatcgtcctcccacgcgggccggcggaggacagcggcggagcgcggcggacggaaggggctggaatcgtctctagcgggcgggggcgccgggagcgcagggaggggctggcggcggcgcggggcgggggcgccgggagcaaggtgcgccgcgcccccgccccggctgctctgccgcgcccaccggagcgccgcccccgccccgccccgccccgcctgctcagagtcccgacccggcccgcggcgagcgtccggggaaggaatcctccggcacctgggccctgcaccgacacccgcgggtgcggcagagggcttctccccgtgctcctccacccctggggggagcgcgaccctctctgggcggagtgggggatcccggggccggcgcctcctggcggagttgggggaggggaaccacctggagcctggaggccgtgcgagggcgaggtgggcggaccagcccgggaggactgacgttggagggtgagaagtgagtgtccggcaccgctctctgacctttatccgtgcagcaaatgtctagtgcgtagggtcgcaaagtgggagtcccgaccgggagcgtcaggaacacctgggaacttgttagaaatgcagatttctggggcccaccaggtcccacggaatcagaaacagtgcgggctggagcgcggcctcgctttgctaacaactcactcgctctaggtgaatgctcgcttaagtttgccaacctgattcactgggcgctactgtggcacaaccctgccactccagtgcgggctggcgggcagatatgcaggtcctgccggccacgccggggcccagagcaagtcagccagaggtcccttatctgcccaacttcacctccactctctaagatcttggttggtatgatgggctgacctataaaagtggcagtttcatatggtttcaatgactcgaataaaagaccaacaagaggccagatcgggcgagcctgatagcgttgggggtgacgctccccttgcgatcttgtcattggatgaggtatccagaggcctgcgcagccttcctccctctgatcccctgctttctcattaactgaagggggggcagaccagtctatatgcaaaatgtgagtccttactcgtggctggcagatcttgggtgctccctgctcccacctagaaggtttcctaagtccccaggtggccctggggctcacttccctgcagcccagcctcccatgagtggagcgctttcccggctcagggcctctggctgggatgctgctccacagtgctcttcctcctccttttcatcccgtggtctccccaaggagcctttcctggcctctctgtctaaaagcaccctgcggagcacagtggcttacacctgtaacctcagcactcagggaagccaa

SEQ ID NO: 13074 - DNA, 967 bp, Artificial sequence
  DNA replication origin
accacccacaggccactaaagctggttggaatgtagaggctctatatgtcagaaaaagcatagaagagcaaaaggcagattgatttttattagggtaacaactgtaaataaaagattagcgttaatggcctacagctttgaaagacctggtggaatggtctctcggcttctgctacctgcaagtgctaggtaggtacaaggagccacatgccacatcccaaagaaaagcattgtcctatggtttaagtcgattggaatgatgatggtggtagtgatggtgatggtggtagtggtgatagtaaagatagtcatggtggtgatattgatagtggtaatgatagtggtagtagtggtgatggtgatgatggtagtggtaatgatgacagtgatggtggtaatagtgatggttgtgatgatgataatggtggtgatgatagtggtgatgatggtggtgatggtggttgtggaggtggtggtggtggtggtgatggtgggggtgatggtggtagtgatggtggtggtgatggtggtggtggtgatggtgatagaggtgatgatggtgatgatgatagtggtggtggtggtaatagtggtgatggtagtgatggtggtggtgatgatggtggtggtggtggcagtggttgtggtgatggtggtggtagtgatggtattgctgatggtgatggtgatggtaatggtggtgatggtggtggtggtgatggtagtgatggtggtgatgatgatggtggcagtagtggttgtggcgatgatggttgtggtgatggtagtgttgatggtgatactaatggtggtcgtggtggtgatggtgatgatagtgatgacagtgttggtggtgatggtggtggtggtggtagtggttgtggtaatggtggtggtggtgatggtgatgatggtagtgttgatggtgatggtggtggaggtgttgatgacattgattgagcagtta

SEQ ID NO: 13075 - DNA, 921 bp, Artificial sequence
  DNA replication origin
cttcgagaggcaggaggccgggcctgccaaggccgactggaggtcaagttctgggcctgaagaggccaccaaaagtcaaaagcggggcctgggaagactgccgagagccatgagctgggctgggccgaaagaggccactgggaggcaggaggagctgggcctggagaggctgactcgaggaagttttgcacctggagaggccgccgagaggacggagctgggcccggggaggccgacttgcagctcttccaggcccacttccaggccgacttgaggacgacttaggcctgcagaggccgccgggaggccagagctgggcctggagaggccgacttcaggacgatttgggcctgcagaggctgccgggaggcccaagctgggcctagaggagcccaccgaccggaggccgtttggggcctggagatgccgtcggagggcaggagctgagcctggagaggccaccgtgaggccggagctgggcctggggagcttggcttcaggaagttgtgggcctaccagggccgctggaagctgggcgggagctgagtccaaagaccttattggaaggccagagtctggcctggagacgcagccgggaggaagagctgggcccggagaggacgccgggaggctgcaggtgggtctggagaggccgacttgaggaggcccagcctctgcctcccgcatggcggcctctgcaggcccagctgttcctcctggctgcatctcccggcccagctcctgcctcccagcaagcaagctcttttggctcagctctcgccggcgtttgtagaccccgaagtttctgcagccaagctcttcaggcccacatcctgcctcccagtggcctgtacagtcccagctctggctggagaagagcgtctgcaggccctgctgttgcctcccaggggcgtctccagg

SEQ ID NO: 13076 - DNA, 1443 bp, Artificial sequence
  DNA replication origin
gggagaggcgcgagcgggaaccgggactgcgtgcggcgcttgcgggctagctggagttccgggtgggcgtgggcttggcgggccctgcacttggagcagccggcccgccctgccggccccgggcagtgaggggcttagcacccaagccagcggctgcggacggtgtactgggtcccccagcagtgccggctcaccggcgctgcactcaatttctcgtggggccttagctgccttcccgctgggcagggctcacgacctgcagctcgccatgcctgagcctccgcccccacccacccccggccgtgggctcctgtgcagcccaagcctacccaacgagcgccaccccctgctccatggcgcccagtcccatcgaccacccaagggctgaggagtgtgggcgcatggcgcgggactggcaggcagctccacctgcagccccagtgccagatccactgggtgaagccagctgggctcctgagtctgatgggaacttggagaacctttatgtctaactaagggattgtaaatacaccaatcagcactctgtatctagctcaaggtttgtaaacacaccaatcagcaccctgtgcctagctcagggtttgtgaatgcaccaatggacactctgtatctagctactctggtggggccttggagaacctttgtgtggacactctgtatctagctaatctggtggggacgtggagaacctttgtgtctaactcagggattgtaaacacaccaatcagcaccctgtcaaaacagaccactctatcaatcagtaggatgtgggtggggccagataagagaataaaagcaggctgccgagccagcagtggcaaccctctccggtccccttccacatggtggaagctttgttctttcgctctttgcaataaatcttgctgctgctcactctttgggtccacactgccgttatgagctgtaacgctcaccgggagggtccgtggcttcattcttgaagtcagtgagaccaagaacccaccaattccggacacagtagcagcctgagcaaacccacacaatgtcatctcgtggtcttgttctcaaccacgcccaccccatcaaacagcttcgctcttctgtgttcacagccatgggggataatgtgtgacctcactaagaaaaggaaaaagaaacggaagatagtcttcttggctggacttttcaaaagatttcaggaataagagacgactctaggcatagacaaatgacagggagagttgggcttctcacctcaccccctggctgaagagctcctgggctcggaggggaagtgagatggaggccgaggtggatgagaacaaagaggacagagggcccaggagagaggcctgggctccgcacacaggaaggagggacatggcagcaagggcgctgggaaaggtgagcatcaggatggggtggtcttcgacccctgct

SEQ ID NO: 13077 - DNA, 942 bp, Artificial sequence
  DNA replication origin
gcgccatgcgcccacactcctcagcccttgggtggtcgatgggactgggcgccatggagcagggggtggcgctcgttgggtaggcttgggctgcacaggagcccacggccgggggtgggtgggggcggaggctcaggcatggcgagctgcaggtcgtgagccctgcccagcgggaaggcagctaaggccccacgagaaattgagtgcagcgccggtgagccggcactgctgggggacccagtacaccgtccgcagccgctggcttgggtgctaagcccctcactgcccggggccggcagggcgggccggctgctccaagtgcagggcccgccaagcccacgcccacccggaactccagctagcccgcaagcgccgcacgcagtcccggttcccgctcgcgcctctccctccacaactccctgcaagctgagagagccggctccggccttggccagcccagaaaggggctccaacagtgcagcggcgggctgaagggcttctcaagtgcagtcaaagtgggagcccaggcagaggaggcgtggagagcgaggaagggctgtgaggactgtcagcacgctgtcacctctcactaccacaaagcaacacaaactgggaagctccaaaccacagactcgttatctcacttctctggaggctacaagtctgaagtcaaggcgtcggctgggctgcgctctccaaaacctgtaggtgagtatccttctctgcttcttctggcttctggtggcagtgtcccacatcagtgccggggcattgcagccgcagcgctccgatcccagcctccgtggcattgtgtctgtgtgtctgtgtcttcacgtggctgttttcttctaaggacaccggccatattgggttagcaccctacctaaaccctgcagtgtgacctcgtcttcactaatgaaatctgcaatgaccttatttcca

SEQ ID NO: 13078 - DNA, 1497 bp, Artificial sequence
  DNA replication origin
cattgtcaggagtgtggagtgcacttgtaaaatgaaatctcccaagttctcagattttcttctggcattacagtgtgaggagctttgttgacccactccccagtgaatctggtgaaaagagaaagagagagagacagaaagagagagagaaagaaagaaagagagagaaggaaggaaagaaggaaggagggaagggaagggagtaggggaagaagggaaggaagaggggaagggaagggagaggggaagggaagggagaggggaagggaagggagagggaaagggaagggaagggagaggggaaaggagaggggaggggaggggagggggaggagaagggagaggggaggggaagggagagggaaagggaagggagaggggagggaaagggaagggaagagaagggaagggaacaggagggaaggggaggggaggggagggaaggggaggggaggggagggaagggaaaaatttaaagcatcttgaaacaatcctaagagcagacagcataagaagcatttattcaagaaaacctataaaattcagtaagaaaggtagaatcagtggtatttaaacaaaaacactcctttcctcacccctcccagttcctgaatgggagactccgtcctggattgctgcagccaagcgcacaaggcttcccttactacctccaagtttcagatcttttctcccagaaatagcagaatttcagtgtttctcatcctgccgttactgaggcaagcactgggtgagtgcatggagagggaaacaccatttttctgcccagtgcacactgctgagaatactggggcccttacagccctttcttgtctcataaaggagtagttctatgcaagctgagataatctcatgttgcttgatatctctcctaccttctccaccaagtgctgagctcccagagcaaggtgtcactcagaaagatttcccagctccagggctctggctcagagatgttacccaagaggagaagccagccataaattacttcacaacagaagcaatttcatttgaacagagcatggagagcttcagtgcaattctcccccaaatgatcttcaaatccaacacagtccctatcagaatcttagctgactaatttgtaaaaattgacaagctgattccataattcatatggaatggaaggaactcagaacagccaaaacaattctaaaaatgaagaaccaagtaagtggactcacacttcctgatctcaaatcttactacaaagcaacagtaatcaagacagtgtgatactggcacagggatttatgtagataaatggaatagaatggagagtctagatgtaaattcatccatccatgggcaactgattttcaacaagggtgccaaaaccattcagtgaaggaaggaggaaccctttcaataggtggtactgggccaactggatagacaacagataaaataataaatttgggcccttgtattgcaccatatacaaatttaagtaaaaatgtg

SEQ ID NO: 13079 - DNA, 1197 bp, Artificial sequence
  DNA replication origin
ggggcagtggtcgtcggggaggctcaggccacacaggagcccacggtggcggggaggggggtgcagtgggaagggtggtggtgggggcagggaggtggtggtggtggtggtggtggtgggaggctcatgcacggtgggctgcaggtccaaagccctgccctgcggggaggcagctaaggcccaccgagaaatccagcacagcagctgctggcccaggtgctaagcccatcacttccctgggcttgcgggccgtcagccgctccaagtgcagggcccacggagcccacgcccacccagaactcgcgctggcccacaagcaagcgctgcctgcagccccggttcacgcccgcacctctccctccacaccttcccacaagctgagggagccggctctggccttggccagcccagaacggggttcccacagtgcagcggtgggctgaagggctcctcaagcacggccagagtgggcgccaaggccgaggaggcgctgagagcaagcgagggctgcgagggctgccagcatgctgtcacctctcattatcttctgtagctacaggattaaaattaatgaaaaatcaaatagagtactacagcttgtgattggatgaattaaattcccagacttgcaagttaaattcccagcctcgcaggatgtctatctactgttaatgtgaggtgactctttggaaaagaaaggggggcaggtaatcagtacaattttagctccagtgcacctcacagtgggtccagtccagtgggtcgccattctcatcctgtggtcatttctcgagttctagatgcacaactggagcagacatatttagcagctggcagaacccttgcatgggtctcttggcctctaaagtgaagggtactatggtgggagaggccaagtggaaacccctagaactgcctctacctaggaatatacatagtaaatcaggagcaattgtgcattctcagagggatgatagaaattagtgccatatcaaggacttgaaagacacaggggtggtgattccctctacattcccactgagtgtttctgtctggcttgtgcagaagacagattggtcttggagaatgacagtgtattatcatgagtttaaccaggtggtgactccaattgcagtggctctactagatgtggttttattgcttgaccaattacttagctgattgcctctttcatct

SEQ ID NO: 13080 - DNA, 937 bp, Artificial sequence
  DNA replication origin
aggcagagacactcctcactacccagatggggcggccaggcacaggcactcctcacttcccagacagggtggccgggcagaggcgctccccacttcccagacgatgggccgccgggcagaggcgctcctcacatcccagacggggcagctgggcagaggcgctcctcacttcccagatggggcggccgggcagaggtgctcctcacatcccagacagtgggcggtcgggcagagacactccttacttcctagatgggggggagaccgggcagaggcgctcctcacttcccagatggggcggccaggcagaggcgctcctcacttcccattcggggcagccgggcggaggtgctcctcacttcctcccagacggggcggctgggcagaggcgctcctcacaacccagacgatgggcagccaggcagagatgctcctcacttcctagatggggtggtggctgggcagaggcactcctcacttcccagatggggcggctgggcagaggggctcctcacatcccagacgatgggtggccaggcagagacgctgctcacttcctagacggggtggcgggcgggcagaggctgtaatcttagcactttgggaggccaaggcaggcggctgggaggtggaggttgtagccagccgagatcacgccactgcactccagcctgggcaacactgagcattaagtgaacgagactccgtctgcaatcccagtacctcgggaggtcgaggcaggcagaccacccgaggccaggagctggagaccagcccgggcaacacggcaaaaccccgtctccaccaaaaatacaaaaaccagtcaggcgtggcggcgtgtgcctggaatcccaggcacttggcaggtcgaagcaggagaatcatgggagcccgaggcagggaggttgcagcaagccgagatcatggcagtacagtc

SEQ ID NO: 13081 - DNA, 725 bp, Artificial sequence
  DNA replication origin
gcccactgtctgggatgtgaggagcacctctgcccggccgccccatctgggaagtgaggagcgcctctgcccagctgccccgtctgggatgtgaggagcgcctctgcccggcggcccatcgtctgggaagtggggagcgcctctgcccggccaccctgtctgggaagtgaggagtgcctgtgcctggccgccccatctgggtagtgaggagtgtctctgcctgtccgcccatcgtctgggaggtgaggagcgcctcttcccagccgcccatcatctgggatgtgaggagcgcctctgcccagccaccctgtctgggaagtgaggagcacctctgcatggccgccccatctgggaggtgtacccaacagctccgaagagacagcgaccatggagaacgggccatgatgacgatggtggttttgtcaaaaagaaaagggggaaatgtggggaaaagaaaaagagatcagattgttactgtgtctgtgtagaaagaagcagacatgggagactccgttttgttctgtactaagaaaaattcttctgccttgggatgctgttaatctataaccttacccccaaccctgtgctctctgaaacatgtgctgtgtcaactcagggttaaatggattagggcggtgcaagatgtgctttgttaaacagatgcttgaaggcagcatgctcattaagagtcatcaccactccctaatctcaagtacccaggaaca

SEQ ID NO: 13082 - DNA, 2146 bp, Artificial sequence
  DNA replication origin
ttccattatctggatttgatcaacaacatagtgatttaggtatgataccaaaagttagacaggaaagaggcaaaggaagggggctgggggaaccagacgaagccgaggatgtaagagaggggttttgttgctatttaagtccaggaaaaatgtagcgagctctcaaggaaagagactcaggcaagaggggtgtggatattccaacaggatgcctttctgttttgcagcaaaatttaccgagtttccgcggaacgtgacggcgaccgaggggcagaatgtggagatgtcctgcgccttccagagcggctccgcctcggtgtatctggagatccaatggtggttcctgcgggggccggaggacctggatcccggggccgagggggccggcgcgcaggtagcggagcccgccgaccccgcgtctccccttcgctcgcccggtcctcagggtgtccggcccggggctgggggccgaggtgctgcctggacacccctggggacctgcccggttctgtggaagcgagtgacccccagggcttctagggagggaaagggaatttgtcctggggacgcgaagttaaaacccagaaggaagtcctgctgcccagtttcttcctgttaaaccgggaagcgcctcctcctgtaagttctggtacttaggcagatgcccgccttgcccctaccacgctgccacatcccgggacatccgggagcccctttccaggacgaaaggagggggaggggaatcggtgggcggcctccaccccccaccccaccccctctcccttctcggggcaccaggcaccatctgggaccgcagcccccaggctgaacaaccagagaaccagggcggccagctcctctcacctccacttctaacagatatgtggggtgtcggggagagagggagagagaaggaaaggggggaaatggaggagggagagaaggagagaagaaagggggagaccgggagaggcacagagaaggagaaagagacggagagagggaagggggaaaaaggggagagacggaagggaaagagaagggagggagaaagaaggtagaagagaaggagagagggaaggggaaaagagggagagagggagtgaggagagggacagagagaagggaaggagggaagggagaattggagtggggaggggagaagaagagggggagagggagaaagaagggggagagagggagagagggacggggagggggaaggggctgggaaagagggaagggggagacgggaagagacagtgaaggggaaagagagagggaagggggaaaaagggagagagggaagggaaagagagagagggaaggggaaaaagggagagagggaagggaaagagagggcagggagagagaaaggagaagagaaggagagagggtaggggaaaaggagggagggggcgagagggacagagagaaggggagggggaaggaagagagggagaattggagtgggaagcagagaaggagaagggtagagggagaaagaatggggagagagggagagaggtaagaggggggaagggggtgggagagcagagagaatgagggggaaggggtgggagaggagagagaatgaggggggaaggggggaggaagagaaggagcaggagagacatgggggagagagggcacagaagggagagagggaaggagaggaaaaggagagacggagggagagggaagggagagggagggaaaggaagagagggagagaggagtagagaagaggcagggagaggagagaaggagagtggagaagggaaggaaaaggagagaagagaggaagcgaggagagaaggaagtaggggaatggggagtgtggaggggacggagggtgacttgggaagagacaggagagagggtggtgaggtggggaaggagagggagaaaggaggagatgaggaaaaggaaaatagcgggaggaggggagaggggaagggggtccgggcgagggagacctagttgagcgagaggcggcgcccctgcgagccagcaagagaatctggggccaggagcgcggggcgggacggcaggcgggatggtggccggaacaaaggcgcgaaaattcgtcccggagcacttcaccttcactcacgccggccgccccacccctggcgcccgcccg

SEQ ID NO: 13083 - DNA, 1072 bp, Artificial sequence
  DNA replication origin
ccatccttctagaacacgctttggttcctcgatttgggaaggtctggctccaatagcccaagcctgcctccagatcctttaaagatagcttcacttttctgtcccaagcactgagagggaaaagggacgggaaagagtggaaggagtgggcagcaatgtgtgtagtttggccctgcagcggagccgccgccgtccatagcctccctgttcggaggccgccatccatagcctccctgcttggagcccctgaccatggcaggcctatctcagcgtcttgcaggagctgggatgcgcatatcccttgggcaaggggaagccacggcttgatttcagcaagaagcaatgtgagttaccttgcccttaaccttatgtaaattcattctgcaaatgaagatccagggctgaaagggcagcactgcagacaccgcagcggccggagccacagccctgagctcccagggttttccacccagcagggaagacagactggaaaaacgattacatgagtggtgctggctgcaaaggagaagaatggatctttagtgcgtagtgaagcgcaggggtctcacttggttaggatatggttctgaaatacttcactgagaggggcatgggcgctggagtggagacaagttgggacctggactcattcagagttcattatggggaggagagattccaggactagagaacagtgttggccttgaagcagaaaaaaacctggaccagaaactggaagaagaaagagaaggagaaagagaaggagaaggaagagaaggagaaggagaaggagaggaagaggaagaaagaagaagaagaaaaggaagaggaagaaagaagaagaagaagaaagaagaagaagaaaaaccaacttaggcaggagagtacagagggacatgaaggaagcaggagcgtgcacacttgaaagcgtgtgttagcatcagcagcccccgccacccctgcaggacataccaagatgcccttcactctgagggcagcgggaacacactaaagggttgaacaggttgcgtttctaaaaggtcacggactacagtgtgtaagaggttggaag

SEQ ID NO: 13084 - DNA, 948 bp, Artificial sequence
  DNA replication origin
tctgcccggcagccgcccctgtctgagaagtgaggagcgtctccgccgggcagccaccccgtctgggagggaggtgggggtcagcccccgccaggccagccgccccgtccgggagggaggtgggagggtcagccccccgcccggccagccgccccgtccgggagggaggtgggggggtcagccccccgcccggccagccgccccgtccgggaggtgaggggcgcctctgcccggccgcccctactgggaagtgaggagcccctctgcccggccagccgccccgtctgggagggaggtgggggggtcagccccccgcccggccagcggccccgtccgggagggaggcgggggggtcagcccccccgcccggccagccgccccgtccgggaggtgaggggcgcctctgcccggccgcccctactgggaagtgaggagcccctctgcccggccgcccctactgggaagtgaggagcccctctgcccggccaccaccccgtctgggaggtgtgcccagcagctcattgagaacgggccatgatgacaatggcggttttgtggaatagaaaggggggaaaggtggggaaaagattgagaaatcggatggttgccctgtctgtgtagaaagaggtagacatgggagacttttcattttgttctgtactaagaaaaattcttatcctgttgatctgtgaccttacccccaaccttgtgctctctgaaacatgtgctgtgtccactcagggttaaatggattaagggcggtgcaagatgtgctttgttaaacagatgcttgaaggcagcatgctcgttaagagtcatcaccactccctaatctcaagtacccagggacacaaacactgcggaaggccgcagggtcctctacctaggaaaaccagagacctttgttcacttgtttatctgctgaccttccctccactattgtcctat

SEQ ID NO: 13085 - DNA, 1043 bp, Artificial sequence
  DNA replication origin
gcgggggggctgacccccccgcctccctcccggacggggccgctggccgggcggggggctgacccccccacctccctcccagacggggcggctggccgggcagaggggctcctcacttcccagtaggggcggccgggcagaggcgcccctcacctcccggacggggcggctggccgggcggggggctgacccccccacctccctcccggacggggcggctggccgggcggggggctgaccctcccacctccctcccggacggggcggctggcctggcgggggctgacccccacctccctcccagacggggtggctgcccggcggagacgctcctcacttctcagacaggggcggctgccgggcagaggggctcctcacttctcagacgggcggttgccaggcggagggtctcctcacttctcagacggggcagccgggcagagacgctcctcacctcccagacggggtcgtggccaggtagaggcgctcctcacatcccagacggggcggcggggcagaggctctccccacatctcagacgatgggcggccgggcagagacgctcctcacttctttccagactgggcagccaggcagaggggctcctcacgtcccagacgatgggcggccaggcagagacgctcctcacttcccagacggggtggcggccgggcagaggctgcaatctcggcactttgggaggccaaggcaggcggctgggaggtggaggttgcagcgagccgagatcacgccactgcactccagcctgggcaccattgagcactgagtgaaccagactccgtctgcaatctcggcaccccgggagaccgaggctggcggatcactcgaggctaggagctggagaccagcccggccaacacagcgaaaccccgtctccaccaaaaaaatacgaaaaccagtcaggcgtggcgtcgcaggcactcggcaggctgaggcaggagaatcaggcagggaggttgcagtgagccgagatggcagcagtacagtccagcttcggctaggcatcagagggagaccgtgga

SEQ ID NO: 13086 - DNA, 1288 bp, Artificial sequence
  DNA replication origin
tgaggtaaataataaatatttatgaaatgagtaagtgaatgcatgaatgggcaaattaggcaatgccagactgagtctgttttatctcataatgatcgtgttttgtaatctatttgcactttctgtgcagtgggggcgtagggagtaagtggtgttgtatgagttcattttgcattgctataaatacctgaggctgagtaatttataaagaaaagaggtttatgtggctcatgattctgtaggctatacgggaagcatgactctggcctctgcgtctggtgaggcctcaggaaactttcagtcatagaggaaggtgaaggggagcaggcatgtcacatagcaaaggagggagcaagagaagtgccagcctcttttaaacaaccagctcttgcatgaatgaatagagtgagaactcactgattaccatggggtgggcaccaagctatccattagagatctgcccccatgatccaaacacctcttaccaggccccacctccaatattggggatcacatttcaacatgatttggaggagaaaaaccatccaaactgtatcatgtatggagcagaggctaggtcctagttggttgtgggtggatgaggtgtgaatgggtgtgaggtggggttgggggatgaatgagtgtggatgggatcaggtggtgactatgagcatgtgcatgtaaaccctgagtgtggaggggctaaggaatgagtggatgttggtaggggtataggtagtgaatgggtgagggttgaggcataggtgttgagtgtgtatgaggcagagtgtcaacagagtgggtagggggaagtgggtagttcatgactgggtatggggtgaggggcacataatgaggaggtgggaagtgaggtattgagtatgcctggggcatagtgagttgctgtggccaggaggaaatcagttggtggttatggggtgaggataagtaatgagtgagtgtaaggtgggatgtaggtagtaagcaggtgtgggaaaaggagtaaatagtgactgagtataaggatgcattaggtagtgagtccaaggtagagagtagtaatgagtacggggcaggttgccagtagtgatgggatgtgaggtgggggtaggtggtgactggggcttcagatacagacaagtagtttggaattgaaccatgggcctggacatggagcttggacacaaacctagactcagtccttagactgagactcagacctaggacttagcagtcctccatgttggagctgaacttttttttttttgagacggagtctcgctctgtt

SEQ ID NO: 13087 - DNA, 979 bp, Artificial sequence
  DNA replication origin
aaaaccaaatttgcagcccttgttaagtgaatgcacaggactttattgtattcaggtcttttattgtaagactcactcctgtcttcattttatgttccactgttgtgcttcccatttgcctttctctagttttgttttctgtgtttctacggactgctctcagcccaggtgtgcaggaagcacacacatgcctgcagagccttcatggcctctgcattcagggcatgacttcaacgcacagtggctgtactgatttgttaaaacaaaggaacagattacttctcctaattcacagggaagttccaggttgtgcgggcagtgagcagacctgtgtctgtctgcgcttgccctggtgaaaaaccccaccgttcaggctgcagggtgcgagacccaggcacaaacattttgctggatgaggaggaaagatgtaaggttgctccccttcagagacagcaaagggcaggtctgtagcttcacttacttcaggattgtgatttttgacagagccgagagatcagggttgttgaaccaggcctgaaggtcctagtgaatctcgtgaagagaggaggggtctggctgtaacatggacctagaggacatttttactgcaggagaaggaacagtggggatggggtggacttgccaaaggaatatagctcaagttcctgcagcccaaaaaagctcagtttcttttggccaaagcttccgcgagtttccctggcatttctcctgcgggagctacaggggcagtgggacacttagcctctctaaaagcacctccacggctgtttgtgtcaagcctttattccaagagcttcacttttgcgaagtaatgtgcttcacacattggcttcaaagtacccatggctggttgcaataaacattaaggaggcctgtctctgcacccggagttgggtgccctcatttcagatgatttcgagggtgcttgacaagatctgaaggaccctcggactttaga

SEQ ID NO: 13088 - DNA, 995 bp, Artificial sequence
  DNA replication origin
ctgatctcaaggaaacaggaaaggacgggcgggggcgcgggcgccgagccggtgcgccggtgcgcggttgggcgggctgcggggtccggggcgcgatccgggggcggcgcgggagccggcgagacacgcccttacctttcttttcctccagagcccgactcgccgggcagagcgcagccagcagcgccaggagcgctgccccggccgtcccggagggtcgcatcgctgctccccgaagagctcgctccggctctcccgatcaatactggacggagtcagggggccgtgcgcggtggttgtggcgttggcggcgaggcggggactcgggcggacgccgacgaggtggcctgtcgtccggtctgggcggcggcggccgccggggctagctcgggactccggccgcctcggccgcgtcgggcgctcacaccgtgcggggggcggaggctgctgcggccgcgctgcgccgggggctgcccggacgtctagctcgcgcgggccgaggcgcggggaggcagggcgggaggaggagggaccaggcggcggaggagggatcgggaggagcagaggaggaggagaatgcgaggaggagggaggagaaccagcagcggggacccaaggccagcggccgccggaggcggtggacagcggtggcccccgcgggacctagtctccggcgggagtggggcggcgcatgggaggggagcgggtgccctgaggagttaatttccgagaggggcgttcccagcactgcccctctggacccggtccccgcggacttgcaggcccagcctatgtccaggtcgagccaaatctgtgccagggtccccttccccctttcccttcttttgttttacaaagcaaacttgtaccagctttagacagactggccgagccttagagccagcgtcggataatggcaccgacggggaaactgctcctttattcgggtccccacctcccctgcagcactacgggaccctctcggggatcagagg

SEQ ID NO: 13089 - DNA, 1241 bp, Artificial sequence
  DNA replication origin
gctttctgagaggacctccccgcctccgccctccgcgcaggtctcaaactgaagccggcgcccgccagcctggccccggcccctctccaggtccccgcgatcctcgttccccagtgtggagtcgcagcctcgacctgggagctgggagaactcgtctaccaccacctgcggctcccggggaggggtggtgctggcggcggttagtttcctcgttggcaaaaggcaggtggggtccgacccgccccttgggcgcagaccccggccgctcgcctcgcccggtgcgccctcgtcttgcctatccaagagtgccccccacctcccggggaccccagctccctcctgggcgcccgcgccgaaagccccaggctctccttcgatggccgcctcgcggagacgtccgggtctgctccacctgcagcccttcggtcgcgcctgggcttcgcggtggagcgggacgcggctgtccggccactgcagggggggatcgcgggactcttgagcggaagccccggaagcagagctcatcctggccaacaccatggtgtttcaaaatggggctcacagcaaacttctcctcaaaacccggagactttctttcttggatgtctctttttgctgtttgaagaatttgagccaaccaaaatattaaacctgtcttacacacacacacacacacacacacacacacacaccggattgctgtccctggttcaagtgtgccaagtgtgcagacagaacatgagcgagtctggcttcgtgactaccgaccataaacccacttgacaggggaaacatgccttggaaggtttaattgcacaattccaaccttgagctgcgcgggttccaagagccaggcccgtacttgctgttgatgtcattggcttggggagttggggtttggtgcccagcgcggtcgttgggggaggggcaaggcatagaacagtggttcccagaccttgctgcacattggaattacctgggattaaaaaaaaaaaaatcaaaacaaaaaccagtgtctggctcccgcccccagacattctgatttaattggcatggggcaagacctggacttgggattttttttaatgctcttcatgtgatctgttgggcagccagatttggggatcactagacggaagaaggattgttaaagtctccggagatgttacttgccaatgctaagagctctttgaggacatctggaattgttacaatattgccaaatataggaaagagggaaa

SEQ ID NO: 13090 - DNA, 765 bp, Artificial sequence
  DNA replication origin
acagccacagaccgtggagtcaccacagcgtccactctctcaccaaagcgactgggccctgcacgtgggatctgcatgggcagtaactcgatcccacagatgatcagtggtggtgcccgtgtggcccccaccctgacaagtgcacgtggacattttcctgcacgtgcggaaggacgcaggtcagtctgggcagcagttccccacgggggaccagctcagagggaaggaggaggacgcacataaaccctatgcaccgaggcatcccagggttggtgcagctagcacacatgctttaggagtgacaaacacgaagtgaaaaatagtgtctctacgtggcgtggtaccctggggatggggctggagcctcaagatacggctgcgtcgaggcggcttcctggcaccgctctgggctgtggcggtggggtggggtggggggtgtcccaggacagtgaggacgcgggacgcggggcttggggtgtgtgcggggcccagggcctgtcccatggacagggtggtcctcatcccctccctgccgccttgctccttctcccctccccacacgccacacacccaaataccccaggacaggaacacggcacggtggacaggagcaaaccctgcacagtgcccagaaggtctgcaggagcttcttcttccctttgactcgcgcacgttattctaaactgttcctgggcgtaccttaccccaagagggccagccactgcctccccctccacacccacggcgtcaccggtccctgcagat

SEQ ID NO: 13091 - DNA, 899 bp, Artificial sequence
  DNA replication origin
ggggggtcagccctccgcccggccagccgccccgtctgggaggtgaggggcgcctctgcccggccgcccctactgggaagtgaggagcccctctgcccggccagctgccccgtccgcgagggaggtgggggggtcagccccccgcccggccagccgccccgtccgggagggaggtggggggggtcagcccccctgcccggccagccgccccgtccgggaggtgaggggcgcctctgcccggccgcccctactgggaagtgaggagcccctctgcccggccagccgccccgtccgcgagggaggtgggggggtcagccccccgcccggccagccgccccgtccgggagggaggtggggggggtcagcccccctgcccggccagccgccccgtccgggaggtgaggggcgcctctgcccggccgcccctactgggaagtgaggagcccctctgcccggccaccaccccgtctgggaggtgtgcccaacagctcattgagaacgggccaggatgacaatggcggctttgtggaatagaaaggcgggaaaggtggggaaaagattgagaaatcggatggttgccgtgtctgtgtagaaagaagtagacatgggagacttttcattttgttctgcactaagaaaaattcctctgccttgggatcctgttgatctgtgaccttacccccaaccctgtgctctctgaaacatgtgctgtgtccactcagggttaaatggattaagggcggtgcaagatgtgctttgttaaacagatgcttgaaggcagcatgctcgttaagagtcatcaccaatccctaatctcaagtaatcagggacacaaacactgcggaaggccgcagggtcctctgcctaggaaaaccagagacctttgttcacttgtttat

SEQ ID NO: 13092 - DNA, 1308 bp, Artificial sequence
  DNA replication origin
acggggcggctggccgggcaggggggctgaccccccccacctccctcccggacggggcggctggccgggcggggggctgacccccccacctccctcgcggacggggcagctggccgggcagaggggctcctcacttcccagtaggggcggccgggcagaggcgcccctcacctcccagacggggcggctggccgggcggagggctgacccccccacctccctcccggacggggcggctggccgggcagaggggctcctcacttcccagtaggggcggccgggcagaggcgcccctcacctcccggaccgggcggctggccgggcggggggctgacccccccacctccctcccggatggcacggctggccgggcggggggctgaccccccacctccctcccggttggggcggctggccgggcggggggctgaccccccctcacctccctcccggacggggtggctgccgggcggagatgctcctcacttcccagatggggtggctgctgggcggagaggctcctcacttctcagacggggcagctgccgggcgggggggctcctcacttctcagacggggtggttgccaggcagagggtctcctcacttctcagacggggcggccgggcagagacgctcctcacctcccagacggggtctcggccgggcagaggcgctcctcacatcccagatggggcggtggggcagaggcgctccccacatctcagacgatgggcggccgggcagagacgctcctcacttcctagatgtgatggcggctgggaagaggcgctcctcacttcctagatgggatggcggccgggcggagacgctcctcacttcccagactgggcggccgggcagaggggctcctcacatcccagacgatgggcggccaggcagagacactcctcacttcccagacggggtggcggccgggcagaggctgcaatctcggcactttgggaggccaaggcaggcggctgggaggtggaggttgtagtgagccgagatcacgccactgcactccagcctgggcaccattgagcactgagtgaacgagactccgtctgcaatcccggcacctcgggaggccgaggttggcggatcactcgcggttaggggctggagaccggcccggccaacacagcgaaaccccgtctccaccaaaaccagtcaggcgtggcggcgcgtgcctgcaatcgcaggcactcggcaggctgaggcaggagaatcaggcagggaggttgcagtgagccgagatggcagcagtacagtccagcttcggctccgcatgagagggagaccg

SEQ ID NO: 13093 - DNA, 820 bp, Artificial sequence
  DNA replication origin
agatcacgccactgcactccagcctgggcaccattgagcactgagtgaacgagactccgtctgcaatcccggcacctcgggaggccgaggttggcggatcactcgcggttaggggctggagaccggcccggccaacacagcgaaaccccgtctccaccaaaaccagtcaggcgtggcggcgcgtgcctgcaatcgcaggcactcggcaggctgaggcaggagaatcaggcagggaggttgcagtgagccgagatggcagcagtacagtccagcttcggctccgcatgagagggagaccgtggggagagggagacggagacggagacggagagggagggggagggggagggggagggagagggagagggagagggagagggagagggagagggagagggagagggagagggagagggagagggagagggagagggagagggagagggagagggagagggagagggagagggagagggagagggagaggctaattggcaactctgcaatgtgcttttaaaagggagttgaagcagcagggtgttgggtgttctcagtcccacaagagaatttatccctgatgcatgcaggaatctactgaaaataattaataccttctctcctacccttctagaattgtgctagttatgcatcatccttgggggaatagagacaacggtcacctatttgttttttgtagggcttagttctctcctgggaccttagttgagaaaggcccactagcattccagaataaaagatgatttcaaacttcatctactaccttaaccaaaagaaagacatataataatttagtaaagtt

SEQ ID NO: 13094 - DNA, 1891 bp, Artificial sequence
  DNA replication origin
tgtctactcaaaatagtccctaacctaagggcatgactttagtaatgtaagttttaagcttccgcatgtcaaattccccaatccacccaaaacaatttcctaagggctagcttcctgggacccccacattccccatttttctgcctaagcccacgtctggacatggcttggttcattgctcacaaacgctcctaccctctctccccaccaccccctcacttgggccatgcatctgtgtcatcttccagcagctcctggatctgacattcattggctgtttaggttactattccctccatgcccatgatgccactgtggtttgtgcttcttcatgtgaagttaaaggagaagatatctaagaacataaccttgagagcactagcaaccataggtggactgtgaggagaaagccaatgaaacatgttgaggagaaataggcagagaagcaagcaggcagctttgcaggagtcagaggagaggaacattgtgaggagtgcacgatctgggtcaaacaccagagggatggtgtggaagacaaggactgaaaaatgtctactggataattctaccaagcggggcagctgggcacaaccacagaggaactgacttaaggggaaattgtgcagccagtagtcaggtggaatccagatgtcagtgggacctagtggaaggggcttcaatttttgaatcgctcaaggttggccagaagctggctctgtaatcttggacaaataacaacttctctgagcctcagtttctcttctataaaatggacataaaacaccttccttgcagagtgtgatggttaatactgagtgtcaacttgattggattgaaggatacaaagtactgttcctgggtgtgtctgtgagggtattgccaaaggagattagcatttcatttcagtggactgggagaggcagacccaccctcaattgggtgggcatcatctaatcagctgccagtgcaggtaggataacagcaggcagacaaacgtggaaggacttgactggctgagtcttcccgcctccatctttcttccgagctggatgcttcctgccctcaaacactggactccaagttcttcagcttttggactcttgggcttacaccagtagtttgccaggtgctcccgggccttcagccacagactgaagactgcattgttggcttccctacttttgaggtttggggactcagactggcttccttgttccttagcttgcagacagcctattgtgggacttcaccttgtgatcgtgtgagtcaatattccttaataaacttcccttcatatataggtctatcctatcagtgctgtccctctagagaaccctgactaacatagaagagttgtgaaaatgaccgttggtctgccctcaccctttccctcttgtcctttaaccgcatgcgctcagtgttaccttccgtggcacctgctcaccgtcatcccgtggtgactcgtgtgggtaacttcatcagagaagaccctgcctgtcacctcaggtacagcccacgaagtaaggtggctgcaagcgcagatcctgcacctgcccaaggtgaaacaaatcagctcccggagcctgaggtgcaaagggcaggaagctccctgcgcacccctgcggccccagcgcggctctcccagtcccgctgcctcccactccgagcccctgccgtctgggacccgctccacctcccgctcccgggccctcggggcatcctgtctccattcgcagcccagtgccctccactcccacggcctcgggtacagcttccacagggaaatcacccacatctgtgtctctcgcctcgttcccagtcctgaggccgacgcatggccactgagcacacagatccagcacagcgtccctcgcctttcccgcgccccggg

SEQ ID NO: 13095 - DNA, 1164 bp, Artificial sequence
  DNA replication origin
ttccttctttatttttacccagtttattttaactcagcctttaaaaatcagtctaagcttcagttcctttgggaagctgactttgaccttcccctccaatttgatctgggtccctgtgtgtgtgtccaacttgtgagcataaagtaacatcaaatccattacactacaatggttaatgcactggccagtctcttcctagactctagggccttccttaccttggacccccccacctccctcccggacggggcggctggccgggcggggggctgacccccccacctccctccccgacggggcggctggccgggcggggggctgaccccccccacctccctcctggacggggcggctggcctggccggggctgacccccacctctctcccggacggggtggctgctgggcggagacgctcctcacttcccagacggggtggctgccggtggaggggctcctcacttctcagacggggcggctgccgggtggaggggctcctcacttctcagacggggcagttgccgggcagagggtctcctcacttctcagacggggcggccgggcagagacgctcctcacctcccagacggggcggcggggcagaggtgctccccacatctcagacgatgggcggccgggcagagacgctcctcacttcctagatgggatggcggccgggaagacgcgctcctcacttcctagatgggatggcggccgggcagagacgctcctcactttccagactgggcagccaggcagaggggctcctcacgtcccagacgacgggtggccaggcagagacgctcctcacttcccagacggggtggcggccgggcagaggctgcactcccggcactttgggaggccaaggcaggcggctgggaggtggaggttgtagcgagccgagatcacgccaccgcactccagcctgggcaccattgagcactgagtgaaccagactccgtctgcaatcccggcacctcgggaggccgaggctggcggatcactcgcggttaggagctggagaccagcctggccaacacagcaaaaccccaccaaaaaaatacgaaaaccagtcaggcgtggcggcgcgcgcctgcaattgcaggcactcggcaggctgaggcaggagaatcaggcagggagattgcagtgagccgagatg

SEQ ID NO: 13096 - DNA, 844 bp, Artificial sequence
  DNA replication origin
gccagccgccccgtcggggagggaggtgggggggtcagccccccgcccggccagccgccccgtccgggagggaggtgggggggtccaaggtaaggaaggccctagagtctaggaagagactggccagtgcattaaccattgtagtgtaatggatttgatgttactttatgctcacaagttggacacacacacagggacccagatcaaattggaggggaaggtcaaagtcagcttcccaaaggaactgaagcttagactgatttttaaaggctgagttaaaataaactgggtaaaaataaagaaggaaagagaaaagcaaatgtaaaatatctgtgcagcatgaagtagcaaaatatattcagagaatgtaagaagctgaaatgagggcctcaactaagcgtgggaatgcagatggtgacatagcaatgctgaggtaggctccccaggaccgaggccggcttgttgcggggagaggggaggggcactctaggatgatctctggcgtaagcagcaggtaacgcggtgccaggacatggctgagttttacataaacatttgttcaagcaaatatgggatcattcactgaaacggagaattcaaagtgaggtctagatttggtggcaagatacaactgattcgaggttaggaaaggagagttggaggaacaggaggaagcggcctctcatctgcaaaccctgagttcctggaacacttgtttgttagggagggaagtgtggcccagccacaatcctttgaacatcttcctcttccatcctctgggttctgcatttcgtgctgatctttaatacatttcagattttccagatacgtccacacctcaccc

SEQ ID NO: 13097 - DNA, 2051 bp, Artificial sequence
  DNA replication origin
cacgtggtcggccgtgaggctccgcagagagcacttataggggaggcccaggcgctggggagagcgcggactcgtccacctccgtgctgtggataccctaagaggtcacaggccgctctccaggcggtgcgggtgacgatggtgttggtgccaagcggaacacgttcagcaggactgcctgcagctgacgctaatgtcggcaagaaagccgtcggtcttgacgaaggcgtcgcgcaccacgttcctgtggccgcgttaccgggccagctccaggccgtgcgtggtgcagggcgcccaacagtccagggcatgggtcccagtggggaggcgtcccccagagctttctcaaacgtcctcacgaagccctccaggcgctccttccgccggcaggtgagctcagcgacctgatggcgccgcgcaaccccgggtctcccagccgcccccagtggcagcaactcctcgttgcggacatagagctcgacgaggacacgtgggactcggtgccgcgggacagcaggtcctgcaggaggagtccttgggcttcttctccttggccgtgaagaagacggagcggtgggtgtgggacggggagccgttcttgagctgggcctgggttagcaggagctcctcaaggggctgcacagggcggcctggttcaggttcctcaccgggggctgctccagtagctgcacgagaagctggtcccggcggccagcctgcccaccaactcctcctcccgggacacatcctgtggcctcggggattcccaggcggctgagctctgggagggtgttcgtggcagttcaggtagaggttttctccggggttgccggtctcaggtcatcgtttcctctttcagcgccttctccatagcctcctggtggcgcagaacggaacacttctggatgaacaggttgagatggcgttggcggatgacggtggtgactgcccctaaactcttaggggataatgggtctctttacactctgtaaggatggactgtgggcgagtcgcttacgggtgatgatggtggtggtcttggacgccatccctcaccacctgcgggtctcaagcagctggctgaggggcttggggcctcactgggggtctggctgcagctggccacgagggttttctgtaggggctgcagccaagcgggtttggggacgtgggcgatcctcttggagcgaggacggctctccgctagcctgggggcggcctgcagccagctcacctacttcctctgcgcgtgctgggccggcaggtagccaactaactcctgcgccggtgggcggggcaccgcgggactcctcctctagggctccgcctcctggccttgcttggaaagatatcatcctcttctgaacagagtggtcagacccgaaggtctcttccttggggggctgaaggccagtcgacctttgtcctccgtgttgacgctagtggactcgtcgaagatccacaggcacgcctccagggggtcggagtgaagtccacctctttttctagggctgagtagtccacatcctgcccgcgctggaggagaaggaggaggagtaggatgggccggggagtggggcggggagtccttgagccgcttgggcgatttctgagcctccccgaagcccaggctggagaccgagtctaagtcccagctgaggctgggagggcaggggcccacatcctcggcgccacagattccggggcctcgtcctcactctggtctccgaagagatcagggtggctcaagacccgcttcttcagcttggggcgtcctgggaggggtctagcgagcaggccttccactccaccagcttccctgcaggggccttcgtgtgcttcctgtctgggagggttggggcagcaaatggacttcggtggccgaaaatggcttcttactggtcgcttcccccgctctgccttgcggcaggggctgctggcctgcaggcccttcttgtccacaccgggcatctccccgggctgccctcagcccttgtccttggtcttgtcctcctcctgggcaccatctttgcggctggggtcccgctttt

SEQ ID NO: 13098 - DNA, 925 bp, Artificial sequence
  DNA replication origin
ggcgcctctgcccggccgcccctactgggaggagaggagcccctctgcccggccagccgccccgtccgggagggaggtggtggggtcagccccccgcccggccagccgccccgtccgggaggtgaggggcgcctctgcctggccgcccctactgggaagtaaggagcccctctgcccggccagccgccccgtccggggagggaggcggggaggtcagccccccgcccggccagccgccccgtccgggagggaggcgggggggtcagccccccgcccggccagccgccccgtccgggaggtgaggggcgcctctgcctggccgcccctactgggaagtgaggagcccctctgcccggccagccgccccgtccgggaggtgaggggcgcctctgcccggccgcccctactgggaagtgaggagcccctctgcccggccaccaccccgtctgggaggtgtactcaacagctcattgagaacgggccatgatgacaatggcggttttgtggaatagaaaggggggaaaggtggggaaaagattgagaaatcggatggttgccatgtctgtgtagaaagaggtagacatgggagacttttcattttgttctgtactaagaaaaattcttctgccttgggatcctgttgatctgtgaccttacccccaaccctgtgctctctgaaacatgtgctgtgtccactcagggttaaatggattaagggtggtgcaagatgtgctttgttaaacaagatgcttgaaggcagcatgctcgttaagagtcatcaccactccctaatctcaagtacccagggacacaaacactgcagagggccgcagggtcctctgcctaggaaaaccagagacctttgttcacttatctgctgaccttccctccactactgtcctgtgaccctgccaaatccccctct

SEQ ID NO: 13099 - DNA, 1219 bp, Artificial sequence
  DNA replication origin
gcggctggccgggcggggggctgacccccccgcctccctcccggacggggcggctggccgggcggggggctgacctccccgcctccctccccggacggggcggctggccgggcagaggggctccttacttcccagtaggggcggccaggcagaggcgcccctcacctcccggacggggcggctggccgggcggggggctgaccccaccacctccctcccggacggggcggctggccgggcagaggggctcctctcctcccagtaggggcggccgggcagaggcgccccccacctcccggatggggcggcttgccgggcggggggctgacccccccacatccttcccggacggggcggctggccaggcgggggatgacccccccacctccctcccggatggggcggctggctgggcggggggctaacccccccacctcccttccggacggggcggctggccgggcggggggctgacccccacctccctcccagacggggtggctgccgggcggagacgctcctcacttctcagacggggcggttgccgggcggagggtctcctcacttctcagacggggcggccgggcagagacgctcctcacatcccagacggggcggcagggcagaggcgctccccacatctcagacgatgggcggcctggcagagacgctcctcacttcctagatgggatggcggctgggcagagatgctcctcactttccagactgggcagccaggcagagaggctcctcacatcccagacgatgggcggccaggcagagacgctcctcacttcccagacggggtggcggccgggcagaggctgcaatctcggcactttggggggccaaggcaggcagctgggaggtggaggttgtagcgagccgagatcacgccactgcactccagcctgggcaccattgaacactgagtgagtgaacgcgactccgtctgccatcccggcacctcgggaggccgaggctggcggatcactcgcggttaggagctggagaccagcctggccaacacagcgaaaccccgtctccaccaaaaaaatacgaaaaccagtcaggcatggcggcgcgcgcctgcaatcgcaggcactcggcaggctgaggcaggagaatcaggcagggaggttgcagtgagccgagatggcagcagtacagtccagctttggctcggcatcagggggagaccgtggaaagagagggagag

SEQ ID NO: 13100 - DNA, 1031 bp, Artificial sequence
  DNA replication origin
gcctgcgacccggcgtccgggcgcgctggagaggacgcgaggagccatgaggcgccagcctgcgaaggtggcggcgctgctgctcgggctgctcttggaggtaggggccggggaccgggtgctgccggaggcgcggcgcccaccatgctggcggctgggggcgcgcagttccgaggcgccccagaggaccttgcctgggagcgcagacggtggagcgacggggagccacagccctgcgcgcctcccggagctgggaggtgcgggaccctggtgacggggaggctcccgccccggtccgcgccttccgtcgttccttcggttttcgcaccccgcccccaccctgcgggtgagcgcgtttcccgcgccgaccgcctccgttagctcggggtgacctttgtgcaccgtccgccccctctccccgccgcagagggccgaggatcggatggacccggggttgggcgggggtggtcctcgggcgcggcgcaggcgcggagagcccggggcgccgggcagtttggggttaggaaaggatgggtgccgagccggggtgaggggagcgggcggaggggactgtggggaagtgtcgcgggagtgccgggagttgtggaggtgagcagcgggaggaggcgttcccgcgtgtgaaaatgaagtgcagcctttaggtgcggggaggaaattctgcggagagcctggctgggtgggggtgcggagccgaagccggcggggaacttgttgagcggcttccgggtgcgagcgcccgtgaccgcatccctggcggggaccgcggctgctcctggctgtgaaattgcatcctcggatggggccacatacttctcactaaagcaggttccttaaaatgcgaactagaggaattctggggtgtccagtctgaatcagggcttgttcaactttctccttagtttcattattctgaaggaaatttgcgttaaattaatgaagtcaaaagaaataggtaatgaatcccatgcctctgttttaggaagttgtgaaactatcttccttaatagtta

SEQ ID NO: 13101 - DNA, 1432 bp, Artificial sequence
  DNA replication origin
cgcagggctgtggctccccgtcgctccaccgtctgcgctcccaggcaaggtcctctggggcgcctcggaactgcgcgcccccagccgccagcatggtgggcgccgcgcctccggcagcacccggtccccggcccctacctccaagagcagcccgagcagcagcgccgccaccttcgcaggctggcgcctcatggctcctcgcgtcctctccagcgcgcccggacgccgggtcgcaggcgcgcttcgcgactcggcccccgcgcggggcgggcgggcagactgcagccgggagccgtcccgccgaccgctggggggcccggctgggagcgggcgggagccggggcgcgccgcgcagccctggctgcgctccgcccccggccgccgcgcgctcccgacacgcccggccgggcgcgcgcctgcgggctcccggaacccgaggcccggcctggggcgcggctgctgggcgctaggcccgcgacgctgaggtgcgcgcgccccgggcgggaggaggggctgcaccgcctggcgaatgggagggggactggcaggctctcccttcccaagggaggtcgtcctgtcgccctagactaaacccaggaaggcttttaaaagaagcagagtctccgcggggggaagcttgttccctgagaggtggccgcagacgaacccactgctcagtctggcatcccgaagccgctccgctcctggctctccccgctgttcctgcgcgcagcgggggcagtgcccccacacccacgcgtgatgggaaggccggcctgggggtgggaaggcccaccgaaatagatggtccccacacctcactgcttccttggatgtggctattttttatgccagtgttctcctgctctgaccctacttgaacttgaccgcaaccggccccgccttgcaggccaccctcccgcagcagaaaactgtgcggagctcgcgctgtcctcgcctccgctgaccccacctccatgtcctcacagacactattttttcacaacacagctcagatcccaccttcttcatgaggttattcaacaaacactattaaacttgtaagatgtaccagatcctgagttggaggctgagaggaggacaagaaaactgctcccgtagcctagagggagggagagtcgcttaaaccacctgatgcagaatgctgagtgcggagaccaggaggtgggtgcatcacagagggtcataaaggacatgagctgcgcagtacaggaggtggaaggagggggtcacacgaacagatgtcacccgaggcaagtccccaactctttcccagctttcaaagcctaatttgattaatatagagcatgcaccacctgactatacctgtcagagccagaacttacaagtaagacagaaacaatgcctatggccttcagtcatgctaaggcacctatctgacaagcctgcc

SEQ ID NO: 13102 - DNA, 965 bp, Artificial sequence
  DNA replication origin
ctgtgaggctgaggctgggcctgtgcaggccttcgagaggcaggaagccaggcctgcaaaggccgactggaggtcaagttctgggcctgaagaggccaccaaaagtcaaaagcggggcctgggaaggccactgagagccacgagctgggctgggccgaaagaggccactgggaggcaggagaagctgggcctggagaggctgactcgaggaagttttgcaccgggagaggccgccgagaggacggagctgggcccggggaggccaacttgcagctcttccaggcccacttccaggccaacttaaggacgacttaggcctgcagaggccgccgggaggctggagctgggcctggagaggccgacttcagcacgatttaggcctgcagaggtcgccgggaggcccaagctgggcctagaggagcccaccgaccggaggccgtttggggcctggagatgccgtcggagggcaggagctgagcctggcgaggccaccgtgaggcctgacctgggcctggggagcttggcttcaggaagttgtgggcctaccagggccactgggagctgggcgggagctgagtccaaagacattgttgggaggccggagtcgggcctggagatgcagccgggaggaagagctgggcccggagaggacgccgggaggctgcaagtgggtctggagaggctgacttgaggaggcccggcctctgcctccctcatggcggcctctgcaggcccagctgttcctcctggctgcatctctcggcccagctcctgcctcccagcaagcaagctcttttggctcagctcccgccggcgtttgtagaccccgaagtttctgcagccaagctcttcaggcccacatcctgcctcccagtggcctgtagagtcccagctctggcagcagaagagcatctgcaggccccgctgttgcctcccaggggcgtctccaggcccagctctcgccc

SEQ ID NO: 13103 - DNA, 1337 bp, Artificial sequence
  DNA replication origin
aggcaaggggtcacgctgacctctctctgcgtgggaggggccagtgtgaagcaaggggctcacaccgacctctgtcagcgtgggaggggccagtgtgaggcaaggggctcatgcggacctctctcagcgtgggaggggccggtgtgaggcaagggctcacgctgacctctctcggcatgggaggggccggtgtgaggcaaggggtcagcgtgggaggggccagtgtgaggcaaggggctcatgcggacctctctcagcgtgggaggggccggtgggaggcaagggctcatgctgacctctctcggcgtgggaggggccggtgtgaggcaaggggctcacgctgacctctctctgcgtgggaggggtcggtgtgaggcagggactcacgcttctgggcagggtgccagaggcatgagttgggcatcaacaggccaccgtgaggggggaactgggccgcacgcgggctgccgggaggcaggcagggacttggccccgggaggctgccgtgggggcgagagctgggcctggagaggcccctgggaggcaagagcggggcctgcagaggctgttctacagccagagctgggcctgtacaggccaccgggaggcagtaggtgggcccgaagagcttggctcgagaaagttcggggcctacaaaggcggctgggagctgggcaggagttgagccaaaagagcttgcttacttgctgggaggcagggccgggagacgccgacttcaggacgacttgggcctgcagaggtcgccaggaggcccaagctgggcgtggaggagcccaccgaccggagaccatttggggcctggagacgccattggagggcaggagctgatcctggagaggccaccgtgaggcctgacctgggcctggggagcttggcttcaggaagctgtgggccgaccaaggccgccaggagatgggcaggcgctgagtccaaaaaggttgttgggaggcagcagtcgggcctggagacgcagccgggaggaagagctgggcccggagaggatgccgggaggctgcaagtgagtctggagaggccgacttgaggaggcccggcctctgcctcccgcatggtggcctctgcaggcccagctgttcctcctggctgcatctctcggcccagctcctgcctcccagcaagcaagctcttttggctcagctcccgccggtgtttgtagaccccgaagtttctgcagccaagctcttcaggcccacatactgcctcccagtggcctgtagagtcccagctctggcagcagaagagcatctgcaggccccgctgttgcctcccaggggcgtctccaggcccagctctcgccc

SEQ ID NO: 13104 - DNA, 1623 bp, Artificial sequence
  DNA replication origin
gacgcagccgggaggaagagctgggcccggagaggatgccgggaggctgcaagtgagtctggagaggccgacttgaggaggcccggcctctgcctcccgcatggtggcctctgcaggcccagctgttcctcctggctgcatctctcggcccagctcctgcctcccagcaagcaagctcttttggctcagctcccgccggtgtttgtagaccccgaagtttctgcagccaagctcttcaggcccacatactgcctcccagtggcctgtagagtcccagctctggcagcagaagagcatctgcaggccccgctgttgcctcccaggggcgtctccaggcccagctctcgccccaccgcagcctctcggggccaagtccctgcctgctcccggcagcctgcgtgcagtcctgctcctccctcacggtggcctgttgaggcaggggctcacgctgacctctctccgcgtgggaggggccagtgtgaggcaaggggtcagcgtgggaggggcccgtgtgaggcaaggggtcagcgtgggaggggcccgtgtgaggcaaggggtcagcatgggaggggctggtgtgaggcaaggggtcagcgtgggaggggccggtgtgaggcaaggggtcagcgtgggaggggccggtgtgaggcaaggggtcagcgtgggaggggccggtgtgaggcaaggggtcagcatgggaggggccggtgtgaggcaaggggtcagcatgggaggggccggtgtgaggcaaggggctcacgccgacctctctcagcgtgggaggggccggtgtgaggcaaggggctcatgccgaccttcctcagcgtgggaggggtcggtgtgaggcagggactcacgcctctgggcagggtgccagaggcatgagttgggcatcaacaggccaccgtgagggaggagctgggccgcacgcgggctgctgggaggcaggcagggacttgtccccgggaggctgccgtgggggcgagagctgggcctggagaggcccctgggaggcaagagcgggacctgcagaggctgttctacagccaaagctgggcctgtacaggccaccgagaggcagtaggtgggcccgaagagcttggctggagaaagttcggggcctacaaaggcggctgggagctgggcaggagttgagccaaaagggcttgcttacttgctgggaggcagggccgggagacgccgacttcaggacgacttgggcctgcagaggtcaccgggaggcccaagctgggcgtggaggagcccaccgaccggagaccatttggggcctggagacgccatcggagggcaggagctgatcctggagaggccaccgtgaggcctgacctgggcctggggagcttggcttgaggaagctgtgggccgaccaaggccgccaggagatgggcaggcgctgagtccaaagaggttgttgggaggcagcagtcgggcctggagacgcagccgggaggaagagctgggcccggagaggacgccgggaggctgcaagtgggtctggagaggccgacttgaggaggttctgggcccggagaggccgccggaagggaaaaactgggcctagaaaggccgttgtgaggaatgagccccatgggcctgaagagg

SEQ ID NO: 13105 - DNA, 1293 bp, Artificial sequence
  DNA replication origin
agtccgacagtagacagaagttgggcaaaaggctgatttgaggaagttttgggcttcaagagtcagccaggaggcaggcactaggcctggaaatggcccgacagtcatgagttgggcctaaatgggccactgtgagggaggagctgtgcctgttgaggctgctggcaggcaggcagaaacttggcctggggcagccgccatgaggcaagagctgggcctggagaagcccctgggaggcaagagcacggcctgcagaggctgttctcaagtcaaagctgggcctgttcatgccaccgcgaagcggaaggcgggcctggagagtttgacttgaggaagttttgggcctacattggccgctgtgagctggacaggaactgggccaaaaaaggctgttgtgaggcagcagttgtgcctgtagactcagcccagaggaagagctgggcctggagaagcccccatgaggcagaggttgggcctgtagatgctgacaggaggcaggagctgggcctggagaggtcaacttgaggagattttgggccttcataggccaccaggaggcagcagttgggactagagaggctgacttgaggaagttttgggcctggagatgacgtcctgggacaggagctgggcctggagaggccaccgtgaggcaagagctggatgtagacaggccagtgtgaggcaagacctgggcctgtctaggctgctgggagacaggcaggaatctggccagggaaggttgccatgagacaaaagttgggcctggaaaggcccttgtgaggcatgagcttggcctaaagaggccactgggtggcaggagctgggtgtgtagaagctgctgaaaggttgggagcttggcttgggtggtccacagtgaggcagatgctgggcctgaagaatctgctgtgagacagatgttgggactgtagaggctgacaggaggcagaggctgggcctggagaggctgccaagatgcaggagctgggcctggagaggctgccaagaagcatgagctgggcctggtgaggtcgacttgaggaagttcagggcctggagagaaggctgggaggcaggagctgggtctaaagaggccattgtaacggtggagctgtgcctgtggaggctgttgtgaggcagtagcctcatctgcggagactgccgtgaggtagggtatgggcctaaataggccattgtgagtcatgagcttggtctgtggaggctgactggagaaagttctgggcctggagaggctgccgggaggtaggagttgggccaaaagatttaagcaca

SEQ ID NO: 13106 - DNA, 1344 bp, Artificial sequence
  DNA replication origin
tcaaaatagataaaagacctaaaagtaagacctgaaatcataaaactctgagaagataacataggggaaaatgtcctggacattggtcttgacaatactttttttttttttttgagatggagtttcgctcttgttaaccaggctggagtgcaatggcgctatctctgctcactgcaacctccacctcccaggttcaagcaattctcctgcctcagcctcccaagtagctgggattataggagcccaccaccatgcccagctaattttggaggctgaaaactggacatcttatgtagaaccatagaaactgagataagtagattttatgtctgaaactgacatgccttttcttttaccaggcctttagtacagaggtttgtgtttctctgagtaaagctgggcttgagatttgatgttgctatagtgtgattcttactaccctatgggctttttttggcgggggatagagtttcactcttgttgcccaggctggagtgcagtggcacaatctctgctcattgcaacctctgcctcctgagttcaagcgattctcctgcctcagcctcctgagtagctgggattataggcatgcgccaccacgcccgactaattttgtatttttagtggagagggagtttctccatgttggtcagactggtctcaaactctcaacctcaggtgatctgctcgcctctgcctcccaaagtgctgggattacaggcatgagccactgcgcctggcctaccctatgggctttgaatgcctctggtgataccttgtgttgagggtggggttggtttgccagaggatgtttttctgatgatgatttcaccctcaaccttaagtcttccttttgtgctatgcctcagaaagagtatgtctcttgcaatatctcttgcaaagaatatgtatcttgacagcagttagcctggtgatgaaggtacgtgagaatacttttttatttgattgccagtcttaggcaaacactctccctctgggccccagggatttgaccttctctttctcttcttctgacatggttctgaatccattgtgaatttctgcacatcttctagggcttcaagctttctttgtgttccctactttcagcagcaatgtgctttcaccagcgccctaagagagtgcttcctggctcttcacccatagatgaaggcttttttattctgtagaggagaaagttgtgagtggagcttcttgccagcattgctgctgttgcatgtcccagttctgtaacttgagagagatatttttttttcagagtcctatcaatctttcactgaatgtctagttgagttcaaggagaaaaagttttcaaggagctac

SEQ ID NO: 13107 - DNA, 911 bp, Artificial sequence
  DNA replication origin
gttgcccaggctggtctcaaactcctagcctcaaatgatcctcctgccttgggctcttaaagtgctgggattataggagtaagccaccgtgcccggccccttagcttctctttcgatgagctgctgctcattgctagggaggagggtggagaaggagggcatcactatctattgtgaggaaaagttttagttctggcaaccatgaatatcttactcagcaaaacagactaccatctggaaatttagttcctagactgactttgtgaatacagcccaatccagttgcctgagcttagtgggacatgactcaggccagaatttgggttttggaggtgagacaggctaaagtggcctgaagagccctgcctgggccagaacctgggttggaggacacaggatgcaaagacaacctttgtgggtttggagaggccaaggctgaggaagtgcccagagcccactctgtatgcgtgtgtgtgagtgtgttggggcatctgccctcagcagggtgggtgtgtttgtgtgtgtcagtagtggtctgtgtgtgacaaacatctgctctccgtgtgtgtatctgtctgtatttgggggatggttagtgtgatcgtgtagtgtattgaggcaacccatgcccacagtgatgtgtgatttgtctgttttcgtgtgcacgtcgggtggtgtgagtcgctgtgtggtatctgtcctctgtggtaagtgtgtgcatgtgcacatgcatgtgtttgtgtgtggcggggtggaatgtgtgactgatggtgtgtatggtctgtgtggagaggagcatgtgcactaagcgtgtgagtgtgtgggggggtgtatggttgtgtggtgcattgggggaatgtgcatcatcagtggtgtgctgtttgtatttatgtatcagtcaatgtgtgtgt

SEQ ID NO: 13108 - DNA, 1372 bp, Artificial sequence
  DNA replication origin
aagaccttcctataaaagaccaaaaatctgaaagggacacggggcgggtgacaggaatggggacagcggggacagcggccgcccctcccgccacctgccgcctcccgccgccgccgccgcccgccgccgccgccgccgccgccgcccgccgcccgccgccgccgccgcccgccgcccgccgcccgccgcccgccgcccgccgccccccgcctccgccccccgcctccgccccccgcctccgccccccgcctccgccccccgcctccgccccccgcctccgccccccgcctccgcctcccgcctccgcctcctcccggcgcgcactcacctccgcagacaaagggcgcttcggcaggctccgccccctgacgccgccgccgccgccgccgccgccgccgccgccgccgcggtggacccgggagggagaaggtgccgagggccccgcagcctgagccaatgacgcccggtgactgggctcctggggccggtccagccaccggcgcgccagacctgctctgaggacagcctccccgcaatggcggcgcaagacgctggcctcagatccccaatacgcatgcgctggcggcgctccgagcctgcttccttcatcgcaatcctcatcgccggggctcctgactcccaccagctttcccgggtctgtttttcatcgggactatgcggaccccggggaccgcggcctcgagccttcccagaattttccggtcctagaggaacgagggggacgggccgaggacccgtcccttcgtccctgccaattagaagcgttggactgtccatctccatggtgacgacacaagccttcctttcagtcctggaatcacccctccttcccatcaatttcatattgatgaaactcaaaatataatgatgatgatgttattggccgggcgcggtggctcacgcgtgtaatcccagcactttgggagcttgaggctggtggatcacctgaggtcaggagttcgagaccagcctggccaatatggtgaaacccccgtctctaataaacgtacaaatattagctgggcgtggtgacgggcgcctgtaatcccagctattccggaggctgaggcaggagaatcgcttaaattcgggacggggaggttgcagtgagcagagatcacatcattgcactccagcctgggcagcagagtaagactccatctcaaaaaaaaatacaataatgatatcattatatcattatatagtatatgctactgatgcgaagaatggaattttattttatttatttatttatttattttttgagacggagtcttgctctgtggcccaggctggagtgcagtggtgagatctccgcttactgcaagctccgcctcccgggttcatgcca

SEQ ID NO: 13109 - DNA, 1759 bp, Artificial sequence
  DNA replication origin
ggcgagggtggagccgcagagcggcccgtcccctccgtgaccttgagcccgaggacgccccgaccccgccccagctccggccccaccccagctccggccccactgccccgaggccgggcagccacccgcgctggggacagggccggggcggagaccggcgccgggaaacccgcgccctccgcctcgcggcggcccctccccggcacctcccgggaagggcggcgctgctcaccggagcctgggcaggaggctgcagggggccgcccgctgcaggaggccgccggcccaggccgctccgcgggcgcgcagcactcgcgccgccatcttgctcggcgcctcggctcccaccgcccgggcgccgccgctgacgccgccgccgcgcgacccctcccccggccgggccccaacgcggccactgcagtgcggggcgcggccgccagggggagcagggcgcgcggccgcgggggtcggcggggcgtccaggcgccaaggcccggccgctgcgggaaagcgcgaagcccaagcgcagtcagtgcaagccgatcacttcagcgggaggagctcggtgcccagaagcgcgggtgcagaagggacaagggcataacttcaatgatcagggaaaactccaaaaggaaagagtaacactgtgcctaggggaatccagggcctggggcggggcagtggcagtgggtttacccccaccccaccccgccaatgtcttttaaattttgtagtatatgaatatattgtcatttcaaaaagccccacaacgctttaacaagtgcattctggggccggacgcaatagctcacgcctgtcatcccagcactttgggaggctgaggccggagatctcttgaggccaggagttcgagaccaacctgggcaacatagcgagccctcactgtgcaaaaacatttttaaattagccgggcatggaggagcacgtctgtgatgccagctacactggagactgaggcagaaggatcgcttgagttcaggaggtggaggctgtagtgaactatgatcgtgccactgcactccagcctgggcaaacacacgacgtcctgtagcgaaagaaagaaagagagaaagagagagaaagaaagggagggaaaggaaggaaggaaggagaaagaaaggaggaaggaagggaggcaggagaaagaaaggagggaaggaaggagaaagaaaggaagggagggaggcaggagaaagaaagaaagagagaaaggaaaagaaaagaaagcaagtgaggaaaaaattaaaaaacaccatacacacacaaaaaaaattaaggagaaaggactgggaaggttctcttgaggtcttgggactgcatcgttcccattcatttcagcaccggtgggcactggccatggggagtccttggtaccttaccctcaaggccgtctgggtctagtggggacagaatgtacaatgatgattggaccgagtgtgttaagtgtcaaaatggacaggttcatgagacacgaaagaggcacggaaagagagcatgtaaccgggggtggctgtgaattagaggatagatggggagaaagttctccaaggagctggcaggacatatcagtcccaggggaagaagggagggcatccctgtcttgaggaaataacttaagcaaaggcgtggatctgggtggctggcgctatagagggaaaaatgtgtcctccaggaagattttttaaaaagccacaaatgagccaggcacggtggctcacgtctgtaatcccagcacttc

SEQ ID NO: 13110 - DNA, 773 bp, Artificial sequence
  DNA replication origin
gatggcggcgcgagtgctgcgcgcccgcggagcggcctgggccggcggcctcctgcagcgggcggccccctgcagcctcctgcccaggctccggtgagcagcgccgcccttcccgggaggtgccggggaggggccgccgcgaggcggagggcgcgggtttcccggcgccggtctccgccccggccctgtccccagcgcgggtggctgcccggcctcggggcagtggggccggagctggggtggggccggagctggggcggggtcggggcgtcctcgggctcaaggtcacggaggggacgggccgctctgcggctccaccctcgcccgggaaggcccccgaggcttggcccggaggccacatcctccccgcggcgctggcccggcctgcagggccctgaccggcgcgacccgtggccagggacagggacagcgcgcgcctgaggccgcaggccccggacgccgtctgctgggtcctcgccggaggctgttccaagcctgagtggctgcgtctgccgaggacgttggtgaccctggtctctgaggtgccgggagtagggaataaaagagtaaagcattgtcccgggccagctctccgcggagcgtaggggaagttagagcttggaggaggtcaaatcacttaacgtcttggagttgaaatttaaagccggccgtggatctaaaagtacttagagttatcagcactaagttcaggcgtggggctcttgtttaaacttttttttttttctaacttcagtggattggacgtttggttg

SEQ ID NO: 13111 - DNA, 1457 bp, Artificial sequence
  DNA replication origin
gcagcgccgcgccgtggggggacgctcctagggtccccggggcactggttgggggaggtgttgggcgcacgtacccaggctcaggtgaggcgagtgcgcatcttgggatgcagctggcgctggcggcgcttgcgctggccattgaggagcttctgcgcgaccttgcgctcgtgcccgccaggtgcaggccagttggtgcgcagcgcctgctcgcgccgagtccggcccttgctgcgccctgccccgcaggccgggaagtcgcgcaggtagtagtagtccaggcagtcgtaaagctcctcctcgtagcttatgggtggcggcggccgagccagagcctgcagacgtggaagcgcccgctctgcgggcgcttccatcctgcccaggcctgtggccaccggcggccacctgcccgcgtctgggcgctcctggaagacccagcagccccgcctcgagttccgatgggctccgcgtgaaggtgggggtgccttcggcgacgccacagaggcggaccttcgacgacgtcacagtggcggtacagtgcctggagcagggctgtcttctccttggagtgcagcctggtaaccgggacctccccgccaggtcctgttgttgctggagaagggtagctgacaaactccaactcagcacagtgtttatgttggtcaaaaataggaaactatgttcaggcgcggcggaggtgggaggatcccttcaggccaggcagtcaagagcagcctgggcaacatggcgcgaccccatctctgaagtcccacctcagcttcccagctacttgaactccaaggttcatggctccaatgagctatgttcccactacatcaccccagcctgcgagactgaggtaaactctgtctaaaaaaataaaaaagaaaactatccaagtgtgcaatagggagggactgcttaaagaaaacatgaggctgactgggccctgtaatcccagcattttgggaggccgaggcgtgaggatggatggcttgggcaacatgacgaaaccccgtccctacaaaagatacaaaaattagccgggcgcggtgcacccctggcctaatttttgtattttttgtagagatgggggtctcgctatgttgcccaggccagtttcgtcctgggttcaagtgatcttctcaccttggcctttagagttgttgggattacagctgtaacccttcctgggttaggctatttaataacataagaaagtgtggtgactccgcctcaccttgggaggccaaggcgggtggatcatctgaggtcaggagtttgagaccatcctggcccatgtggtgaaacctggtctctacaaaaaacgcaaaaattagctgtgtgtggtggcacatgcctgtaatcccagctactcagaaagctgagatgggagaattgcttgaacctgggaggtggaggttgcagtgagccgaggtcgcaccactgcatcccag

SEQ ID NO: 13112 - DNA, 1273 bp, Artificial sequence
  DNA replication origin
ggggctgaccccccaacctccctcccggaaggggcggctggccggccagaggggctcctcacttcccagtaggggcggccgggcagaggcacccctcacctcccggacggggcggctggccgggcggggggctgaccccccacctccctcccggatggggcggctggccgggcggggggctgacccccccacctccctcccggacggggtggctggccgggcagaggggctcttcacttcccagtaggggcagctgggcagaggcgcccctcactggccgggcggggggctgacccccccacctccctcccggacggggcggctggccgggcggggggctgaccccccacctccctcccagacggcagacggggtggctggcctggcgggggctgacccccacctccctcctggacagggcggctgccgggcggagatgctcctcacttcccagatggggtggctgccgggcggaggggctcctcacttctcagatggggcggctgccgggtggagggtctcctcacttctcagatggggcggttgccaggcggagggtctcctcccttgtcagatggggcggctgggcagagacgctcctcacctcccagacggggtcgcgaccgggcagaggcgctcctcacatcccagacggggcggtggcgcaaaggcactccccacatctcagacgatgggcggctgggcagagacgctcctcacttcctagatgggatggcggccgggaagaggcgctcctcacttcctagatgggatggcggctgggcagagacgctcctcactttccagactgggcagccaggcagaggggctcctaacatcccagatgatgggcggccaggcagagacgctcctcacttcctagattgggtggcggccgggcagaggctgcactctgggcactttgggaggccaaggcaggcggctgggaggtggaagttgtagcgagccgagatcacgccactgcactccatcttgggcaccattgagcactccacaaatccttaatgtttagctcctacagtgggccatatcatttgaggttgaggtgccactatacctccatggttccagataataggaactcttgccatacttcttatcatttctaccatctgaccattttgttcagaccagctaaatatagagtagccatggcatgcagactgagaggtgtaattcaaactaaacatccccttaggggaccaactaataatgattccatagtaatcgttgtgcagcacctctgcctgtt

SEQ ID NO: 13113 - DNA, 902 bp, Artificial sequence
  DNA replication origin
gagggaggtggggggtcagccccccgcccggccagccgccccgtccgggaggtgaggggcacctctgcccggccacccctactgggaagtgaggagcccctctgcccggccagccgccccttccgggagggaggttggggggtcagccccccgcctggccagtcgcccagtccgggagggaggtgggggggggtcagccccccacccggccagccgccccgtccgggagggaggtgggggggtcagccccccgcccagccagccgcctcgtccgggaggtgaggggcgcctctgcccggccgcccctactgggaagtgaggagcccctctgcccggccagccaccccatccgggagggaggtgggggggtcagccccccgcctggccagccgccccatccgggagggaggtggggggggtcagctccccgcccggccagccgccccacctgggaggtgaggggcgcctctgcccggccgcccctactgggaagtgaggagcccctctgcccggccaccaccccgtctgggaggtgtgaccaacagcccattgagaacgggccatgatgacaatggtggttttgtggaatagaaagcggggaaaggtggggaaaagattgagaaatcggatggttgccgtgtctgtgtggaaagaagtagacatgggagacttttcattttgttctgtactaagaaagattcttctgccttgggatcctgttgatctgtgaccttaacccccaaccttgtgctctctgaaacatgtgctgtgtccactcagggttaaatggattaagggcggtgcaagatgtgctttgttaaacagatgcttgaaggcagcatgcttgttaagagtcatcaccactccctaatctcaagtacccagggacacaaacactgcgg

SEQ ID NO: 13114 - DNA, 1159 bp, Artificial sequence
  DNA replication origin
gctgcgtggaaaggcgcggggcgcctgcgtggcgaaggaactcagctgcctgacacgcccgcaagtaccacggacctgctccggcctcggcctctgcgggccaaacgcggagcgaggcgtgaacgccgggcgggggcgtggcgtccggtggggatgtgtcagccgggggtgggggggggcgggggggcgtcctctccagggggcgtggctctgtgctccggtgaaggccagaggcactccctgggctgggcggaagcgcgactgaccgtggccttgggcaggcggtggctgcaacgaggaggagctggggtcgcagtgggttgcggcgccgagcccggacggaagcgccgaggggccggggtcgccaagggctgctgcggcccttcccggagcccagtgctgggcacgcaaggcgctggctcaggcgcacccagtggccgcagctgcagcgggaggagcgcggcggcgcggggtcctcggagacagcgtttgtccgagaagccttcctggggcggtgggtgggaagtgggggccggagctgcagcgggaggcgtcctgtctcctcaggtcggcaccatgcccctgcagccctgagcggggccctgctgggctgcctctgcctggcattgcttttcctgggcggtgcggacaagcgcctgcgtgataaccatgagtggaaaaaactatggtccagcactggcctgagacagtatgcgagacagttgaaaacgactgtagagaccctccggattactggacaatacatgggactatggcccgataaaagtgaaggatgtaatggatcgtggcactttaatttagaagagattaaggatcttttgccggaaatgaaggcatagtggcctgatgtaattcactcgtttcccaatcgtagccacttccggaagcatgaagaagcatgggacctctgccgccctggtggacgcactcaactcccagaagtactttagcagaagccgggaactctacagggagctggacagcaacagtgtgctcctaaaactgcggctaaaaccatccgtcaattactaccaagttgcagattttaaagatgcccttgtcagagtgtatggagtgacacccaaaatccagtgccttccgcgaagccaggatggggaagtacagacaattggtcaga

SEQ ID NO: 13115 - DNA, 997 bp, Artificial sequence
  DNA replication origin
gctagctgggcgtggagagtccactgtgaagccgaggccgggcacgtgcaggccttcaagaggcaggaagccgggcctgcaaaggccgactggaggtcaagttctgggcctgaagaggccaccaaaagtcaaaagcggggcctaggaaggccgctgagagccatgagctgggctgggccgaaagaggccactgggaggcaggagaggctgggcctggagaggctgactcgaggaagttttgcacctggagaggccgccgagaggacggagctgggcccggggaggccaacttgcagctcttccaggcccacttccaggatgacttgagtacgacttaggcatgcagaggccgccgggaggctggagctgggcctggagaggccgacttcaggacgatttgggcctgcagaggccgccgggaggcgcaagatgggcctagaggaacccaccgaccggaggccgttgggggcctggagacgccgtcggagggcaggagctgagcctggagaggccaccgtgaggcctgacctgggcctggggagcttggcttcaggaagttgtgggcctaccagggccactgggagctgggcgggagctgagtccaaagaagttgttgggaggccggagtcgggcgtggagacgcagctgggaggaagagctgggcccggagaggatgccgggaggctgcaagtgggtctggagaggccgacttgaggaggcccggcctctgcctcccgcatggcggcctctgcaggcccagctgttcctcctggctgcatctctcggcccacatcctgcctcacagcaagcaagctcttttggctcagctcccaccggcgtttgtagaccctgaagtttctgcagccaagctcttcaggcccacatcctgcctcccggtggcctgtacagtcccagctctggcagcagaagagcgtctgcaagccccgctgtggcctcccaggggcatatccaggcccagctctccccccactgcggc

SEQ ID NO: 13116 - DNA, 890 bp, Artificial sequence
  DNA replication origin
tcacgctgacctctctcagcgtgggaggggccactgggaggcaagggctcatgctgacctctctcggcgtgggaggggccggtgtgaggcaagggatcagcgtgggaggggccagtgtgaggcaaggggctcacgccgacctctctcagtgtgggaggggccggtgtgaggcaagggctcatgccgacctcactcagcgtgggaggagccagtgtgaggtagcgactcgcgcctctgggcagggtgccagaggcatgagttgggcatcaacaggccaccgtgagggaggaagtggcccgcacgcgggctgccgggaggcaggcagggatttggccccaggaggccgccgtgggggtgagagatgggcctggagaggcccctgggaggcaagagcgggtcctgcagaggctgttctacagccagagctgggcctgtacaggccaccgagaggcagtaggtgggcccgaagagcttggcttgagaaagttcggggcctacaaaggcggctgggagctgggcaggagttgagccaaaagagcttgcttacttgctgggaggcagggccgggagaagctgacttcaggacgacttgggcctgcagaggtcgccaggaggcccaagctgggagtggaggagcccaccgaccagagaccatttggggcctggagacgccatcggagggcaggagctgatcctggagaggccaccgtgaggcctgacctgggcctggggagcttggcttgaggaagctgtgggcggaccaaggccgccaggagatgggcaggcgctgagtccaaagaggttgttgggaggcagcagtcgggcctggagacggagccgggaggaagagctgggcccggcgaggacaccgggaggctgcaagtggttct

SEQ ID NO: 13117 - DNA, 679 bp, Artificial sequence
  DNA replication origin
tgagccaaaagagcttgcttacttgctgggaggcagggccgggagaagctgacttcaggacgacttgggcctgcagaggtcgccaggaggcccaagctgggagtggaggagcccaccgaccagagaccatttggggcctggagacgccatcggagggcaggagctgatcctggagaggccaccgtgaggcctgacctgggcctggggagcttggcttgaggaagctgtgggcggaccaaggccgccaggagatgggcaggcgctgagtccaaagaggttgttgggaggcagcagtcgggcctggagacggagccgggaggaagagctgggcccggcgaggacaccgggaggctgcaagtggttctggagaggccgacttgaggaggcccggcctctgcctcaagcatggcggcctctgcaggcccagctgttcctcctgcctcccagcaagcaagcacttttggctcagctcccgccggcgtttgtagaccccgaagtttctgcagcaaagctcttcaggcccacatcctgcctcccagtggcctgcacccagagtcccagctctggcagcagaagagcgtcagcaggccccgctgttgcctcccaggggcgtctccaggcccagctctcgccccaccacggcctcccgcggccaagtccctgcctgctcccggcagcc

SEQ ID NO: 13118 - DNA, 1692 bp, Artificial sequence
  DNA replication origin
aggcgctgagtccaaagaggttgttgggaggcagcagtcgggcctggagacggagccgggaggaagagctgggcccggcgaggacaccgggaggctgcaagtggttctggagaggccgacttgaggaggcccggcctctgcctcaagcatggcggcctctgcaggcccagctgttcctcctgcctcccagcaagcaagcacttttggctcagctcccgccggcgtttgtagaccccgaagtttctgcagcaaagctcttcaggcccacatcctgcctcccagtggcctgcacccagagtcccagctctggcagcagaagagcgtcagcaggccccgctgttgcctcccaggggcgtctccaggcccagctctcgccccaccacggcctcccgcggccaagtccctgcctgctcccggcagcctgcgtacggccctgcttctccctcacggtggcctgttgaggcaggggctcacgctgacctctctcggcgtgggaggggccagtgtgaggcaaggggctcacgctgacctctctcggcgtgagaggggccggtgtgaggcaaggggctcacgctgacctctctctgcgtgggaggggccggtgtgagccaaggggtcagtgtgggaggggccggtgtgaggcaaggggctcacgccgacctctctcagcgtgggaggagccagtgtgaggcagggactcacgcctctgcgcagggtgccagcggcatgagttgggcatcaacaggccaccgtgagggaggaactgggccgcacgcgggctgccgggaggccgccgtgggggcgagagctgggcctggagaggcccctgggaggcaagagcgggacctgcagaggctgttctaccgccagagctgggcctgtacaggccaccgagaggcagtaggcgggcgcgaagagcttggctcgagaaagttcggggcctacaaaggcggttttgagctgggcaggagttgagcccaaagagcttgcttacttgctgggaggcagggccgggagacgccgacttcaggacgacttgggcctgcagaggtcgccaggaggcccaagctgggcgcggaggagcccaccgaccggagaccgtttggggcctggagacgccatcggagggcaggagctgatcctggagaggccaccgtgaggcctgacctgggcctggggagcttggcttgaggaagctgtgggccgaccaaggccgccaggagatgggcaggcgctgagtccaaagaggttgttgggaggcagcagtcgggcctggagacgcagccgggaggaagagctgggcccggagaggacgccgggaggctgcatgtgggtctggagaggccgacttgaggaggcccggcctctgcctccctcatggcggcctctgcaggcccagctgttcctcctggctgcatctctcggcccagctcctgcctcccagcaggcaagctcttttggctcagctccctccagcgtttgtagaccccgaagtttctgcagccaagctcttcaggcccacatcctgcctcccggtggcctgtacagtcccagctctggcagcagaagagcgtcagcaggccccgctgttgcctcccaggggcgtctccaggcccagctctcgccccaccacggcctcccgcggccaagtccctgcctgctcccggcagcctgcgtacggccctgctcctc

SEQ ID NO: 13119 - DNA, 1947 bp, Artificial sequence
  DNA replication origin
ccgggaggaagagctgggcccggagaggacgccgggaggctgcatgtgggtctggagaggccgacttgaggaggcccggcctctgcctccctcatggcggcctctgcaggcccagctgttcctcctggctgcatctctcggcccagctcctgcctcccagcaggcaagctcttttggctcagctccctccagcgtttgtagaccccgaagtttctgcagccaagctcttcaggcccacatcctgcctcccggtggcctgtacagtcccagctctggcagcagaagagcgtcagcaggccccgctgttgcctcccaggggcgtctccaggcccagctctcgccccaccacggcctcccgcggccaagtccctgcctgctcccggcagcctgcgtacggccctgctcctccctcacggtggcctgttgaggcaggggctcacgctgacctctctcggcgtgggaggggccggtgtgaggcaagggctcacgctgacctctctcggcgtgggaggggccggtgtgaggcaaggggctcacgctgacctctctcggcgtgagaggggccggtgtgaggcaaggggctcacgctgacctctctctgcgtgggaggggccggtgtgagccaaggggtcagtgtgggaggggccggtgtgaggcaaggggctcacgccgacctctctcagcgtgggaggagccagtgtgaggcagggactcacgcctctgcgcagggtgccagcggcatgagttgggcatcaacaggccaccgtgagggaggcactgggccgcacgcgggctgccgggaggccgccgtgggggcgagagctgggcctggagaggcccctgggaggcaagagcgggacctgcagaggctgttctaccgccagagctgggcctgtacaggccaccgagaggcagtaggcgggcgcgaagagcttggctcgagaaagttcggggcctacaaaggcggttttgagctgggcaggagttgagcccaaagagcttgcttacttgctgggaggcagggccgggagacgccgacttcaggacgacttgggcctgcagaggtcgccaggaggcccaagctgggcgcggaggagcccaccgaccggagaccgtttggggcctggagacgccatcggagggcaggagctgatcctggagaggccaccgtgaggcctgacctgggcctggggagcttggcttgaggaagctgtgggccgaccaaggccgccaggagatgggcaggcgctgagtccaaagaggttgttgggaggcagcagtcgggcctggagacgcagccgggaggaagagctgggcccggagaggacgccgggaggctgcatgtgggtctggagaggccgacttgaggaggcccggcctctgcctccctcatggcggcctctgcaggcccagctgttcctcctggctgcatctctcggcccagctcctgcctcccagcaggcaagctcttttggctcagctccctccagcgtttgtagaccccgaagtttctgcagccaagctcttcaggcccacatcctgcctcccggtggcctgtacagtcccagctctggcagcagaagagcgtcagcaggccccgctgttgcctcccaggggcgtctccaggcccagctctcgccccaccacggcctcccgcggccaagtccctgcctgctcccggcagcctgcgtacggccctgctcctccctcacggtggcctgttgaggcaggggctcacgctgacctctctcggcgtgggaggggccggtgtgaggcaagggctcacgctgacctctctcggcgtgggaggggccggtgtgaggcaaggggctcacgctgacctctctcggcgtgagaggggccggtgtgaggcaaggggctcacggtgacctctctctgcgtgggaggggccggtgtgagccaaggggtcagtgtgggaggggccgg

SEQ ID NO: 13120 - DNA, 1382 bp, Artificial sequence
  DNA replication origin
gtcagcaggccccgctgttgcctcccaggggcgtctccaggcccagctctcgccccaccacggcctcccgcggccaagtccctgcctgctcccggcagcctgcgtacggccctgctcctccctcacggtggcctgttgaggcaggggctcacgctgacctctctcggcgtgggaggggccggtgtgaggcaagggctcacgctgacctctctcggcgtgggaggggccggtgtgaggcaaggggctcacgctgacctctctcggcgtgagaggggccggtgtgaggcaaggggctcacggtgacctctctctgcgtgggaggggccggtgtgagccaaggggtcagtgtgggaggggccggtgtgaggcaaggggctcacgccgactctctcagcgtggaggagccagtgtgaggcaggactcacgcctctgcgcagggtgccagcggcatgcttgggcatcaacaggcccccgtgagggaggaactggtccgcacgcgggctgccgggaggccgccgtgggggcgagagctgggcctggagaggcccctgggaggcaagagcgggacctgcagaggctgttcttccgccagagctgggcctgtacaggccaccgagaggcagtaggcgggcgcgaagagcttggctcgagaaagttcggggcctacaaaggcggttttgagctgggcaggagttgagcccaaagagcttgcttacttgctgggaggcagggccgggagacgctgacttcaggacgacttgggcctgcagaggtcgccaggaggcccaagctgggcgcggaggagcccaccgaccggagaccgtttggggcctggagacgccatcggagggcaggagctgatcctggagaggccaccgtgaggcctgacctgggcctggggagcttggcttgaggaagctgtgggccgaccaaggccgccaggagatgggcaggcgctgagtccaaagaggttgttgggaggcagcagtcgggcctggagacgcagccgggaggaagagctgggcccggagaggacgccgggaggctgcatgtgggtctggagaggccgacttgaggaggcccggcctctgcctccctcatggcggcctctgcaggcccagctgttcctcctggctgcatctctcggctcagctcctgcctcccagcaggcaagctcttttggctcagctccctccagcgtttgtagaccccgaagtttctgcagccaagctcttcaggcccacatcctgcctcccggtggcctgtacagtcccagctctggcagcagaagagcgtcagcaggccccgctgttgcctcccaggggcgtctccaggcccagctctcgccccaccacggcctcccgcggccaagtccctgcctg

SEQ ID NO: 13121 - DNA, 1446 bp, Artificial sequence
  DNA replication origin
gcccggagaggacgccgggaggctgcatgtgggtctggagaggccgacttgaggaggcccggcctctgcctccctcatggcggcctctgcaggcccagctgttcctcctggctgcatctctcggctcagctcctgcctcccagcaggcaagctcttttggctcagctccctccagcgtttgtagaccccgaagtttctgcagccaagctcttcaggcccacatcctgcctcccggtggcctgtacagtcccagctctggcagcagaagagcgtcagcaggccccgctgttgcctcccaggggcgtctccaggcccagctctcgccccaccacggcctcccgcggccaagtccctgcctgctcccggcagcctgcgtacggcctgctcctccctcacggtggcctgttgaggcaggggctcacgctgacctctctcggcgtgggaggggccggtgtgaggcaagggctcacgctgacctctctcggcgtgggaggggccggtgagaggcaaggggctcacgctgacctctctcggcgtgagaggggccggtgtgaggcaaggggctcacgctgacctctctctgcgtgggaggggccggtgtgagccaaggggtcagtgtgggaggggccggtgtgaggcaaggggctcacgccgacctctctcagcgtgggaggagccagtgtgaggcagggactcacgcctctgcgcagggtgccagcggcatgagttgggcatcaacaggccaccgtgagggaggaactgggccgcacgcgggctgccgggaggccgccgtgggggcgagagctgggcctggagaggcccctgggaggcaagagcgggacctgcagaggctgttctaccgccagagctgggcctgtacaggccaccgagaggcagtaggcgggcgcgaagagcttggctcgagaaagttcggggcctacaaaggcggctgggagctgggcaggagttgagcccaaagagcttgcttacttgctgggaggcagggccgggcgacgccgacttcaggacgacttgggcctgcagaggtcgccgggaggcccaagctgggcgtggaggagcccaccgaccggagaccatttcgggtctggagacgccattggagggcaggaggtgatcctggaggccaccgtgaggcctgacctgggcctggggagcttggcttgaggaagctgtgggccgaccaaggccgccaggagatgggcaggcgctgagtccaaagaggttgttgggaggcagcagtcgggcctggagacgcagccgggaggaagagctgggcccggagaggacgccgggaggctgcaagtgggtctttagaggccgacttgaggaggttctgggcccggagaggccgccggaagggaaaaactgggcctggaaaggccgttttgaggaatgagccccatgggcctgaagaggccactggca

SEQ ID NO: 13122 - DNA, 1128 bp, Artificial sequence
  DNA replication origin
tcatgagttgggcctaaatgggccactgtgagggaggagctgtgcctgttgaggctgctggcaggcaggcagaaacttggcctggggcagccgccatgaggcaagagctgggcctggagaagcccctgggaggcaagagcacggcctgcagaggctgttctcaagtcaaagctgggcctgttcatgccaccgggaagcagaaggcgggcctggggagtttgacttgaggaagttttgggcctacattggccgctgtgagctggacaggaactgggccaaaaaaggctgttgtgaagcagcagttgtgcctgtagactcagcccagaggaagagctgggcctggagaagcccccatgaggcagaggttgggcctgtagatgctgacaggaggcaggagctgggcctggagaggtcaacttgaggagattttgggccttcataggccaccaggaggcagcagttgggactagagaggctgacttgaggaagttttgggcctggagatgacgtcctgggacaggagctgggcctggagaggccaccgtgaggcaagagctggatgtagacaggccagtgtgaggcaagacctgggcctgtctaggctgctgggagacaggcaggaatctggccagggaaggttgccatgagacaaaagttgggcctggaaaggcccttgtgaggcatgagcttggcctaaagaggccactgggtggcaggagctgggtgtgtagaagctgctgaaaggttgggagcttggcttgggtggtccacagtgaggcagatgctgggcctgaagaatctgctgtgaggcagatgttgggactgtagaggctgacgggaggcagaggctgggcctggagaggctgccaagatgcaggagctgggcctggagaggctgccaagaagcatgagctgggcctggtgaggtcgacttgaggaagttcagggcctggagagaaggctgggaggcaggagctgggtctaaagaggccattgtaacggtggagctgtgcctgtggaggctgttgtgaggcagtagcctcatctgcggagactgccgtgaggtagggtatgggcctaaataggccattgtgagtcatgagcttggtctgcggaggctgactggag

SEQ ID NO: 13123 - DNA, 1789 bp, Artificial sequence
  DNA replication origin
attggtcaaaccccccagtttttatacccaacatgtcaacaaacccgtccaaaaaatataaataaaaccataccaaggccatattgtgatttaggagactggcaaggcagagctttctattgacttgctgtgatttctaattttaactacttagaagagtgaaaaataggttctccttagagtttctttttttttcttggagaaaaaaaagtattaaaggcagatgagtttccagcttcctcttaaatttccagtgtcttactttggaaattatttgaatttgtttcttccaaatcctgcagtaatactgatgctccagaaaggcgtcccatggagattctgctcttgtgcatccatcctgcacggagctgaagctgtgcctcctctagtttcattagcgtttagtcgtggggtacttcgagttaatctggaaaactaaatgttaacatggattcaggcctggcgcggtagctcacgcctgtaatcccagcactttgggaggccgaggtgggtggatcacttgaggtcaggagttcgagaccagactggcaaaaatggcaaaaccccatctgtactaaaaatacaaaaattagccaggtgtggtggcaggtgcctgtaatttcagctactgggaagggtgaggcaggagaatctcttgaacacgggaggcggaggttgcagtgagcctggattcagtcaccgcactacaacctgggctacagagagagactccatctcaaaaaacgaaaaagaaaaatggattcaaagaattatcactgttaagttccaccagcaaattactaaacgtggttccaaaggaatatttaaaaagggaaattaagtgttaccaagaaagccctatttacagcagaaacacagacactgttcgtgacctcactacagaaacttccttcatgtgttgggagggaccaaggggctctctggtcctgcacctgcattaattacttccaggaggtccacgctaggaccccaaggcctgggaaccagcctgggtcaggggcagagaagtggtgaacgtggctccaaggggcactcctgaggtgcagaggaggatttgtgacagcccagaggatagaggaaatggtggctttgaaaaggcaagtgccagtttatcaggaaacatgtatctccatttctggcagtgaactgacggtttcagacactcatgagaaagcgtcctacgtggaatgcccagaagtcggagaactgtcagacatctggccgttaaccacattcctacgcaggggctacactgcgcatgtccgaaggggcgtgtcaggggtggggcgaggaggaggtaccgttccgatgcagagacggtgccgagggaaggggcggggcgaggagaaggggcagagccgagggaagaggcggggcgagtccagctccaggaggaggagcgttactatgggaaccttgacaggtttgtgagcagctccctgtctcctgctgctccgtgaggaatcaaacttctggcactgacgaagcatgaagccagcatcttagggggaggtagtgacataattacaagatacgatcagccaccctggtcccgctgtcgcctggcaggcaggagaggtttgggaacaaccaggctctccttggcatggcagaactgctctggacacagggaggtgtggattggtgggcgggagctaagcctggcatactgggagttgtcgtctttgattagcttccagttttttcatcactgggcgaatggattacaatcccagccagcatgaacaggaggcggcgcgcagtcctg

SEQ ID NO: 13124 - DNA, 808 bp, Artificial sequence
  DNA replication origin
aaggacagagggagggaaggagggaaggaggaagaaagaagggagagagaaggaaggaagaaaggaaggaaggaagaagaaagggaaagaagggagagagaagaggaaggaagaaaggaaggaaggaagaagaaagggaaagaagggagagagagaaggaaggaagtaaggaaggaaggaagaagaaagggaaagaagggagagagagaaggaaggaaggaaagtagagaaggaaggaaggaaagtagagaaggaaggaaggaaggaggaagggggagggagggagggaaggaaatattcattgcttctaggcagaaggaaaaatatggataggtttggaaaagagcaagaatttggatatatttagagcaaaaggtacacagagagttcagaagatggcttggtgtcagattaagtttgacctttattctacgggcaatgtagttactgaaaataagacaaaatgacatgatctgatctgcatttttctaaaaataactctctcagaggcagattggaaaatggctcaaaagggaacttaattgcaggaaaggaggacaatctgaaggccattgtttggctagaggcattgaggactagaaattaggtggtgaccattggaatggaggagagatgggacttgtgggttaaacatcagaagattggggagtgcttgcatctggaggctgcagggaggcttgaagggattggactgtatggaggaggaagaggaggagcaggaagagttatgtaatggtagcagaagtagcttcagcagcaaacacatatatgacactatataccaagc

SEQ ID NO: 13125 - DNA, 1272 bp, Artificial sequence
  DNA replication origin
tcgaaagggtgccagaggcatgagttgggcctcaacaggccaccgtgacggaggagctgggccgcacacaggctgctgggaggcaggcagggacttggtcccgggaggccgccgtgaggccagagctgggcctggagacgcccctgggaggcaagagcggggcctgcagaggctgttctccagccagacctgggcctgtacaggccaccgggaggcaggaggtgggactgaggagcttcgctggagaaagttcagggtctacaaaagccggcgggagctgggcaggagctgagccaaaagagcttgcttgctgggaggccggaactgggcctggagaggctgacttcaggaccacttgggcctgcagaggccgccgggaggcccaagctgggcctggagaagcccaccgacccgaggccatttgggacctggagacgccgtcggagggcaggagctgagcctggagaggccgccgagaggcctgaggtgggcccggtgagcttggcttcaggaagctgtgggccgaccaaggccaccaggagctgggcaggcactgagtccaaagaggttgttgggaggcaggagtcgggcctgtagacgcagccgggaggaagagctgggcccggagaggacgccgggaggctgcaagtggttctggagaggccgacttgaggagcttctgggcccggagaggccgccggaagggaaaaactgggcctggaaaggccgttgtgaggaatgagccccatgggcctgaagaggccactggcaggtgggagctgggcctgccgaagcggcggagaggccggagctttggactagggaggccgcaggcgagagcgagctgggcgtggagagaccgctgtgaggcagaggctgggcctgtgcaagctttcgggaggcaggaggccaggcctgcagaggccgactggaggtcaagttcggggcctgcagaggccgcggaaagtcaaaagcggggcctgggaaggccgctgggaggcatgagctgggctgggctgaaagaggccactgggagacaggaggagctggacctggagagacggactcgaggaacttttgcacctggagaggccgccgagaggccggagctgggcctggggaggctgacttgaggacgacttgggcctgcagagtctgccgggaggcaggagctgtccctggacaggcctacttgacgacagtctggtcccgcagaggctgccgggaggaagagctgggcctggagaggccgactgcaggaagtgcaggacc

SEQ ID NO: 13126 - DNA, 1306 bp, Artificial sequence
  DNA replication origin
ctcagcgtgagagaggccaatgtgaggcaggggctcacgcctctcgaaagggtgccagaggcatgagttgggcctcaacaggccaccgtgacggaggagctgggccgcacactggctgctgggaggcaggcagggacttggtcccgggaggccgccgtgaggccagagctgggcctggagacgcccctgggaggcaagagcggggcctgcagaggctgttctccagccagacctgggcctgtacaggccaccgggaggcaggaggtgggactgaggagcttcgctggagaaagttcagggtctacaaaagccggcgggagctgggcaggagctgagccaaaagagcttgcttgctcggaggccggagctgggcctggagaggctgacttcaggaccacttgagcctgcagaggccgccgggaggcccaagctgggcctggagaagcccaccgacccgaggccatttggggcctggagacgccgtcggagggcaggagctgagcctggagaggccgccgtgaggcctgagctgggcccggggagcttggcttcaggaagctgtgggccgaccaaggccaccaggagctgggcaggcactgagtccaaagaggttgttgggaggcaggagtcgggcctgtagacgcagccgggaggaagagctgggcccggagaggacgccgggaggctgcaagtgggtctggagaggccgacttgaggagcttctgggcccggagaggccgccggaagggaaaaactgggcctggaaaggccgttgtgaggaatgagccccatgggcctgaagaggccactggcaggcgggagctgggcctgccgaagcggcggagaggccggagctttggacttgggaggccgcaggcgagagcgagctgggcgtggagagtccgctgtgaggcagaggctgggcctgtgcaagctttcgggaggcaggaggccaggcctgcagaggccgactggaggtcaagttcggggcctgcagaggccgcggaaagtcaaaagcggggcctgggaaggccgccgggaggcatgagctgggctgggctgaaggaggccactgggagacaggaggagctggacctggagagacggactcgaggaacttttgcacctggagaggccgccgagaggccggagctgggcctggggaggctgacttgaggacgacttgggcctgcagagtctgtcgggaggcaggagctgtccctggacaggcctacttgacgacaatctggtcccgcagaggctgccgggaggaagagctgggcctggagaggccgactgcaggaag

SEQ ID NO: 13127 - DNA, 1436 bp, Artificial sequence
  DNA replication origin
tgtgaggcagggccacacgctgacctccctcagcgtgagagaggccagtgtgaggcaggggctcacgctgacctccctcagcgtgagagaggccagtgtgaggcaggggctcacgctgacctccctcagcgtgagagaggccaatgtgaggcaggggctcacgcctctcgaaagggtgccagaggcatgagttgggcctcaacaggccaccgtgacggaggagctgggccgcacacaggctgctgggaggcaggcagggacttggtcccgggaggccgccgtgaggccagagctgggcctggagacgcccctgggaggcaagagcggggcctgcagaggctgttctccagccagacctgggcctgtacaggccaccgggaggcaggaggtgggactgaggagcttcgctggagaaagttcagggtctacaaaagccggcgggagctgggcaggagctgagccaaaagagcttgcttgctgggaggccggagctgggcctggagaggctgacttcaggaccacttgagcctgcagaggccgccgggaggcccaagctgggcctggagaagcccaccgacccgaggccatttggggcctggagacgccgtcggagggcaggagctgagcctggagaggccgccgtgaggcctgagctgggcccggggagcttggcttcaggaagctgtgggccgaccaaggccaccaggagctgggcaggcactgagtccaaagaggttgttgggaggcaggagtcgggcctgtagacgcagccgggaggaagagctgggcccggagaggacgccgggaggctgcaagtgggtctggagaggccgacttgaggagcttctgggcccggagaggccgccggaagggaaaaactgggcctggaaaggccgttgtgaggaatgagccccatgggcctgaagaggccactggcaggcgggagctgggcctgcggaagcggcggagaggccggagctttggactagggaggccgcaggcgagagcgagctgggcgtggagagtccgctgtgaggcagaggctgggcctgtgcaagctttcgggaggcaggaggccaggcctgcagaggccgactagaggtcaagttcggggcctgcagaggccgcggaaagtcaaaagcggggcctgggaaggccgccgggaggcatgagctgggctgggctgaaagaggccactgggagacaggaggagctggacctggagagacggactcgaggaacttttgcacctggagaggccgccgagaggccggagctgggcctggggaggctgacttgaggacgacttgggcctgcagagtctgccgggaggcaggagctgtccctggacaggcctacttgacgacagtctggtcccgcagaggctgccgggaggaagagctgggcctggagaggccgactgcaggaagtgcagg

SEQ ID NO: 13128 - DNA, 1355 bp, Artificial sequence
  DNA replication origin
ctcagcgtgagagaggccaatgtgaggcaggggctcacgcctctcgaaagggtgccagaggcatgagttgggcctcaacaggccaccgtgacggaggagctgggccgcacacaggctgctgggaggcaggcagggacttggtcccgggaggccgccgtgaggccagagctgggcctggagacgcccctgggaggcaagagcggggcctgcagaggctgttctccagccagacctgggcctgtacaggccaccgggaggcaggaggtgggactgaggagcttcgctggagaaagttcagggtctacaaaagccggcgggagctgggcaggagctgagccaaaagagcttgcttgctgggaggccggagctgggcctggagaggctgacttcaggaccacttgggcctgcagaggccgccgggaggcccaacctgggcctggagaagcccaccgaccggaggccatttggggcttggagacgccgtcagagggcaggagctgagcctggagaggccaccgtgaggcctgagctgggcctggggagcttggcttgaggaagctgtgggccgaccaaggccaccaggagctgggcaggcactgagtccaaagaggttgttgggaggcaggagtcgggcctgcagatgcagccgggaggaagagctgggcccggagaggacgccgggaggctacaagtgggtctggagaggccgacttgaggagcttctgggcccggagaggccgccggaagggaaaaactgggcctggaaaggccgttgtgaggaatgagccccatgggcctgaagaggccactggcaggcgggagctgggcctgccgaagcggcggagaggccggagctttggactcgggaggccgcaggcgagagcgagctgggcgtggagagtccgctgtgaggcagaggatgggcctgtgcaagctttcgggaggcaggaggccaggcctgcagaggccgaatggaagtcaagttcggggcctgcagaggccgcggaaagtcaaaagcggggcctgggaaggccgccgggaggcatgagctgggctgggctgaaagaggccactgggagacaggaggagctggacctggagagacggactcgaggaagttttgcacctggagaggccgccgagaggccggagctgggcctggggaggctgacttgaggacgacttgggcctgcagagtctgccgggaggcaggagctgtccctggacaggcctacttgacgacagtctggtcccgcagaggctgccgggaggaagagctgggcctggagaggccgactggaggaagtgcaggacctggagcccatgcaaaggagcaaacgccaggccgggagagg

SEQ ID NO: 13129 - DNA, 1336 bp, Artificial sequence
  DNA replication origin
agccagtaacactcgcagccccccagggctggctgatgttctatgcctgggccccctgggctctgctgtctgccctagagccaggctacaggtgagtagagggagaatagggcggggtcatgattccattcacctgggagaaaaacagaggcttccaggcaaagggagtcatgggaagcaacctagccagttctgatcccaagctgggaggagaaagggagcgggtggaggtaggaaccaagtgagggcagggcatgactgagggtcggccacagcccccactcctggctggactcgctctctgcaccttctccagcatgtgaactcctacccatccttcaaaactttcaatctggtcacccagtggcctcgtgactgaacctacccacccactggcggcattgctggcctcccaggcgagtggacctgtttagggggagcggcctgggcaccaaggctgaggggtgggcagcgggggtggtgggctgggtcagccgcaggtcacctgggtctcccggggccaccatgccacaccctggtgtgttggggatcctgatttcagcctcagcctgggcctgtcccctgcacagcccagctggatggaagggtggggggagggagaaaggaagaaaggagatgggagcagaggggaggagggggaagatggaggagaggggagggaagaggaaggggaaggagagggagggaggagggggagaaaagaggaggatggaggaggagtgaggctggtagaagggaggagggagggaagagagagggaggactgagtaggagaatgaggaaagcggaggagggagggagagggaggaggggagagacaggaagggaggaagagtagggaggagaaagggaggagggtggagaggaggggagaagggaggagagcaggaggagggtaatggaggactttggaggaggggaggggtgggaggagggagagggagggggagggaagagaaatggggaggagtgggagggaggaggagagaaagggaaggggaagagaggaggaggagtggggagaatggagaggaaggggagaggagggagaaggggtgggaggaggagggagagggaggggaagaggaggaatggggaggagggagagacacgagagaggaggtagaaggggagggaggaggaggggggaagagaggaggagtggggaggagggagaagaggagggagagggaggagaagagaggagaaggaatggagagggaggggaagagaggaggaggaatagggagaaggaggagggaggagaggagggtgaagggaggagggaaggggggaggaaggagaggggagagga

SEQ ID NO: 13130 - DNA, 1062 bp, Artificial sequence
  DNA replication origin
gggaggaggaggccggtgaggccgccctggagctggcagcgctgcagttacggcccccggcgccacggcccccggcgccgcagcccccgtccccgttcttgtcgccttcctcctccccttctgtctccgagccactgctgctgctgctgctgctctcggactcttcggccccgtcctgctcagcctgggccttgtccgggctcttggggttcccagagtcctcgaacgtgagccccggcccgggttcctgggcgaggtcccggttggtggccttgggccagggtgccttgggctcgctgctgccggccgccgggtgatagctgcccaggctcaggaggctcttgggctcctgccagccccccgcccccggatcctcccggagcagcagggcctctttagccttcttgcttttgggtgacatgacacccccgtgatccagtttgacaagcagctcggcctcctcccccggcctccgagggcccttggcacccgactcctcggctgcccgcgccttcttgggcttggggcgtgtggcaggcatggtgatgaggggtgctggggccagggtggtggcaggagctggcagctccacaaatggctcgggtgctgggcagctggtgaaggcgggtggtgcgggactgggctgcggcagtgcccggcgcaccttgggggccttggctcgcttgtccacaggctctggggggctcttcttggaacctggggtgctgcttggctccagggctaagggggtactggggacttcgtctgttgggttcccttcctccagggtagaagctctgtctgcaaaacaaaacagatgagaggctggggcggaggcttcctggcagagatgagctgtggctttcatcagaaaggcctgcttctgtgagttttgtttttgtttttgtttttttttgagatggggtctcagtcacccaagctggagtgcagtggcgtgattaaagctcattgcagccctaacctccctgggctcatgtgagcctccagcctcagtctcccaagtaacctgaggccacaagcatgcgccactatgcctgggga

SEQ ID NO: 13131 - DNA, 912 bp, Artificial sequence
  DNA replication origin
catgtgcacatgcatgcacacacgtgcatgcacacgggcacacacatgcacaaacatgctcacccgggcgtccacgtgcacacctggccccatgctcacgcctgcaggagcgctcgcatgcacacaacgcacatggtctccgaaccatggcagtgatggagaggggtccctggccgccctcggggcacaggtggccggtggccagcagggcccggcgggctcagcagagcacgggcatgccatccgtggaaaagatcatgcctgtggtgggctcgtaggtgcccgcgaggtagtacaggccctcgctgtcctggtacttcttggtcttcagcatctgcgcatactgctccaggcccaccaccaggcacttgtgcgacaccgtctgcacgtcattttcgtccacatgcgaggactggtatagcgcgcactgcgggcacgcggggacatcaggatggcaggtgggggggcacaaaggccgagggagccccagggagccacagggacagagacagaagcagagggagccccagggactgagagagagaccaggtcagagacagaggctgaggaagagacagaccaacaaaagagagacagagactgagagatggagagcaaatgagagacagaagacaaggagagacagaccaacaaaagagagacagagactgagagatgaagagcaaatgagagacagaagacaaggatagacagaacaagagatccaaagacgcagagagacagagaccgagactgagatcgagagacccagagagacacagagactgaaagatagaggttgggagagacccagagagagtcagagggcaagaatggccagagactcagagacagacactgggagagcagaggagacccagagacagagatagacgcagagaccgggagaga

SEQ ID NO: 13132 - DNA, 1183 bp, Artificial sequence
  DNA replication origin
acgttcgttctgagggtctcagccctcctggctgcgccaacccacgttggagagtcctcctgcaggctcagcctggcagcaaactctctaggaagctcacactcttcctccctagagacgggacgccaggagggaagtcagggctcagggataaccctgggttccctgagggggtgtggcggggcccccagaatttcccacagaagtcaccagccaggaaagggagtggtctcccaggtggggatagacaggcggagagggagggccaggggcttggttctgtggcccctggctctgctgggcttccctgtcacagcacagaggcactgcccctacggggtccccagcacagacagcccctgccaggaggtgccctatcccaccatccctgggcaggcagctgtccttggggggctggggtgccctctggtggcagcagcactgcacagacccccagggtcagggccggcagctgtacaggcctggggacacctgcagggtgaggtcaggagtgccaggccatgcagaggcgggtcgagggagccattggtcctcattcctgagggtccagaaccagaacggtcttgatgcaggtcttgatccagtgagtcacctgggcacttggctggggacactgaagtgagccagaaacacatccccaggggagcccccagacccagagaggggcccaggatggaaggggacaagccaggggaggggtgtgtccctctcatggtcagggaggttccctgaaggacttttgggctaagacctgacccacaggtagggtgttggggcacagggaaaagtgtgtgcagtggctcagaggttgggaggagctccgttgggtttagaggaggggagaagcaaaggggtcatgggggactagatgctcttgttggtttggtcagaagctggtagagggttcacaggagtgatgagatggaatttgctgcatcagaactgtgagagacagccaggctcattggctcacagctgcaatactagctatacaggaggccaagttgggaggatcgcttgagccaaagagtttgagatcagcctgggcaacatagcaagaccctgtgtctacaaaaaagaaaacagcaaaaataattggcctgggtgatggcacatggctgtagtccccactacttgggaggctgaggtgggaggattgcct

SEQ ID NO: 13133 - DNA, 1800 bp, Artificial sequence
  DNA replication origin
aaaaaaatatatatatatatatatactgaagccttggtctcttcgtctattaagtgagggtagtaactccctccttgttaagctgttgtgattataaacatgagaacctcctacatcaagtatctgacacagtctggatagaaaccaaatcaacatcacaaaccttcactaataaatccaaagtcagcacctttctttccaccacaccataggttattctctgtcgtgatcaaaccaagcaggaagccaagatgtggaaagtcctggaggaccaggacacttaagcaacatttaagatgctgctggctcttctttacatgagagatctcccccagccccccattcttccttctgtgcctggacctgcccggggtcagtgctgcccaggcaggaagcggaagcccaggtcaagacccacgtgggcctggctcgtttctctcctggggggcgttctgcaaccctctgcctggtgctggggtcgaccagatgccccggagcttccagactcccatctgggaggtcctggttcctgtcgctggccggtagattttgtggtgtggctgagcgagagtgggtgcagaattgtgtcggcacactgatgtcgcgtggtttatagagccaagggccccgcagagaagacgtgctcagagccctgcccaccctcacggggtggcccaccatggccctgacccaccctgcctcacactgggcagtggctcatggccatacgaagaaaaatcccacagcctgcccaccccaaggccctccctcccagcctcgtgaccctaatcgcggcttccagcacctcaaacatgaccactagctcacagcaggccccacccaggaacacccgtccccaggctgcactcccggccctgtcctgcagacctccgcgtcaaaggcccccaacgggacaggggtcctctaactgccccccacctctgcgcgccctctgttccattcctttttgccccctgcctgaatcacacacaatcttgttgcatccatcctcttcccaccctgcgcccgtgtgtcattgtggccctactgcgtcctcagagcaggagggtgcagcgacacggcaggcactgggtaaatgccccatggtgggggtgtgtaagcggcgtcggggtgcggccgctgtgaggggcagctcctcttgtggctggggcggagctgaggacactcggagttggggtgggagagacgggactcaggacttagagggagcggaagggggcggggctgggaagggaggtagggcggggagctgggggagcgggtgggactgggctgtgtggggccaagctgagtcggggggtgggatgcagctgggcgtggctgagtgggggcggagctgagtggggggcgggatgcagctggaccactcattgtaggaattgctggaaggggctggtggagcaggtctggttgtgggagtggggtggtggcagtgggcagggccggcggtgatggaggagcctgtgtgttggggcagggccggtggtggagggcggggccggcggggaggggtctgtgtgtgggcggggctggggcggggcggagcggggctggggcggggcggagcggggctggggcggggcagggcggtgcagggagctgggcggattaggcccccggcccactgtgcacgctccccaggcactgcgggcgtgatgatctctctgagccgcatcctcacggagctactgctgcccgacgagcgcgccagcatgctcatcttcttcctggtgtcggtggcgctggagctgctgtgcttcctgctgcacctgttagtgc

SEQ ID NO: 13134 - DNA, 1534 bp, Artificial sequence
  DNA replication origin
ggggttggtgcgtcgtgtgggtctcacatgtggcttccctccaacaagccccctgcactctccaccagatgtaaggagggaggggtgaaagtggggttttcgccagaggcagtagagctggggaggggcccgggctgtagggacctgtgtacagggcatgagatgtcactgggggcttcctatatgagacacagtgagtcatcagggtgcagagtggaggctctgaaggaagagcccaggggaatatgggaaagaggtgacatgagaatccatcagccaccaccccagtccttccctcctccgtccaggagcagggcgagggcccaggagacagggtgagctttctgcgggagggacacctgccctgagaggaacctgggctgtcatagccgcacagacactgcaagccaggagcagtggccacacccgtaaagcaggggcatcagaagggggcagaggcacaagcttgtcacccgagggctgtgagcatctgtctttgtagtgaccaaggggagacaaagcaaatgacggagatgccttctagtcagaagtggttctctccacaggtctccagggacagtgggtccagggggcaggaacggtggggggctgtcacgggtgccgcatcaggatgtccccttctgccctgagcagcgggcagtccccttgaggattccatgtcatcagcctctggcccgagggcttcccagtgcctccctttctctgttttgggtgacttgggcaggcactggcatctacatctgtgcactcttggcccctggtgggtgtgaactgggccttcccatcagacacacttcaatcgcatcccacacagcccagggccaggccttggcacctcatgcacagactcagatgacgcacccgggatccgggcactgagactctgcacatggcctcatcccagtgtctcagagggaaatgaggcttgaatttctcctaggacactggacaccccgcatctcacagtgctgcataagaggatgcttggcgctacatcctccctgcaataaccatcatttaataaggccagaagaagtggagaaggcgcggcccacggggcagacatgtgttaaaaagcagcccccacccacgcacaagcagccctcagaggtgtccaggcagctccaaccagcagataccgggcacccagaatgtgcagagccagcccagatcgcagcctggatctcaatttgcaagaaagaacttgccgggttgagcagctgccacgagtcccagcggcttggcagtttctcctggaggctgttctcagagccagaccagggacgagggctcccccttggccactatgggcccccgcagtctgcaccgagcttggagtcaccaggctgatttcacggatgtttacagagcctgcaggagaccatagcttagtgtgtcccctgctaattaaaggacaacggccagttgttccccgtcagagattacaaaggatgattgctttggacccagggagcggatgggtgacagggggtgtgggtccctcttccccggg

SEQ ID NO: 13135 - DNA, 2219 bp, Artificial sequence
  DNA replication origin
aggcaggagcattgttgttgtaattcgagggtccggaagctggagacccagggaggagaggtcttgttctagtttgagggttgtcgagctacagacccaggcaggagcaatgttgttgtagttcgagggtcaggaagctggagacccagggaggagaggtcttgttcttatttgagggtcgtggagctgcagacccaggcaggagcaatgttgttgtaatttgagggtccggaagctggagacccagggaggagaggtcttgttcgagtttgaggatcatggagccgcagacccagggaggaacaatgttgttgtagttcgagggtcctggagctgcagacccagggaggagccatgttgttttgagtgtcatggagctggagatccatggaggagttggtgctgcctttcaagtctgggagtcattgagctggagatccagggaggaacaagtgttgctgttctagtctgagggtagtgaagctggagacccaaggaagagccggtgctgctgttcatgcctgagtgttgtggaactgaagaaccagagaggaggcggtgctgctgttctagtttaagggtagtggcgctggagatcctggggagagccggtgccgtcgtttaaatctgtgggtcctggagctggagccctaggcaggagctggtgttgttgttgttgaaatccgaggtcatggggcttgaggtacagggaggatccgctgctgctgttcaagtctgagggtcgtgtagctagagagcggggaggaggtagtcttggtgtctagtgtgagggtggtggagctgtacacctggggaggagctggtactgctgtgtagtttgagggtcatggaactggagacctagggaggagccagtgctactgccatttaagtcagaaggttgtggatctggagttttggggaacagcccgtgctgctgtttaactgtggggaggttcctgtgtgtcagttgaagtttgatggtttgggagctggagacccagggaggagccagtgctgctgttctagtttgagggtagtggagctggagatcccgggaagagctggtgctgtcctttaaatctgtgggtcctggagctggaaaactggtggggagctagttctgccattcatgtcttagggtcgtggagctggaaatccagggaggcagtggtgctgctgttctagtttaaggatcatgaagctggagacctggatagcagatggtgctaccattattcaaatctgagggtcatggagccggagccttggggagttgccggtgccgcctctcaagtctgagagttgttgagctggagatgcagggaggagcccgtgttgctgttgtagtttgagggtcatggagctggagactcagagaggaggggtgctgttctaatctgaggggtgtgaatctggagacccagggaggagctggtgctgctgttgcttaaggctgagggttgtggagctggagacctgggggtggctggtgttgctgttgttcaagtcagagggtcatggggcttgaggtacagggaagagctcgtgctgcggttgcaggttgagggtcatggagctggaaatctagggaggagccactgctgctgttcaagtctgagggtcgtgtagctggagagcggggaggaggtagtgttggtgtctagtgtgagggtggtggagcagtagacctggggaagagccggtgctgtgtagtttgagggtcatggaactggagacctagggagcagccagtgctaccaccatttaagtcagagggtcatggatctggagctttgggtaacagcccatgctgctgtttaaccttggagggatccggtgtgtcagttgaagtttgagggtttgggagctggagacccagggaggagctgatgatgccattctattttgagggtcgtggatctggagaccttgggagaggctggtactgctgttgaagtttgacggtcgtggaaccggagacaggggaaggagccggtgctgctgctgttcatgtctgagggttgtagagctggagacccagggagaagtccatactacggctttttaagtctgagggtcatggagcctgagacctggggaggggccagtgctgctgttcaaatgactccttcctgggtctccagctccatgaccttcaaactaggacagcagcagcagatccttccggggtcttccagctccatgaccttcacact

SEQ ID NO: 13136 - DNA, 2258 bp, Artificial sequence
  DNA replication origin
ctgttcatgtctgagggttgtagagctggagacccagggagaagtccatactacggctttttaagtctgagggtcatggagcctgagacctggggaggggccagtgctgctgttcaaatgactccttcctgggtctccagctccatgaccttcaaactaggacagcagcagcagatccttccggggtcttccagctccatgaccttcacactagaacagcagcaccggctccaccctgggtctccagatccacgaccctcaaactagaacagcagcactgactcctccctgggtctccagctctacaaccctcagactcgaggagctggagacctggggaagagccagggctgcttttctactttgagggttgtggagctggagacccagggtgcagcagctgctgctattatagtttgagggccttggagccagaaactttgtgaggagccggtgctgcgtttcaaatctgagagtcattgagctggagacccagggaggaaccggtgttgctgttctagcctgagggtagtgaagctggagacccaaggaggagccgatgctgctgttctagtttgaggttagtggagctggaggtcacaggaagagccggtgctgctgtttaaatctgtgggtcctcgagctggagccctgtgggggagctggtgttgctgttgttcaagtctgagcataatggggctttaggtacagggaggagccgctgctgttcaagtctgagggtcatgtagctggagagtggggaggaggtagtcttggtgtctagtgtgagggtggtggagctgtagacctggggaggagccggtgctgctgtgtagtttgagggtcatggaactgcagacctaggaaggagccggtgctaccgccatttaagtcagagggtcatggatctggagctttggggaacagcccgtgctgctgtttaactgtggggaggatctggtgtgtcaattgaagtttgagggtttgggagctggagacccagggaggagccggtgatgccattctattttgagggtcgtggatctggagacctggggagaggctggtactgttgttgtagtttgagggtcgtggaagtggagacagggcgaggagccggtgctgctgctgttcatgtctgagggttgtagagctggagccccagggagaagtccatactatggctttttaagtctgagggtcatggagcctgagacctggggaggagctggtgctggtgtatagtttgagggtcgtggaactggagacctagggaggagccggtgctaccgccacttaagtcagaggttcgtggatctggagctttggggaagagcccgtgctgctatttagctgtggggaggatctggtgtgtcaattgaagtttgagggtttgggagctggagatccaggagggagcctatgatgccattctattttgagggtcatgtatgtggagacctggggagaggccggtactgctgttgtagtttgagggttgtggaagtggagacaaaggtaggaggcggtgctgctgctgttcatttctgaggattgtagagctggaggtccacggaggaaccagtgttgctgttctagtctgagggtagtgaagctggagacccaaggaggagctggtactattgttcatgtgtgaggattgtggagctggagaaccagagaggagccggtgctgctgatctagtttgagggccgtggagctggagatcccgggaagagccagtgctgccgttcaaatctgtgggtcttggagttggagtgctggggtgacccggttctttcattcatgtcttagagtcatggagctggaaacccagggaggcggcggtgctgctgttctagtttaaggatagtgaagctggagacctggacaggagctggtgctaccactgttcaaatctgagggtcatggagctggagccttggggaggtgccggtgctgcctctcaagtctgtgagttgttgagctggagattcagggaggagccagtgttgctgttgttgttggaggattgtggagctggaggctgaagaggagctggtgttgcagttcaagtttgatggtcgtggagctggagacctggggaggagctggtgctaccaccgtgtaagttgagggttgtggagctggtggccccagggaagagccagtgctatagttgaagtttgagggagctggagacccagggagtagctggtgctgctgttctagtttgaggtttgtggagctggagcct

SEQ ID NO: 13137 - DNA, 1019 bp, Artificial sequence
  DNA replication origin
cagagagaaggatgattatgggtgtgactgtggcccttttccttccatggctcaggctgcactgtgggagcttgtccccttttagctgctgcaccagtccatccatttcttgccattgccccgtggagtctgtggcattagccttttctccgggttctgactgagaccaggtagaactgcctgggggcagttctacactaccttgagtgcctggttacagggtgacagcacttccagggtctctgggttgggtttggggaggcaccagaggcctgagcagatggctgggttggttatgcctgctgggcagggtacaaagccaggagtgggtggggcagggagaccatgaggagcctgtgcagcccgttttgtctcagcagaggggtgagtcccagcagcttccccgggccagggcgtcagccgagtcctgggagtgcaggcagcccccaagctgggcatctgggcagcgggtgggggggggcttcagggaggacgcggtgggtagcatatgcctcaggggacgcgtgtgcatgtgagagggtgacagtgtgtgtatatgtgtgcctatgaatgtgtttgtgactgtgagagtgagggtgtgtgtatgtgagtctgtacatgtgtgaatgtgtgtatgtgagtgtatgaacctgtgtgtatgtatgtatgcatgtatgtgtgaatgtgtgtatgtgtgagtgtaggtgtgttggggcctgtgtgtatgtgtgtgtgaatgtgtgtgagtgtagatgtatgtgaacctgcgtgtgtgtgagcctgtatatgtgagtgtgagcctgtgtgtgtgtgtattagtctgtgtgtgtatgtgtgagactgtatgagtgtgtgagcctgtgtgtgagaatgtatgtatgtgtgtgtatgtgtgcgtgagagtgtgtttgtaagggcgtgagagtgtgcgcatgtgtgggagacagagtgtctggaggaggcaggcagtgggatatgggagcagggagagcaaggtgacctccaaggagaaatggtgt

SEQ ID NO: 13138 - DNA, 764 bp, Artificial sequence
  DNA replication origin
ttgaaaatgaaggaaagggctgggtgcagtggctaacacctgtagtcccagcactttgggaggccgaggaagtcagatcacctgaggtcaggagtttgagaccagcctggccaacatggtgaaaccccgtctctactaaaaatacaaaaattagctgggcgtggtggcgagtgcctgtaatcccagctactcgggaggctgaggcatgacaattacttgaacccaggaggcggagattgcagcgagccaagatcatgccactgcactccagcctggtgtatcaggaaaaaaaaaaaaaaaaaaaaaaaacaacagaaagaaagaaaagaaaagaaaaaggaaaaaggaaaaaaagaaaatgagggaaagacctggaggaggtgagagagggaggcttgtggttctctcagggcacagagtctcaggaagagggaacagcaagtgcaaaggccctgaggctgccgtgtgcctgatatgttccaggaggagggaggaagccagtgtggctggagggaagatgtcagaaaggcagagtgggggcatacaaccacacgggatttagggacactgccaagatcttgtctttgactctgggtgacatgggagccacaggagggtgctgagcagagcagagacgtgatccgacttcctttgggtatcaagacaatgatagaatgggggagatagtttggaagccatggcaacaatccaagcacacactggtggtggctcatgccagggcagggctgcggagcttggagggt

SEQ ID NO: 13139 - DNA, 1744 bp, Artificial sequence
  DNA replication origin
cagcccagagcagctgtgcgcccccgccgaggcggcgccctgccccgtggaaccggagcggtcccagagcgcggtcctggaacagagccccagcgcggacgcaggtgcagcgacctgcagggccttggaggcagactcaggggatgccccgcggggcccagcgcccgaggagaacgtcagaggcacaccatcaccagcggcgtggactgcggcctgctgaagcagatgaaggagctggagcaggagaaggaggtgctgctgcagggtttggagatgatggcgcggggccgtgattggtaccagcagcagctgcaacgggtgcaggagcgccagtgccgcctgggccagagcagagccagcgccgactttggggccacggggagcccccgcccactggggcggctactgtccaaggtacaggaggtgaccaggtgcctgggggagctgctggctgcggcctgtgccagctgggccctgcccacgtcctccgccgggccccctgctctgccctaaggtcaacctcgtccccgggctgtcagcagcagaccatcctcatgctgaaggagcagaactgactccttacccaggaggcgaccgagaagagtgagtgcatcacgcagctggagcaagagaagtcagcgctcattaagcagctgtttgaggcccgcgccctgagccagcaggacgggggggcctctggaccccaccttcatcttgctggtgtgggctgagccggcccacggggccagcctggcactcagcccttcggagcgagcactctgtcgcacccaacctctctggctggagatccccggcaggcccaggcagtcccggaatgggcgccttcctgcaccccttgccatccaggctccccgggcctgtccccgtctggcccccacaccgagcccttgactcggttttggcttccggtgctgacatgggctgaggctctcttgagtccgcatagtccgcagctactactgccgctgtcagtggacagtgagggacccctccaccagttaccagatctctggtcgcccggtttccagcggtgctgccctgggtcccatctccagggaaaggcactgctcacgccaggctgcacttccgataacggccagcagacggcgctagacggcacagatgcggcgctgaggctgcgccccagacctggggggtccaagggcagcttacccccacctcaaccagggcaccaggacaaggaggctgtctctcggacgggagcagatggaggggatggggaaggcctctaagcgggggttgctcgcctggcagggaagccccagggatggcggtcggacttcaggtcctggccaaggctgagagactctggctgcagcagatcccggagccgggtggacgagagcttggcttgcttgtgcctcccgcagaccccgcggtgatggtcttcctcatcctggccaggacgctgccccacgttgtgtcccacaaaacaacctgtgaacctggctccccaggagggccctgtccccaggtgcctgggcccccactttccaggcgtgtcatagggagagtctgtcaccccctcactcaggattctctaggtctggggtcctgctcaccccgctttcctcccacgctcagcctgatcccaggtttcatccaggaggaaccacttctctcagccaaggaaaaggagaacccagccaaggtacaggaggaggctgggacaggtccccttgggtgtcactccctgcccctg

SEQ ID NO: 13140 - DNA, 1592 bp, Artificial sequence
  DNA replication origin
cctggctccccaggagggccctgtccccaggtgcctgggcccccactttccaggcgtgtcatagggagagtctgtcaccccctcactcaggattctctaggtctggggtcctgctcaccccgctttcctcccacgctcagcctgatcccaggtttcatccaggaggaaccacttctctcagccaaggaaaaggagaacccagccaaggtacaggaggaggctgggacaggtccccttgggtgtcactccctgcccctgtgcccaggcccactcccgctggtgctggggtacgcactggtgggggcctcatgctcagcccagcctggagggccccagtgccaccagagccaggggcacggcaatatcacggatggcttctgcagcccagggcccccagtgcaggttcagtgtgtgtgtgtgtaggggggggggcggggtgcacagggtccctgatgcggggtcagtgtgtgtgggacgcagtgcccccgatgcagggtcagggtgtgtggggcgcagggcccccgatgcagggtcagtgtgtgtggggcgcaggatcccctcgtggccagggcactttggtgcactgtcccacaaggcacccctgtctcagaggaggggtcctggcagccagcacggcaactcccttctggaacccagctccacgataacctgcccacagcaaacccacagagccacatcccctgctgtacccgggctgcagaggtgtcccaggacaggcccaagccagaccagcgtgcagctgttttcctaccctgaggatgggagggaggcttccagaggacataagaacgccaggcctcaaccctcctgggtgggaaagggagcgggtcctgaaggcctgtgtcccacagcgccagcaccaggtggactgcagtgcagtggatgggccagcggcagccggggagaagccccccgacatcagcaggctggggtctgcccaccagggcctccccacatctgcctttgagggtgcctgccatgccctgggggatccgggcatctttacaggactggaagcagaagacagaacagtgtctgtcccagggtgacttcatcaggagaccgcccacatagagctggaccccgcagctaaggcagaaatgtgagacaggctggcacctcccggaaaactgcctctcagccttggtgttccatgcaaggtgaaaaaaatatgggtcatccaagtttacagcttgcaatcaggctagtgtgtggccctagagaccacgaggggagaatttaaagtggccccggctggcacagtctaggtggctggcagaggcacatgcggaccctgcctggagcctgccctagtgacgctgggtgggtcagtctccttgcaagatgtgagcagcatccctggcctctatccatgaggtgccagtagcatgcgcgggtacatacacgtgcatgcacacacagttatgacacctagaactgtctcaggatgtcacaatgtgtccctggaggcagaagtgtccctggttgagaatgagccccagaggaaacaaccacactaggcctcaggattttgtgttgatcaagttccaaggaaaatgaatatctcagtc

SEQ ID NO: 13141 - DNA, 891 bp, Artificial sequence
  DNA replication origin
tggaaacatcatcgaattgactcgaatggaatcatcatcgaatgaactcgaatggaatcatcattgaatggactcgaatggaatcatcattgaatggactcaaatggaatcatcatcaaatggaatcgaatggaatcgaattgaataatcttcgaatggactcaaatggaatcatcatcaaatggaatcgaatggaatcatcatcgaatggaatcaaatggaatcatcatcaaatggaattgaatcgaatcatcatcgaatggaatcgaatggaatcactgaatggaatcatcatcaaatggaatcaaatggaatcatcttcgaatggaatttaatcgaataatcatctaacggaatcgaattgaatcattgaatggaatctaatcgaatcgaatggaatctaatcgaatcaaatggacatgaatgaaatcgaatggaatggaatggaatagaatgggagctgagattgtgccactgtgctccaggctgggtgacagagtgagatactatcaaaagaaaggaatggaatggaatgcagtggaatggaatggaatggcatggagtgaactggagtggagtggagtgaagtggagtggagtggaatggagaggaatggaatgggatggaatggaatggaatgaagtggagtggggtagagtggagtgcagtggaatggattgtgatcgtacgggaaggagtggagtggagtgcagtggagtggagaggagtggaatggaatcggatgtaatggaatgtagtggagtggagtggagtgcaggggaatggaatggaatggaacggaatggaatggaatgcaaaggaatgcaatggagtagaatgcaatgcaatggaaagttgacatgtaatgtgagctaagattgtgccactgca

SEQ ID NO: 13142 - DNA, 825 bp, Artificial sequence
  DNA replication origin
aatggaatcatcgactggaatcgaatggaataatcatcgaatggactcgagtggaatcatcattgactggaatcgaatggaataatcatcgaatggactcgaatggaatcatcatcgaatggactcgagtggaatcatcatcgaatggactcaaatggaatcagcatcgaatggaatcgaagggaatcatcattgaattgaatcatcgaatggaatcatcgaatggaattgaatggaattatcatcgaatggaatcgaatggagtcatcgtcgaatggaattgaatggaatcatcaccaaatgaaatcgaatggaatcatcgaatggaatcgaatgaatcatcgaatggaattgaatggaatcatcgaatggaatcaaatggaatcatcgaatggaatcatctaatggaatggaatggaatgggagctgagattgtgccactgcgctgcaggctgggtgacagagtgacgtactctctaaagaatggaatggaatggaatggagtggattggagtggagtgaagtggagtggagtggaatggaatggaatgcaatggaatagaatgcaatgcagtgcaattgaaagttgacatgtaatgtgagctgagattgtgccactgcactccaggctggatgacacagtgaaaatactcttgaaagaaaggaatggaatggaatggagtggagtggagtggagtggagtggagtggagtggagtggagtgaagtggagtggaatggagaggaaaggaatggaatggaatggaatggaatgaagtggagtggagtgggatggagtggattgcagtggaatgaagcagaatgg

SEQ ID NO: 13143 - DNA, 854 bp, Artificial sequence
  DNA replication origin
tcgaatggaatcatagaatggaatcgaatggaatcatgaaatggaatcgaatggaattatcaaatggaatcgaatggaatcatcgaatggaatcgaatggaatcgaatggaatggaaaggaatgggagctgagattgtgccactgcactccaggctgggtgacagagagagatactcttgaaagaaaggaatggaatggaatgcagtggaatggaatggagtggactggagtggagtggagtgaagtggaatggtgagggatggattgggatggaatggaatggaatgaagtggagtggagtggggtggagtggagtgcagtggaaaggagcggaatggaatgggttggattggaaaggagtggagtgtattgcagtggagtggagaggagtggaatggaacaggatgtaatagaatggagtggagtggagtggaatggaacagagtggaacggaatggaatggaatggaatggaatgcaatggaatggagtggacgagtggagtggagtgaagtggagtggagcggaatggagaggaatggaatgggatggaatggaatggaatgaaatggagtggagtggggtggagtggagtgcagtagagtggagtggagtgcagtagagtggagcagaatggaatgggatggaatggaaaggtgtggagtggagtgcagtggagtggagaggagtggaatggagtggaatggaatcggatgtaatggaatgtagtggtgtggagtggagtggaacgcagtggaatggaatggaatggaatgcaatggaatacaatgcaatgcaatggaaagttgacatgtaacgtgagctgagattgtgccactgcattccagcctggg

SEQ ID NO: 13144 - DNA, 1430 bp, Artificial sequence
  DNA replication origin
gacatgcagtccaggaaccaccgtgggcattaccgcagtatataaatgatgttgaagagagataacgttttttcaggttcctgtatcttcatgtcgagttggtcgctgcccaacgtagaggactaggaatcaggagtcagtggccgtatgctggaggctggagccacgtgaacgcggctcgccttgctgcggttgttggcagtgatggagagatagcagcgcgactggagcggtaggagaaggaaaacagttttgggatagatagaggagagtaaagagggtagttagtgccaaagggaaaaaaggatagcttagcaggagaaggcgttgtgaaaagatggtggggaaaaaagtttttgggtagatggaggggtaaaaacatcacggggagcgggagggaaggaaggttttgcagaaagacggtgggtaaaaagttaaagggtagatggagggggaaaagagggtggcaagtgggcggaggaaagagagggaggtgatgggggaaaacggggcgagcggtagggagagaaggttttgtgaaaagacagtggggagaaaatacagtaggggggaaaagtttttgggttgagcaaaagagggtagcaagtgggagaaggaaaaagggtagccagcaggaggaagacaaggttttgtgaaaagacagtggcagaaaagaaagacagtgaagaaagaaaagacggtgggtgaaaagtgtttctatagatggagaggggaaagagggtgacaaggaggaaggaagagggtggcaagagggagcagggatagggggttggggaaacaatggaaaaatagtttggggtagatggaggggaaaaaagggtggcaagcaggatggggggaaagaagagcactagtggtaaagtggggagactttgaaaagattgtggggaaagttttggggtgtagatggagggggaaacagggaggtgaataggcatggggagaaggctttgtgtaaagatggggggaaatgtttttgggtagatggagaagggaaggagaatggaaatggggaaccgggggaaagacgatgaagaaaacagtttttggttggatgaaggggggaaagagggtagtgagcaccaggagtggagagaaggttttgggaaaagacgggggaaaatgtttttgcttagataaaggagcaaaagagggtgataagagcgggacggggaaaaagagggtggccagggataggggaaaagacggtgggaagaaactggggaaagggtttgggtagatggatgcggaaaagggtgttgagcaggagagtagagaaggctttatgaaatgagggtgggcaaaaaatgatgaagaagtttgggggcagatggtgaaagaaaaagggtggtgagagggagggggccaaagtccgtcaggaaaagaaggtagggaaataatggtggggg

SEQ ID NO: 13145 - DNA, 1261 bp, Artificial sequence
  DNA replication origin
gaataggcctagaggtttttttctcgtccaatcagaacatgtagtccaggaactgcatttgcataacctcatatataaagcatgctgaggtcgcatcaggtcatttcaggctcttcggtgtcgagcagaggagcaactctgtgcccagcttagaggactgaaagaggccacaaccttccgcctgctggagggtggaggatggatggagcctggagcctgggtcactaccttgttgcggtttgtggtggcgatagagcagtaggatggtggccggcagcaggagcttctgctgatgggctgggggactagaaggaagaggcactgccacgtgctggaggctggaacctgtgccaccatggctcgcctcgctgtggttggtggtgacgtcggagactgcagctcagccacagtagtagaaatgtgatggggtaggtgagttttccgggcctgccctttatgtctcttggggcaagggttgggtgtcctattggggcttactgctagaggctaccctgcctgtggcagtggtctggttgggggcactctccggggttgcattgctggtggtggggcaggttgcctggctatctggggctatactgcccgtggtggcaggggtggtggggggaggcagattgtgtacactagcttgtattgctggtggctggggaaggattaggggcactatcttctgctgcactgcccgcagcagggggtgggttgggtggagttatgcggggctacaatgttggcagtggggggtgatttaggggcgttgttgggtgctgcattgcctgtgacttgggggtgcatcattaggagctgaactgcccgtggctgggtcagattgtgggcactattgggtggtatgctccctgaggtgtgggggaagtgcttttggggggggtattggggttacattgcctgaaactgtagggtgtgttggatgtgctatctgggggctacactgctagtggcagggggcagattaggggtgccatgggggctacactgccagtggcattggcgagctgaggaggtggcagcagcagcgacagcagtggccttcttcttctcgtagcttccaagtaagggatcgttttcctcttctcagactccagactccagaaggtgattttctccccctcgagctggattgcaggacagggcctccacacccactgtggtttcccggcctgccctcatgctttgtgttgtgaagaccgcctgggactaccgggcagggtgtagtaggcaccat

SEQ ID NO: 13146 - DNA, 925 bp, Artificial sequence
  DNA replication origin
gttttcctcttctcagactccagactccagaaggtgattttctccccctcgagctggattgcaggacagggcctccacacccactgtggtttcccggcctgccctcatgctttgtgttgtgaagaccgcctgggactaccgggcagggtgtagtaggcaccatgggggaagtgggagacaggacactgtgggtggaggtgtcaggaatgggaaccagcccttgggtggggagggctggctgggtctgagtttctcctactcaggctccccaaggagggcagccttggggggcccagcaattcctggccagctggacttggccaggggccggtttcagtgaaggcactcactcccaccccaggccccaggtcctggccagcttttgccagaaggagaggctggactttggaaggtgggtgtgagtgccttcaatgaaactgatccttgacacccagtcaccagcataacgaggtgaggctctaatggttccaatccctgagtcctgttctgggcttttctggctttgcctgcccagctgctccaagccaggctgaaggaggagaagggggagttgcctgtggtacggtcaagcagatgatgtggctgtgcagcttgcctcatgcagttggtggtggagatggagaccacagctcgactggagtggtaggagggcactcacgggggcctggtggtaggagcctggtagggtgggctggtacgttgagggtgactggttgtattggcattggcacaagtggtggtagcagtaggaagtctgggggccaggaagggggagtaggagcactgcagggcccatcccattctggggtggggaggaacctgtgggtgttgtaacgaaggtctcggtggcagtggtggtggtacacctagggcaaagaggagtcctccctcttctcctgcaatc

SEQ ID NO: 13147 - DNA, 958 bp, Artificial sequence
  DNA replication origin
cgccgcggcggcggcggcgtctggatccggagtccagtttggggtggcgtgggagagggggctgtgggtgtcttgtcctgtcccagggccaaacccccaggagtcctgccctcaggacctcctggagccgacttccgccgagggagggggagcttcaggacgcctgctgtgttctcaggactcccctgaagatccgattttggccccctacgagggggataggatgggctcaccacatctggtgaggcaggcagggcctcgctgcagcacagaatgatgccataggtctcaaggcctagtgtcagctgtaacttcactgatccatcagccctctgcgcccctcgtccttggaaagagcagtggcctgccccgcttctaaaagccctggggctccggaaagctgacggctctttacaggactcgagcaaacaggaacaggggcgaatccgagggggagaccatgtgaccacacgcggcactggcatatcccacagcggatggtgtgaacgtgtgtcaccggaggcatacagggccaccgtgaaacaaacggtggtgtccaggcatgtgccggtggaaggggggatcgagggaactttccctcaatgccaaggaaaatcaaagaacacctgggacctggggggtaggagtcctgttcctgacccaagccacgttttccagtgcctaccagggagcaaagaggtttctgcaaaattcgccccacccccaaccctccaccgccccggtagccctgacgcaacttcggctgcacccagccccagcccagtccctttggttccctgatattcgtttcggccagaagatcaagggagtcagtgcaccctggagcggaggagaggatgtcccacaagaatgagacaggaagtgctgaggaaatgcgacaccacctgtcctgtaagacaaggccagtcacggtcgcccagcgctcattgtaggcaat

SEQ ID NO: 13148 - DNA, 1560 bp, Artificial sequence
  DNA replication origin
cgcggtggcgaggtcaaaaagccgcaaaaagccgcggcggcggggggaaaaagccgcaaaaagcagcggcggcgggggcaaaaagccgcagcggcaaaaagcctcagcggcgggggcaaaaagccacgaccgggggaaaaagccgcagcggcaggggcaaaaagccacggcggcagggagcaaaaacccgcgggggtaggcgcaaaaagccgcggcggggggttaaaaagccgcgtcagcaaaacccgcggcggcgggcgcaaaaagccgcggcgggggcaaaaagccgcaaaaaaccgcggctgcgggggaaaaagccgcggcagcaggggcagaaagcagcaaaaacccaaggcggcaaaaagcctcggcggcggggggtgggggggtgcaaaaaaccgcggagaggggggcaaaaaaccgcggtgtcgggggaaaaagccatggccgcggcggcaaaaacccgcggcggcaaaaagccccggaggcgcggacaaaaagccccggcggtgggggtcgaaagccgcgtcggcaaaacccatggtggaggggggcaaaaagccgtggcggcgggcgcaaaaaatgcaaaaagcagcggagggggcaaaaagctgcaaaaagcagcggcggcggaggcaaaatgccacaacggaaaaaagcctcggcggcgggggcaaaaatccgcggaagcggggggaaaaagccgcggaagcgggggggaaaagccgcggcggcgggggcaaaaggcagcgggacaggggcaaaaaaccacaaaaatctgcggcggcgggggcaaaaagctgcaaaaagcagcggtggcgggggcaaaaagctgcaaaaagaagcggcggcggggacaaaaagctgcaaaaagcagcggcggcgggagcaaaaagccctagcggcaaaaagcagcggctgtgggggcaaaaagccatggtggcaaaaagcctaggaggcggaggcaaaaaaccgcggaggcgggagcaaaagggagcaggggcaaaaaaccaaaaaaacctgcggcagcggagggaaaaagccgcggcggcgggggcaaaatagtggaaatggggtagaaggcctgcacagcttggcattgctgctgtgtgatgtgataggaaaagtgcagccgaaaaccaaaaaagatgtaagtaggcttcactgagtgcagctaagaacccagatgttatcttgagggtattaactaataagcagtttaaatcagaatggcacattctgatttgttttttgtatgttcacatttggcaggcatagatactgtttgaagagaggaaagtcagtagatagaggtaacaaatatgtgccaagtctagaaacaagagactagggggataaggacctttcgaaataaaatgcaagatttgaaaactgattggctgggggatgaggaaaaggcaggtctctacggtcaatctctgttttgctttaagttgttagggggtggttttgtcacatattgtagaatatgtcatttcagttttgaacatcttgagttaaattgtcctaacatatcttatgaatttgattttcttccct

SEQ ID NO: 13149 - DNA, 1146 bp, Artificial sequence
  DNA replication origin
aagccgcaaaaagccacggtggaggtggtaaaaagccgcaaaaagccgcgtcagagggggcaaaaagcaggggcggcaaaaagccacgacggtggggacatgaaggcgcaaaaaccctcggcggcaggagcaaaaacccgtggcggcgggggcaaaaagcggctggggtgataaaaagccgcggaggcggggacaggaagccacgtagggggcaaggagccgcggcggcgggggcaaaaagctgtggtggcagggacaaatagcagcaaaaagccgcggcggcgggggcaaaacgacacaaaaagcccgggcagtgggggcaagaagccgcggctggaaaaacctgcggcggcgggggcgaaaaggcgtaaaaagccacagtggcgggggccaaaagccacggcggcaaaaagccgcaaaaagccggggctgcggggcaggaagccgcggcgggaaaaacctgcggcggcgggggcaataagcagtaaaaagccacggcaccgggggccaaaagccataaaaagccacggcggcggtgacaaaaagccgcggcagaaaaattcgcggtggtgggggcaaaaagctgcggcagcaggggggaaaaggtcgcaaaaagccgcggcggcgagggcaaaaagctgtggcttcaggggcaaaaagccacggaggcagggggagaaagatgcaaaaagctgcggcggcaaaaagccgcggcggcgagggcaaagagccccaaaaagccgtgacggcaggggctaaattcggcgaggccagggtcagaaagccgcggcggcgggggcagaaagccgcaaaaacccgcagcggcatggtcaaaaatccacggcggcaaaaagccacgtcggcgggggcaaaatagtggaaatggggtagaaggccagcacagcttggcattcctggagtgtgatgtggaaggaaaagtgcagaggaagacaaacaaagatgtaagtaggcttgactcagtgcagctaagaacccacatgttatcatgctgttatctatcagctaattttttgtattttagtagagaaggggttttaccacattggccaggatggtctcgatctcctgaccccatgatccacgcacctcagcctcccaaagtggtgggattagaggcatgagcca

SEQ ID NO: 13150 - DNA, 1211 bp, Artificial sequence
  DNA replication origin
gcagcacccggctggctgcggcccctgcgcctccctccgcaatagccgcgtcaccccctccaccgctctccttcttctctcccatcggggccgagcttggcgctgctctatgcagcctgcagcagcccaggaacagagcctggggtgcgggtgtctaggcaaggaacccccgaaccaggagagctggaccaggagtgaccgtcggcgctgccttagccaggacgccggtagatctagcagccgagtctgccaatcccgccctcagacccgcggcggtgggggcaaaaagccacggcggtgggggcaaaaacccgcgacggcggggtgaaaaagcctcagcggtaaaaacctgtggaggcgggaataaaaagccgcgttggcaaaaagccgcagcggcggggaaaaagcctcggtgatggggacaaaaagccgcggcggtgggagcaaaaagccgcaaaaagccacggcggcgggcgtaaaaagccgcaacggtggggtcaaaaagccggggcggtgggggaaaaagctggggctacaggggcaacaagccacggcggcgggggcaacaagccatgacagtcgaggcaaacagccgcggtgacaaaaagctgtggtggcgggggcaaaaagccgcggtggtgggggcaaaaagctgcggtgacgggggcaaaaagctgtaaaaagccgcagcatcgggggcagaaagccacgacagcggaggcaaaaaccgcggtggcggggtaagaagtcgcggcggcaaaaagatgcggctgcgggtgcaaaaaggcgcggtgggggctaaacggtgtggcggcagcaaaaagccgtggcggcgggggcaaaaagcctgaaaaagccatggcgtccggtgccaaaagccgcaaaaagccacggtggaggtggtaaaaagccgcaaaaagccgcgtcagagggggcaaaaagcaggggcggcaaaaagccacgacggtggggacatgaaggcgcaaaaaccctcggcggcaggagcaaaaacccgtggcggcgggggcaaaaagcggctggggtgataaaaagccgcggaggcggggacaggaagccacgtagggggcaaggagccgcggcggcgggggcaaaaagctgtggtggcagggacaaatagcagcaaaaagccgcggcggcgggggcaaaacgacacaaaaagcccgggcagtgggggcaagaagccgcggctg

SEQ ID NO: 13151 - DNA, 974 bp, Artificial sequence
  DNA replication origin
ggggcaggaagccgcgtagggggcaaggagccgcgggggctgggacaaaaagccgcggtggcggaggcaaaaagctgcaaaaagcccaggcagtgggggcaagaagccgcggcaggaaaaacctgaggcggcggggggaaaaagccgcggcggcaggggcgaaaaggtgtaaaaagctgcggtggcgggggccacaagccgcgtcggcaaaaagccgcaaaaagcctcggcggcggggcaagaagccacggcgggaaaaacctgcggcggcgggggtgaaaagcagtacaaagccgcggcgccgggggccaaaagccataaaaagccacggcggcggtgacaaacagccgcggcggaaaaaaaaaatcacggtggcggggacaaaaagctgcggcagcagggagaaaaaagccgcaaaaagccgcggcggcgagggcaaacagccatggcttcgggggcaaaaagccgcggcggcgaggggagaaagacgccaaaagctgcggcggcaaaaagccgtggcagcgagggcaaagagccccaaaaagccgcggcgggaggggctaaattccgcgaggctgggggcagaaagccacaaaaacccacagcggcggggtcaaaaatccacggcggcaaaaagccacgtcagcgggggcaaaatagtggaaatggggtagaaggccagaacagcttggcattcctggagtgtgatgtggaaggaaaagtgcagaggaagacaaacaaagatgtaagtaggcttgactcagtgcagctaagaacccacatgttatcttgatgttatccatcagctaattttttgtattttagtagagaaggggttttaccacgttggccaggatggtctcgatctcctgacctcatgatccatgcacctcagcctcccaaagtggtgggattagaggcatgagccacaaagtgctcaaaaaaatctattaattaaaaaatgtgtatgtagc

SEQ ID NO: 13152 - DNA, 1121 bp, Artificial sequence
  DNA replication origin
ctgagcgcagcaccgctctatgcaggctgcagcagcccaggaacagagcctggggcgcgtgtgtctaggcaaggaacccccgaaccgggagagctggaccaggagtgaccctcggccccgccttagccaggacgccggtagatctggcagccaagtctgccgatcccgccctcagacccacggcggtgggggcaaaaagccgcggcgatggggacaaatacccgcgatggcggggtgaaaaagccgcagcggtaaaaacctgtggcggcgggagtaaaaagccacgtcggcaaaaagccgcggcggctgggaaaaagccgcggtgatgggggcaaaaagccgcggccgcgggggcaaaaagccacaaaaagcctcggcggcgggtgcaaaaagccgcaacggtggggtcaaaaagccgggggggtggggggaaaagctggggcgacgggggcaacaagccagggcggtgggggcaacaagccacagcgacaaaaagctgcggtggcgggggcaaaaagccgcggcggcaggggcaaaaagctgcggtgacgagagcaaaaagccttaaaaagcctcagcgtcgggggcagaaagccgcgacggcgggggcaaaaagccgcggtggcggggtaagaagccacggcggcaaaaagatatggcggcagtggcaaaaaggcgcggcgggggcaaaacggtgcggcggcggcaaaaagccgcggcggcggggccaaaaagcctcaaaaagccgcggtgtctggtgccaaaagccgtaaaaagccgtggcggagggggtaaaaagcagcaaaaagccgcggcagagggggcaaaaagcagggtcggcaaaaagccactacggcggggacctgaagccgcaaaaacctttggcggcaggggcaaaaactcgtggcggcggggtcaaaaagcggctggggtgataaaaagccatggcggtgggggcaggaagccgcgtagggggcaaggagccgcgggggctgggacaaaaagccgcggtggcggaggcaaaaagctgcaaaaagcccaggcagtgggggcaagaagccgcggcaggaaaaacctgaggcggcggggggaaaaagccgcggcggcaggggcgaaaaggt

SEQ ID NO: 13153 - DNA, 1002 bp, Artificial sequence
  DNA replication origin
cgacctcggggggcaaaaagccgaggcggcgggggtgcaaaaagccgcggccggcaaaaagccgcagcggcggggggacaaaaagacgcggcggcggggggcaaaaagccgcggcggcggcggtgcaaaaagctgcagcggcgggggagcaaaaagccgggtcaggcaaaaagccgccacggcggggggcaaaaagccttggcgggcaaaaatccgcagcggcggggggcaaaaagccgctgcaggcataaacccgatgcggcgggggggcaaaaaaccgcggtggggaaaaagccgcggcggcggggggcaaaaagccagggcggggaaaaagccgcggccggcaaataaccgcggcacaggcgggggcaaaaagccgcgtcggcgggggggcaaaaagctgcggcgggcaaataaccgcggcacgggtgtgggggggcaaaaaccgcggtgatgggggccaaaacgccgcggcggcggagggcaaaatagtggagatggggtagaaggcaggcacagcttggcatttctggagtgtgatgtgataggaattgtgcagtcaaagacaaaaaaagttgtaagtaggcttgactcattgcagctaagaacccagatgttatcttgagggtattaactaataagcagtttaaatcagaatggcacattctgatttgttttttgtatgttcacatttggcaggcatagatactgtttgaagagagaaaagtcagtagagagaggtaacaaacttaaatatgtgccaagtctagaaacaagagaccagggggataaagacctttcgaaataaaatgcaagatttgaaaactgattggctgggggatgaggaaaaggcaggtctttaaggtcaatcgctgttttgctttaagttgttagggggtggtttttatcacatgttgtagaatatgtcatttcagttttaaacatcttgagttaaattgtccttacatatcttatgaatttgattttcttccctgggaagct

SEQ ID NO: 13154 - DNA, 1378 bp, Artificial sequence
  DNA replication origin
tgccctccgctgccgcggttttttgcgtctttgtgcccccgccgccatgcctttttgcccccgctgcggctttttgccgctgcgaatttttgtctctgtcgtcgccgctttttgcccccgccgcagtggctttttgtccccgccgccggggctttttgccgccgcgactttatgcccccgccgccgccgctttttgccaccggggctttttgcccccgccgccgaggatttttgtccccgccgcagaggctctgagggccggagcagcagactctgctgccagatctactggcatcctggcaagggcagcgccgaggggcgctcctggtccagctctcctggctcaggggtttcttgcctaggcgccggcgccccaggctccctgcctaggcccttgtggcctgcatagagcggcactgcgcgcggaggcaatgggagagaaggagggcggtggcggcggtgctgctgcggccgcggagggtggcgcaggggctgtggccagccgggcgctgcaacagtgcgggcagctccagaagctcatcgtcatcttcattggcagcctgtgcgggctgtgcaccaagtgcgctgtgtccaacgacctcacccagcaggagatacagaccctggaggtaaggggttcggggacccgggctgggatccaggagcggcccggacacctccttcggggccgcagttgactcctggccgagttgcatccttgagcccatgtcacccccttggaggcttcccctccctcctgcgctcgctgatgtgccagccggaggacccaggaacagccctcaccttgggtaggatttgtggagctggtgcgtggtgggaactgagatggaggctccagggtcccgtgggggtgggggtgggctgcgcgcggacatccccttaccctctgaatttccatctggtccagccctctcatcttgtaggtgaggaaaccgaaggcctgaaggagaactgacttgccaggaacccctgttaaggagaattaacaaagtgtggttattaaagaagaactgagttgggagtcagacctggaggcccgcacccttggttaagacattacaccaccttgagtctggcctgttgactgagggtgagccactccatcctcgtctgattgtggggtcttgacctcaaggggtttcctgcaggaagaagcaaatgggtttgctttcctagctctgtccagtaccttagggaccctgaggactgaagagattcttggacagccatctggtgtatgtcatgggtgggccttttttgaaggtcagtctgaccagtgggctggctcagccgaaatgaactgtcttgaatctttggagttgtctgtgtacttttaagggcttctcaggcttgcacc

SEQ ID NO: 13155 - DNA, 1466 bp, Artificial sequence
  DNA replication origin
cccgccgccgtggcatgttgcccccatcgccccggctttttcccccaccgccccggctttttgaccccaccgttgcggctttttgcgcccgccgccgcaactttttgcggctttttgcccccgccgccgcgggattttgcccccatcaccgcggctttttccccgccgccgcggctttttgccgacgcagctttttattcccaccgccacaggtttttaccgctgcggctttttcaccccggcatcgcgggtttttgcccccaccgccgtggctttttgccccaaccgccgcgggtctgagggcgggatcggcagactcggctgccagatctaccggactcctggctaaggaccagggtcactcctggtccagctctcccggttcaggggttccttgcctagacacccgcgccccaggctctgttcctgggccgctgcagcctgcatagagcggcgctgcgctcggccccgatgggagggaagaaggagagcggtggagggggtgacacagctattgcagagggaggcgcaggggccgcagccagccgggtgctgcagcagtgcgggcagctccagaagctcatcggcatctccgttggcagcctgcatgggctgcgcaccaagtgtgctgtgtccaaggacgtcacccagcaggagatatggaccctgcaggttagggggttggggaccagggctgggttccagcaacggactggacatctccctcggggccccagttcattcctggccgagttgcatccttgagcccgtgtcacccccttggaggcttctcctccctcctgcactcgctgatgttggagccggaggacccaggaccagccctcaccttgggcaggatttgtggggcgggtgcgtgttgggaactgtgatggaagctcgaggggcccgtgggcggggtgggctgcgcgcggacatccccttacgccccgaatttccatctggtgcagccttctcatcttgtaggtgaggaaaccgaaggcctgagggagaaatgacttgccaggaacccctgttaaggaaaattaacaaagtgtggatatcaaaggagaactgagttcggattcagacctggagtcccacacccttggttaagacattataccaccttgagtctggcctgttgactgagggtgagccactccatcctcatctgattgtggggtcttgacctcaaggggtttcctgcaggaagaagcaaatgggtttgctttcctagctctgtccagtaccttagggaccctgagaactggagagattcttggagagccgtctggtgtatgtcatgggtgagccttgtttgaaagacagtctgcccagtgggctggctcagcctgaatgaactgtcttgaatctttggagatgtctgtgtacttttaagggtttctcatccttgcaccaaaagatcccctggaaattaggtgggaaaccttaacttttgtggagcc

SEQ ID NO: 13156 - DNA, 996 bp, Artificial sequence
  DNA replication origin
ctgcaatagctgtgtcaccccctccaccgctctccttcttccctcccatcggggccgagcgcagcgccgctctatgcaggctgcagcggcccaggaacagagcctggggcgcgggtgtctaggcaaggaacccctgaaccgggagagctggaccaggagtgaccctggtccttagccaggagtccggtagatctggcagccgagtctgccgatcccgccctcagacccgcggcggttggggcaaaaagccacggcggtgggggcaaaaacccgcgatgccggggtgaaaaagccgcagcggtaaaaacctgtggcggtgggaataaaaagctgcgtcggcaaaaagccgcggcggcggggaaaaagccgcggtgatgggggcaaaatcccgcggcggcgggggcaaaaagccgcaaaaagttgcggcggcgggcgcaaaaagccgcaacggtggggtcaaaaagccggggcggtgggggaaaaagccggggcgatgggggcaacatgccacggcggcgggggcaacaagccatggcggccgaggcaaacagccgcggcgacaaaaagctgcggtggcgggggcaaaaagccgcggcggcgggggcaaaaagctgcggtgatgggggcgaaaagccataaaaagccgcatcgtcggggtcagaaagccgcgacagcggggtcaaaaagccgcggtggcggggtaagaagccacggcggcaaaaagatgtggcggcgggggcaaaacggtgcggcggcggcataaagccgcggcggcgggggcaaaaagcctcaaaaagccacggtgtctggtgccaaaagctgcaaaaagccacggcagagtgggtaaaaagccccaaaaagccgcggcagagggggcaaaaagcagggacggcaaaaagccacgacggcgggggcaaaaatcggctggggtgataaaaagctgtggcggagggggcaggaagccacgtagggggcaaggaggcgcggcggcgaggc

SEQ ID NO: 13157 - DNA, 1190 bp, Artificial sequence
  DNA replication origin
tgcggtggcgggggcaaaaagccgcggcggcgggggcaaaaagctgcggtgatgggggcgaaaagccataaaaagccgcatcgtcggggtcagaaagccgcgacagcggggtcaaaaagccgcggtggcggggtaagaagccacggcggcaaaaagatgtggcggcgggggcaaaacggtgcggcggcggcataaagccgcggcggcgggggcaaaaagcctcaaaaagccacggtgtctggtgccaaaagctgcaaaaagccacggcagagtgggtaaaaagccccaaaaagccgcggcagagggggcaaaaagcagggacggcaaaaagccacgacggcgggggcaaaaatcggctggggtgataaaaagctgtggcggagggggcaggaagccacgtagggggcaaggaggcgcggcggcgaggccaaaaagccgcggcggcaaaaagccacaaaaagccggggaggcggggcaagaagccgcggcgggaaaaacctgtggcggcggcgggggcgtaaagcagtaaaaagccgcggcgccgggggccaaaagccacaaaaagccatggcggtggtgacaaaaagccgcggcagaaaaattcgcggtggcgggggcaaaaagctgcggcagcagggggaaaaaagccgcaaaaagccgcggcggtgagggtaaaaagctgtggcttctggggcaaaaagccgcggcggcggggggagaaagacgcaaaaagctgcggggacaaaaagccacggcggcgagggcaaagagccccaaaaagccttggcggcaggggctaaattccgcgaggccgggggcagaaagccacggcggcgggggcagaaagcaacaaaaacccgcagcggcggggtcaaaaatccacggcggcaaaaagccgcgttggcgggggcaaaatagtcgaaatcgggtagaatgccagcacagcttggcattcctggagtgtgatgtggaaggaaaagtgcagaggaagacaaacaaagatgtaagtaggcttgactcagtgcagctaagaacccacatgttatcttgatgttatctatcagctaattttttgtattttagtagagaaggggttttaccacgttggccaggatggtctcgatctcctgacctcatgatccatgcacctcagcctcccaaagtggtgggattagaggcatgagccacag

SEQ ID NO: 13158 - DNA, 960 bp, Artificial sequence
  DNA replication origin
ctgcagtggcgggggcaaaaagccgcaaaaaaccctggcagtgggggcaagaagccgcggtaggaaaaacctgcggcggcaggcgaaaaaagccgcggtggaggtggcgaaaatgcgtgaaaagccgcggtggcgggggccaaaacccgcggcggcaaaaagccacaacaagccgtggcggcggggcaagaagccgcggcgggaaaaacctgaggcggcggggggagaaaagcagtaaaaagccgcggcgccgggggccaaaagccataaaaagccgcggcggcggttacaaaaaaccacggcagaaaaattcacggtggcgggggcaaaaagctgcggcagcagggggaaaatagccgcaaaaagccgccgcgacgagggtaaaactccgtggcttcaggggcaaaaagccgcgatggcgggggaagaaagacgcaaaaagctgcggcggcaaaaagccgcggcggcggtgggggcaaaaagccccaaaaagccgcggcagcaggggctaaattccgcgaggccgggggcagaaagccgcggcagcgggggcagaaagcaatggcggcgggggcataaagccgcaaaaacccgcagcggcggggtcaaaaatacacggcagcaaaaagccgcgtatgctggggcaaaatagtcgaaatggggtagaaggccagcacagcttggcattcctggaatgtgatgtggaaggaaaagtgcagaggaagacaaacaaagatgtaagtaggcttgactcagtgcagctaagaacccacatgttatcttgatgttatctatcagctaattttttgtattttagtagagaaggggttttaccacgttggccaggatggtctcgatctcctgacctcatgatccatgcacctcagcctcccaaagtggtgggattagaggcatgagccacagagtgctcaaaaaatctattaattaaaaaatgtgtat

SEQ ID NO: 13159 - DNA, 825 bp, Artificial sequence
  DNA replication origin
gaggtgaaaaagccgcagcagtaaaaacctgtggcggcgggagtaaaaagccacgtcggcaaaaagctgcggcggtggggaaaaagccgcggtgatgagggcaaaaagccacggcagcggaggcaaaaagctgcaaaaagccgcggcggcgggcgcaaaatgccgcaacggtggggacaaaaagccggggcagtgggggaaaaagccggggaaacgggggcaacaagccatggcggcggggacaacaagccacggaggccgaggcaaacagcgcggcgacaaaaagttgtggtggcgggggcaaaaagccgcggtgacgggggcaaaaagccgtaaaaagccgcagcgtcatgggcagaaagccgcgacggctggggcaagaagccgcggtggcaggataagaagccacggcggcaaaaagatgcggcggcggggggcaaaaaggcgcggcgggggcaaaagggggcggcggcggcaaaaagcctcaagaagccgcagcgtccggtgccaaaatccgcaaaaagccgcggcggagggggtaaaaatacggaaaaagccgcggcaaagggggcaaaaagcaggggcggcaaaaagccatgacggcggggacatgaagccgcaaaaacgctaggcggcaggggcaaaaacccgtggcggcgggggcaaaaatcggctggggtgataaaaagtcgcggcggcgggggcaaaaagctgcagtggcgggggcaaaaagccgcaaaaaaccctggcagtgggggcaagaagccgcggtaggaaaaacctgcggcggcaggcgaaaaaagccgcggtggaggtggcgaaaat

SEQ ID NO: 13160 - DNA, 1118 bp, Artificial sequence
  DNA replication origin
ggggcaaaaaccgcggcggcggtggggcagaaagccgcggcaggcaaaaagccacggcgcaggggtggaaaaaacccggggtgctgaacaactcgtggcggcggggggacaaatagccagggcgggcaaaaagctgcagtgccagggggtcaaaaagccgcggcggcgggggtgcaaaaagccgcagcggacaaataaccgcggcatgggtggaggcaaaaagccgcggtgtgcaaaaacccgcggcgccgtgggcggggcaaaaagccgcggcaacgggggggcaaaaagctgctgcggcgggggcgcaaaaagccgcggcggaaaaaaaatgccgtggcagcggggagcaaaaagccgccgcgggtaaaaagtccctgcggcaggggtcaaaaagccgcggtgggggataaaaagcggcagcaggcaaaaagccgcggcgggggtgggcaaaagccacggtgggcaaaaacccgcggcgtcgagggggcacaaagcctgggtggacaaaaaggcaaggcggagtgggggcaaaaagccgcggcggctggggggagaaagccgcggcggcgggagagcaaaaagactcggcggcggagggcaaaataatggagagggggtagtaggccagcactgcttggcattgctggagtgtgatgtgataggaaatgtgtagccaaagacaaaaaaagatgtaagtaggcttgactcattgcagctaagaacccagatgttatcttgaggtttttaactaataagcagtttaaatcagaatggcacattctgatttgttttttgtatgttcacatttggcaggtatagatactgtttgaagagagaaaagtcagtagagagaggtaacaaaattaaatatgtgccaagtctagaaacaagagaccagggggataaggacctttcgaaataaaatgcaagatttgaaaactgattggctgggggatgaggaaaaggcaggtctttaagatcaatccctgttttgctttaagttgttagggggtggttttatcacatgttgtagaatatgtcatttcagttttgaacatcttgagttaaattgtcctaacatatcttatgaatttgattttattccctgggaagct

SEQ ID NO: 13161 - DNA, 1127 bp, Artificial sequence
  DNA replication origin
ccccgccgcgactttttgcccccgccactgcggctttttgcagccgcgacttttaggcactgtcaccgccactttttgcccccgccgcagcggctttttgtccccgccgccatggctttttgccgccgcgagtttttgcccctgtcgccgccactttttgccaccgtgactttttgcccccgccgccgaggatttttgtccccgccgccgcggctctgagggcgggagcagcagactcggctgccagctctactggcatcctggcaagggcagcgccgagggctgctcctggtccagctctcctggctcagtggttccttgcctaggcgcgggcgccccgggctccctgcctaggcccctgtggcctgcatagagcagcgttgcgcgcagaggccatgggagagaaggagggcggtggcgggggtgatgcggcggccaccgagggtggcgcaggggctggggccacccgagcgctgcagcagtgcgggcagctccagaagctcatcgtcatcttcactggcagcctttgcgggctatgcaccaagtgtgctgtgtccaacgacctcacccagcaggagatacagaccctggaggtaaggggttcggggacccgggctgggctccaggagcggctcgaacacctccttcggggccccagtttactcctggccgagttgcatccttgagcccacgtcacccccttggaagcttcccctcactcctgcactcgctgatgcggcagccagaggacccgggaccagccctcaccttgggcaggatttgtggagcggatgcgtggtgggaactgggatggaggctccagggtcccgtgggggtggaggtgggcgtgggctgcgcgctgacatccccttaccccctgaatttccatctggtccagccctctcatcttgtaggtgaggaaaccaaaggcctgagggagaactgacttgccaggaacccctgttaaggaaaattaacaaagtgtggttgttaaagaagaactgaattgggagtcagaactagaggcccgcacccttggttaagacattataccaccttcagtctggcctgttgactgagggtgagccactccatcctcgtctgattgtggggtcttaacatcaagc

SEQ ID NO: 13162 - DNA, 820 bp, Artificial sequence
  DNA replication origin
gggatgtgagcagcacctctgcctggccacgaccccgtctgggaggtgaggagcgtctctgcccggccgccccatctgagaagtgaggagaccctccgcccggcagccgccctgtccgagaagggaggagcccctccgcccagcatctgccccatctgggaagtgaggagcgtctccacccggcagccaccccatctgggagggaggtgggggtcagcccccgccaggtcagccgccccatccgggagggagttggggggtcagcccccaccagcccagccgccccatctgggagggaggtgggtggtcagccccccacccagccagctgccccgtccaggaggtgaggggcacctctgcctggctgtccctactgggaagtgaggaacccctctgcccagccaccaccccatctgggaggtgtacccaacagctcattgagaacgggccatgatgacaatggtgattttgtggaatagaaaagggggaaaggtggggaaaagattgagaaatcggatggttgctgtgtctgtgtagaaagaagtagacatgggagacttttcattttgttctgtactaagaaaaattcttctgccttgggatcctgttgatctatgaccttacccccaaccctgtgctctctgaaacatgtgctgtgtccactcagggttaaatggattaagggcggtgcaagacgtgctttgttaaacagatgcttgaaggcagcatgctcgttaagagtcatcaccactccctaatctcaagtacccagggacacaaacactgcagaaggccacagggtcctctgcctaggaaaacc

SEQ ID NO: 13163 - DNA, 1183 bp, Artificial sequence
  DNA replication origin
aagaaaaaaaatttaattatccgggcatggtggcacccacctgttatcccagccactctggaggctcatgtgggacaattgcttgagcccaggatgtagaggctgtaggggacccatgttctttccactgctgtttagcctgggcaatagagtgagagagagggagggagggagggaaatagagtgagaggaaggaaggaaggaagggagggagggagagagggagggaggggcaataaagtgagaggaaggaaggaagaaagggagggaggggcaacagagtgagaggaaggaaagagggaaggaaggaaggaaagaaagaaagaaagaagggaggtagggaggtaggggttttgtggctcacacctgtaatcccagcactttgggaggccgaggcgggcggatcatctgaggtcagcagttcgagaccagcctgaccaaaatggtgaaaccccgtctctactaaaaatacaaaaaaaaaattagctgggcatgatgtcacatgcttgtaatcctagctactcactaggctgaggcaggaaaatcacttgaacctgggaggtggaggttacagtgaatggagatcacgccactgcacttcaccctgggggacagagtgagactgtctcaaaaaaaagaaaagactgttaatataggagagtgaatatgtgcttgtgtgtttgagttggagtgagcgcctgtggggtctgtgaggggagtgactgtatgtgtacagatgagtgtgaggggagtggtgggagaagatgaggggtcctttcaggccaggtcaaagagtttggcttcatcttacaggcattactgtgccactgacagattttcactgcagattaatgtgcccagagctacattttagaaaaacctttctgacagcaacatgggggctggactgggaggagaagaagacaaaggggattaggggagagactgctgtagtcttggtgaggccacgggaggagaaaggaacctatggtcctttggcaacagcagccacattccccttcccccagaccctggcaacctcgactctgtttttggatttgactcctctagggacttcctataagtggaagcatgcagtatttgtccttttgtggctggcttattttacttagcataatgtcctcaagttcatccatgttatagcatgggtcagaatttcctt

SEQ ID NO: 13164 - DNA, 1971 bp, Artificial sequence
  DNA replication origin
atatatcccacttgtaagtaagaacatgcaacatttggttttctgtttctatgttaattctgttaggatgatggcctctagctgcatccatgttgctgcaaaagacatgttcttttttatggctgtgtagtattttacagtatatatgtaccacattttctttatccagtctaccattgatgggtatctaacttgactccatgtcaagatcacaccactgcactccagcctgggcaacaagaggtccctgcgccccacacacaatgaccccgcatcagggtccctgcgccccacacacactgaccctggatcggggaccctgggctgcagaacccatccatgatgtttctgtgcccctggctctggtggcattgggaccctccaggctgggctgagcagggcccccccaccagtgtgttccagcgggagtggacctggattggggggcagggattgacacccaaggggacctgccccagcctcctcctgtactgtaggggttctcgttttccttggctgagggaagtggcctctccctgctgaaacttggggtcgggctgggtgtgagaggaaacgggggtgagcaggaccccaaaccttgggaatcctgagtgtgtgtttgggggggttggggggcaggcctatgatgtgcctgggagctgtctgggggccctcctggggagccaggctcacacactgttgtgtgggactcaacgtggggcagtgtcctggccaggatgaggaaagccatcaccccggggtttgcgggagatacatgcaggctaagatctcgcccacccggctccccgatccactgcagccagagtccctcagccttggccaggacctgaagtccgagcgccatccctgggtctacccggccaggcgggcaccccccgcttacaggtcatccccaccccctccatctgcttccgttagagtgacagctaccttgtcctggtgccctggttgaggggggaagctgcccttggacccgcatcggagccgcgcagcgccttctgttggcagttgttggaagtgcagcctggcgtgagcagtgcctttccctgtagatgggacccagggcagcacagctggaaatgggggatggtaacttgtggaggtgatccccactgtccactgacagcggcagtagtagctgcggactatgcagactcaagacagccccagcccatgtcagcaccaggagctaaaacggagtcaagggtttggtgtggggaccagccgggggcaggcctggggagcccatttggcaatgcgggcaggaaggcgcccactctgggactgtctgggcctgccgggggtctccagccagagaaggtgggtgtgatggggcgcccaacctcgaagggctgagtgccaggccggccctgggggcccgcgctgcccacacggactagatgaagtccagaggcgcccacgtcccactggctcagggcgcgggcctcaaacagctgcttaatgagtgctgacttctcctgctccagctgcgtgatgcgctcactcttctctgtcacctcctgggtgaggagtcggttctgctcattcagcatgaggatggtctgctgctgccggcccagggacgaagtggacgtgcgggcaggaccgggtggggggcggaggaggacttggacagggcctggctggcacaggccgcagccagcagctccctcaggcaccaggccacctcctgtaccttgggcagtagccgccccagtgggcgggggctcccgcagccccatagtcggtgctggtgctcctgcactcattgcagctgctgctggtaccagccgcggccccgcgccgtcatctccaaagcctgcaactgcacagccttctctgctccagcttctttatctgcttcagcaggccgcagtccataccgctggtgatggtgtgactccgacgttcccctggggcactggaggcccgccaggcatcccctgagtc

SEQ ID NO: 13165 - DNA, 1394 bp, Artificial sequence
  DNA replication origin
ttgaggccaggagttccagaccagcctggtgaacatggtgaaaccccatctctactaaaaacacaaaaattagctgggcatggtgaggcatgcctgtaaccccagctactcgggaggctgaggcaggagaatcacttgaacccggaaggcggaggttgcattgagcctagatcgggccactgcactccagcctgtataacagagcaagactctgtctcaaaaagaaaaatcttctaaccctttttcctcgtagcttattttcttctgtgcttcatactttttatttattttttattttttacaataggatccggtttattctgccttggcagggtgatcctgagagtggtgggtgtcaccctctcctgggcagagggaggggccgtgggccagtcaagccaatggtaggagaagcgctggtgaggggtggaatttggggttcaggggtgtaaccccaagaatgcagtgaaaccaggccgaggcccagaggcagctgtggtaggccagggcagggtggaaggcagtggactgggcccgggccgggatgacagggccaaggactcaggccacactggcaccccgggaggcggggcgcagtgtcgcatgacgtagaaaatgaatcacaggcccagggctcacaataagcacatggacaagtgggcacagactcacaggccagatggacctccagccacggccgggccagactcgtggacacaggcgcagtgtcacgtacagaccacggggagacatggcactaggggacaaatggacgtgacaccacaatgcacagggcaggccacagagctcgagggacgtgggcaggggccttttggcatttctgcgctggaatcatgtgagacaagggtggtggccgctctggaggtgcctggggggttccctcattacccctctgggcttagtccatcctccacactgttgtgcagcttctccacctcctggtagaggataaatactgttacccttatccctggtcacatccagggagacgcggtccagcggcccaggcgggggacagtgccgttctagaggtccttgagcccctccttcctcaggatctgcagccataggccggtgtgttccgcgtttgtgctgctccaggccccgcatccggtctcgatcccatccagaggagcgtttcccaagacactggctgcgcccacaatggctccgaagaccccagcgaccagcgggtccatgggcttgctggggttgtcccctcggtaccagctgtgcagggaggtcaggaggagaagcagacggcctggttccagccctgctttagcgtgggtgccatgaggccccggtgagtccccttgttctcgcacaatctctctaacctggtgggagactcctctgcactggaggtctgg

SEQ ID NO: 13166 - DNA, 1385 bp, Artificial sequence
  DNA replication origin
gagttccagaccagcctggtgaacatggtgaaaccccatctctactaaaaacacaaaaattagctgggcatggtgaggcatgcctgtaaccccagctactcgggaggctgaggcaggagaatcacttgaacccggaaggcggaggttgcattgagcctagatccggccactgcactccagcctgtataacagagcaagactctgtctcaaaaagaaaaatcttctaaccctttttcctcgtagcttattttcttctgtgcttcatactttttatttattttttattttttacaataggatccggtttattctgccttggcagggtgatcctgagagtggtgggtgtcaccctctcctgggcagagggaggggccgtgggccagtcaagccaatggtaggagaagcgctggtgaggggtggaatttggggttcaggggtgtaaccccaagaatgcagtgaaaccaggccgaggcccagaggcagctgtggtaggccagggcagggtggaaggcagtggactgggcccgggccgggatgacagggccaaggactcaggccacactggcaccccgggaggcggggcgcagtgtcgcatgacgtagaaaatgaatcacaggcccagggctcacaataagcacatggacaagtgggcacagactcacaggccagatggacctccagccacggccgggccagactcgtggacacaggcgcagtgtcacgtacacaccacggggagacatggcactaggggacaaatggacgtgacaccacaatgcacagggcaggccacagagctcgagggacgtgggcaggggccttttggcatttctgcgctggaatcatgtgagacaagggtggtggccgctctggaggtgcctggggggttccctcattacccctctgggcttagtccatcctccacactgttgtgcagcttctccacctcctggtagaggataaatactgttacccttatccctggtcacatccagggagacgcgtccagcggccaggcggggacagtgccgttctagaggtccttgagcccctccttcctcaggatctgcagccataggccggtgtgttccgcgtttgtgctgctccaggccccgcatccggtctcgatcccatccagaggagcgtttcccaagacactggctgcgcccacaatggctccgaagaccccagcgaccagcgggtccatgggcttgctggggttgtcccctcggtaccagctgtgcagggaggtcaggaggagaagcagacggcctggttccagccctgctttagcgtgggtgccatgaggccccggtgagtccccttgttctcgcacaatctctctaacctggtgggagactcctctgcactggaggtctgggaag

SEQ ID NO: 13167 - DNA, 1847 bp, Artificial sequence
  DNA replication origin
tctgtcacaaaaaaaaaaaaaaatatatatatatatatatatatatatatatatatatactgaagccttggtctcttcgtctattaagtgagggtagtaactccctccttgttaagctgttgtgattataaacatgagaacctcctacatcaagtatctgacacagtctggatagaaaccaaatcaacatcacaaaccttcactaataaatccaaagtcagcacctttctttccaccacaccataggttattctctgtcgtgatcaaaccaagcaggaagccaagatgtggaaagtcctggaggaccaggacacttaagcaacatttaagatgctgctggctcttctttacatgagagatctcccccagccccccattcttccttctgtgcctggacctgcccggggtcagtgctgcccaggcaggaagcggaagcccaggtcaagacccacgtgggcctggctcgtttctctcctggggggcgttctgcaaccctctgcctggtgctgaggtcgaccagatgccccggagcttccagactcccatctgggaggtcctggttcctgtcgctggccggtagattttgtggtgtggctgagcgaaagtgggtgcagaattgtgtcggcacactgatgtcgcgtggtttatagagccaagggccccgcagagaagacgtgctcagagccctgcccaccctcacggggtggcccaccatggccctgacccaccctgcctcacactgggcagtggctcatggccatacgaagaaaaatcccacagcctgcccaccccaaggccctccctcccagcctcgtgaccctaatcgcggcttccagcacctcaaacatgaccactagctcacagcaggccccgcccaggaacacccgtccccaggctgcactcccggccctgtcctgcagacctccgcgtcaaaggcccccaacgggacaggggtcctctaactgccccccacctctgcgcgccctctgttccattcctttttgccccctgcctgaatcacgcacaatcttgttgcatccatcctcttcccaccctgcgcccgtgtgtcattgtggccctactgcgtcctcagagcaggagggtgcagcgacacggcaggcactgggtaaatgccccatggtgggggtgtgtgagcggcgtcggggtgcggccgctgtgaggggcagctcctcttgtggctggggcggagctgaggacactcggagttggggtgggagagacgggactcaggacttagagggagcggaagggggcggggctgggaagggaggtagggcggggagctgggggagcgggtgggacggggctgtgtggggccaagctgagtcggggggtgggatgcagctgggcgtggctgagtgggggcggagctgagtggggggcgggatgcagctggaccactcattgtaggaattgctggaaggggctggtggagcaggtctggttgtgggagttgggtggtggcagtgggcagggccggcggtgatggaggagcctgtgggttggggcagggccggtggtggagggcggggccggcggggaggggtctgtgtgtgggcggggctggggcggggcggagcggggctggggcggggcggagcggggctggggcggggcagggcggtgcagggagctgggcggattaggcccccggcccactgtgcacgctccccaggcactgcgggcgtgatgatctctctgagccgcatcctcacggagctactgctgcccgacgagcgcgccagcatgctcatcttcttcctggtgtcggtggcgctggagctgctgtgcttcctgctgcacctgttagtgcggtgcagtggctt

SEQ ID NO: 13168 - DNA, 1149 bp, Artificial sequence
  DNA replication origin
ctcagccctcctggctgcgccaacccacgttggagagtcctcctgcaggctcagcctggcagcaaactctctaggaagctcacactcttcctccctagagacgggacgccaggagggaagtcagggctcagggataaccctgggttccctgagggggtgtggcggggcccccagaatttcccacagaagtcaccagccaggaaagggagtggtctcccaggtggggatagacaggcggagagggagggccaggggcttggttctgtggcccctggctctgctgggcttccctgtcacagcacagaggcactgcccctacggggtccccagcacagacagcccctgccaggaggtgccctatcccaccatccctgggcaggcagctgtccttggggggctggggtgccctctggtggcagcagcactgcacagacccccagggtcagggccggcagctgtacaggcctggggacacctgcagggtgaggtcaggagtgccaggccatgcagaggcgggtcgagggagccattggtcctcattcctgagggtccagaaccagaacggtcttgatgcaggtcttgatccagtgagtcacctgggcacttggctggggacactgaagtgagccagaaacacatccccaggggagcccccagacccagagaggggcccaggatggaaggggacaagccaggggaggggtgtgtccctctcatggtcagggaggttccctgaaggacttttgggctaagacctgacccacaggaagggtgttggggcacagggaaaagtgtgtgcagtggctcagaggttgggaggagctccgttgggtttagaggaggggagaagcaaaggggtcatgggggactagatgctcttgttggtttggtcagaagctggtagagggttcacgggagtgatgagatggaatttgctgcatcagaagtgtgagagacagccaggctcattggctcacagctgcaatactagctatacaggaggccaagttgggaggatcgcttgagccaaagagtttgagatcagcctgggcaacatagcaagaccctgtgtctacaaaaaagaaaacagcaaaaataattggcctgggtgatggcacatggctgtagtccccactacttgggaggctg

SEQ ID NO: 13169 - DNA, 1195 bp, Artificial sequence
  DNA replication origin
tctgcatgggcctgggggcacccgggcccccatgcagcagcaggctggagggccggcctggccaagtgcttgcaatgtgctgggcaggaagggccggtcccggctgagactgccctgagggggacagcagggccataccctgatagctaagaggggcccctgtcctgggggcactgaggggttggaaggtggggctggaagcatgtgcacatgcatgcacacacgtgcatgcacacacgtgcatgcacacgggcacacacatgcacaaacatgctcacccgggcgtccacgtgcacacctggccccatgctcacgcctgcaggagcgctcgcatgcacacaacgcacatggtctccaaaccatggcagtgatggagaggggtccctggccgccctcggggcacaggtggccggtggccagcagagcccggcgggctcagcagagcacgggcatgccgtccgtggaaaagatcatgcctgtggtgggctcgtaggtgcgcgcgaggtagtacaggccctcgctgtcctggtacttcttggtcttcagcatctgcgcatactgctccaggcccaccaccaggcacttgtgcaacaccgtctgcacgtcattttcgtccacatgcgaggactggtatagcacgcgctgcgggcacgcggggacatcaggatggcaggtagggggcacaaaggccgagggagccccagggagccacagggacagagacagaagcagagggagcgccagggactgagacagagaccaggtcagagacagaggctgaggaagagacagaccaacaaaagagagacagagactgagagatggagagcaaatgagagacagaagacaaggagagacagaccaacaaaagagagacagagactgagagatggagagcaaatgagagacagaagacaaggatagacagaacaagagatccaaagacgcagagagacagagaccgagactgagatcgagagacccagagagacacagagactgaaagatagaggttgggagagacccagagagagtcagagggcaagaatggccagagactcagagacagacactgggagagcagaggagacccagagacagagatagacgcagagaccgggagagacagagaacaggagccaggcactgagagtggcagggacaggaggtcagaggctgagggagaccatggggg

SEQ ID NO: 13170 - DNA, 1292 bp, Artificial sequence
  DNA replication origin
tcatcctcctcctcctcttcctcttcttcttcctccaccacagatgaggactcttcctgcagctcggacgatgaggcagcccccgcccccacggctggcccttctgcgcaggcggcgctccccaccaaggccaccaagcaggctggcaaggcgcggccctcggcccactccccaggcaagaagacgcccgcgccccagccccaggcgcctcctccgcagcccacacagcctctgcagcccaagactcaggctggggccaagagccgacccaagaagagagagggcgtccacctccccaccaccaaggagctggccaagcggcagcgcctgccgtccgtggagaaccggcccaagattgccgccttcctgccagcctgacagctctggaagtggttcggcaagcccacccaggtgagcaagctcgcgcccgggcacggccgaggggccgggggccttgtctctctctgctgggcccacggcttcacgccgtgtctccgcgtgtggtaacctcccagaaccccagggtggagggctggcgtcccactttatggatgggtacactgagtctcagagtgtcctcaggcacctgggtctgtcggactccgatgcctgagtccttcagagcagagcggtcctgccctctggtcctgcgaggcagagccaccctcatgtggagcccagatgaaggaaacgtgcaaagatcagcacagacccacaggcgtcagcgccacgtggaaggggctttccaggcctctgggattgtttcctttttctttttttgagactgagtctctctctgttgcccaggctggagtgaggtggtgtgatcttggcttactgcaccctctgcctcccgggttcaagcaattctcccgcttcagcctcccaagtagctgggattacaggcgcacgccaccacgcctggctaatttttgtatttttagtagagatgggggtttccccatgtgggtcaggatgatctcaaactctcctggcctcaagtgatctgcctgcctcggactcccaaagtgctgggattacaggtgtgagccaccgcgcctggctttttcttttctttcttttttttttttagagagaggatcttgctctgtcacccaggctggagtgcagcggcgccatcatagctcactgcagctttgaacatctgggcccaagcagttttcccacctcggcctcctgagtatctgggactacagacgtgtgccaccatgctacccagctgatttttaaatatttttgtagagacagggtctcactgtgttgcctgggct

SEQ ID NO: 13171 - DNA, 1248 bp, Artificial sequence
  DNA replication origin
tgcgcagaagggccagccgtgggggcgggggctgcctcatcgtccgagctgcaggaagagtcctcatctgtggtggaggaagaagaagaggaagaggaggaggaggatgaggatgaggaagaggaggaggaggaagaggaggaagacgaagaggaagaggaggaggaagaggaggaggaggatgaggaggaggaggaggaggaggaggccggtgaggtcgccctggagctggcagcgctgcagttacggcccccggcgccacagcccccgtccccgttcttgtcgccttcctcctccccttctgtctccgagccgctgctgctgctgctgctgctgctgctgctctcggactcttcggccccgtcctgctcagcctgggccttgtccgggctcttggggttcccagagtcctcgaacgtgagccccggcccgggttcctgggcgaggtcccggtcggtggccttgggccagggtgccttgggctcgctgctgccggccgcagggtgatagctgcccaggctcaggaggctcttgggctcctgccagccccccgcccccggatcctcccagagcagcagggcctctttagccttcttgcttttgggtgacatgacaccctcgtgatccagtttgacaagcagctcggcctcctcccccggcctccgagggcccttggcacccgactccttggctgcccgcgccttcttgggcttggggcgtgtggcaggcatggtgatgaggggtgctggggccagggtggtggcaggagctggcagctccacaaatggctcgggtgctgggcagctggtgaaggcgggtggtgcgggactgggctgcggcagtgcccggcgcaccttgggggccttggctcgcttgtccacaggctctggggggctcttcttggaacctggggtgctgctcggctccagggctaagggggtactggggacttcgtctgttgggttcccttcctccagggtagcagctctgtctgcaaaacaaaacagatgagaggctggggcgggggcttcctggcagagatgagctgtggctttcatcagaaaggcctgcttctgtgagttttgtttttgtttttgttttttttgagatggggtctcagtcacccaagctggagtgcagtggcgtgattaaagctcattgcagccctaacctccctgggctcatgtgagcctccagcctcagtctcccaagtaacctgaggccacaagcatgcgccactatgcctgg

SEQ ID NO: 13172 - DNA, 1270 bp, Artificial sequence
  DNA replication origin
agggctggctgatgttctatgcctgggccccctgggctctgctgtctgccctagagccaggctacaggtgagtagagggagaatagggcggggtcatgattccattcacctgggagaaaaacagaggcttccaggcaaagggagtcatgggaagcaacctagccagttctgatcccaagctgggaggagaaagggagcgggtggaggtaggaaccaagtgagggcagggcatgactgagggtcggccacagcccccactcctggctggactcgctctctgcaccttctccagcacgtgaactcctacccatccttcaaaactttcaatctggtcacccagtggcctcgtgactgaacctacccacccactggcggcgttgctggcctcccaggcgagtggacctgtttagggggcgctgcctgggcaccaaggctgaggggtgggcagcgggggtggtgggctgggtcagccgcaggtcacctgggtctcccggggccaccatgccacaccctggtgtgttggggatcctgatttcagcctcagcctgggcctgtcccctgcacagcccagctggatggaagggtggggggagggagaaaggaagaaaggagatgggagcagaggggaggagggggaagatggaggagaggggagggaagaggaaggggaaggagagggagggaggagggggagaaaagaggaggatggaggaggagtgaggctggtagaagggaggagggagggaagagagagggaggactgagtaggagaatgaggaaagcggaggagggagggagagggaggaggggagagacaggaagggaggaagagtagggaggagaaagggaggagggtggagaggaggggagaagggaggagagcaggaggagggtaatggaggactttggaggaggggaggggtgggaggagggagagggagggggagggaagagaaatggggaggagtgggagggaggaggagagaaagggaaggggaagagaggaggaggagtggggagaatggagaggaaggggagaggagggagaaggggtgggaggaggagggagagggaggggaagaggaggaatggggaggagggagagacacgagagaggaggtagaaggggagggaggagggggggaagagaggaggagtggggaggagggagaaggggagggagagggaggagaagagaggagaaggaatggagagggaggggaagagaggaggaggaatagggagaaggaggagggaggagaggagggta

SEQ ID NO: 13173 - DNA, 1331 bp, Artificial sequence
  DNA replication origin
gcaggggctcacgcctctggaaagggtgccagaagcatgagttgggcctcaacaggccactgtgacagaggagctgggccgcacacaggctgctgggaggcaggcagggacttggtcccgggaggccgccgtgaggcgagagctggaactggagacgcccctgggaggcaagagcggggcctgcagaggctgtactccagccagacctgggcctgtacaggccaccgggaggcaggaggtgggactgaggagcttcgctggagaaagttcagggtctacaaaaaccggcgggagctgggcaggagctgagccaaaagagcttgcttgctgggaggccggagctgggcctggagaggctgacttcaggaccacttgggcctgcagaggccgccgggaggcccaagctgggcctggagaagcccaccgaccggaggccgtttggggcctggagacgccgtcggagggcaggagctgagcctggagaggccaccgtgaggcctgagctgggcctggggagcttggcttgaggaagctgtgggccgaccaaggccaccacgagctgggcaggcactgagtccaaagacgttgttgggaggcaggagtcgggcctgcagacgcagccgggaggaagagctgggcccggagaggacgccgggaggctgcaagtgggtctggagaggccgacttgaggagcttctgggcccggagaggccgccggaagggaaaaactgggccgggaaaggccgttgtgaggaatgagccccatgggcctgaagaggccactggcaggcgggagctgggcctgccgaagcggcggagaggccggagctttggactcgggaggccgcaggcgagagcgagctgggcgtggagagtccgctgtgaggcagaggctgggcctgtgcaagctttcgggaggcaggaggccaggcctgcagaggccgactggaggtcaagttcgggggcctgcagaggccgcggaaagtcagaagcggggcctgggaaggccgccgggaggcatgagctgggctgggctgaaagaggccactgggagacaggaggagctggacctggagagacggactcgaggaacttttgcacctggagaggccgccgagaggccggagctgggcctggggaggctgacttgaggacgacttgggcctgcagagtctgccgggaggcaggagctgtccctggacaggcctacttgacgacagtctggtcctgcagaggctgctgggaggaagagctgggcctggagagaacgactggaggaagtgcaggatttggagcccatgcaaaggagcaaacgccaggccgggagaggc

SEQ ID NO: 13174 - DNA, 1421 bp, Artificial sequence
  DNA replication origin
tttgcacctggagaggccgccgagaggacggagctgggcccggggaggccaacgtgcagctcttccaggcccacttccaggccgacttgaggatgacttgggcctgcagagtctgccgggaggctggagctggccctggagagcctgactcaagggcagtctgggcctgcagaggccgccatgcgggaggcagaggctgggtctctagaggctgacgagaggcaggagctggccccggaggggccctcgttgacgatgcgttgcgcctggagaggccgccgggaggccggagctgggcctggagagggcgacttcaggacgatttgggccagcagaggccgccgggaggcccaagctgggcatagaggaatccaccgactggaggccgttcggggcctggagacaccgtcggagggcaggagctgagcctagagaggccaccgtgaggcctgagctgggcctggggagcttggcttcaggaagttgtgggccaaccagggccaccgggagttgggcgggagctgagtccaaagaggttgttgggaggccggagtcgggcctggagacgcagccgggaggaagagctgagcccggagaggacgccgggaggctgcaagtgggtctggagaggccgacttcaggaggcccagcctctgcctccctcatggcagcctctgcaagcccagctgttcctcctggctgcatctcctcaagtgggcccagaggttctgggtcctgagaggcagtcggacgggaaaaaatgggcctggaaaggccgttgtgaggaatgagccccatgggcctgaagaggccactggcaggtgggagctgggcctgccgaagcggccaagaggcaggagatttggacttgggaggctgcagtgaggcgagagctagctgggggtggagagcccactgtgaggcagagactggccctgtgcaggccttcgggaggcaggaggccgggcctggagaggccgactggaggtcaagttcggaatctgcagaggctgcggaaagtcaaaagtggggcctgggaaggccaccaggaggcatgaactgggctaggccgaaagaggccactgggagacaggaggacctgggcctggagagactgactcgaggaacttttgcacttggagaggccgccgagaggccggagctgggcctggggaggccgacttgaggacgacttgggcctacagaggtctccgggaggcaggagctgtccttggacaggcctacttgaagacagtctgggcctacagaggccgccgggaggcaggagctgtccctggacaggcctacttgacgacagtctggtcctgcagaggctgctgggaggaagagctgggtctggagaggccgactggaggaagtgcaggacctggagcccatgcaaaggagcaaacgccaggccg

SEQ ID NO: 13175 - DNA, 807 bp, Artificial sequence
  DNA replication origin
gccccagcctctgccctcgccccgcttggcagcccctggcccacacccccacgccggctatctggagccaagcgcagcggagcgcttcacccacggtcccaggtcgcagagggcccggtgctcggcgtcccgcccttctccagctccacgtggtaggcgtagatggagagcaggatcccggcggcagcgcacactgcgtatcaggtcaccttctcccaccgcggcaccgacactcagcaggacgtgcgccgccgtctgcctccctccgcctccgcctcagccgccgccgctgccgccccattggctccgtcgcctgctccgggccccgccccgacaggcgcgcggccccaccgccccgacaggagtgaggcgggcggggcggggaaggcgcgcgcaggcgccgaaggagtggacagagagcgcaactaccctggaggcccgatcggccggcggaaactgaggcagcgcgccacggcgcccgcgaggcttggggcccggggagagaggggcggggccgggagggacggggccaggcgggccagcgcggggagggactccggggagcggagcaaggatgccactgtgggtgactgggcgaggcctcggcccctccctctggacgtggcactcaattgctatcctttttccctttttcgtcgttatcacttgatatttctgacccaatccaaatcaaccctggccaatgcttggagctttagagccacactcctatgacttgatcttaccactaccacctaagggcactctgtgttcaacctgtgcaaaacttttttttttaatgttcaa

SEQ ID NO: 13176 - DNA, 1067 bp, Artificial sequence
  DNA replication origin
ggaggcggagggaggcagacggcggcgcacgtcctgctgagtgtcggtgccgcggtgggagaaggtgacctgatacgcagtgtgcgctgccgccgggatcctgctctccatctacgcctaccacgtggagctggagaagggcgggacgccgagcaccgggccctctgcgacctgggaccgtgggtgaagcgctccgctgcgcttggctccagatagccggcgtgggggtgtgggccaggggctgccaagcggggcgagggcagaggctggggctggggagcgcgcggtgggagctcgggcctggaggcggaggggaccgggccgcgggggaactgactgggtcggggctgggcgggaggcggcggtcgggcgctcctgcccgggggcgacccgagcccaggtcgcggggaggaggtggcggggccgcgaggtcgccggggaagaatgaggtggccgagtgcagcccagaggctggggcagatggggagcggtcgggcgcgctggggctgggctgggcaggagcgcgagggggctgcggagtgtgggtcccggcggcttgacaggtttcctcgttctcgggaggcgggccgggggtgtgggaccctgtccgcagcacccgcgagaccagcggccgcctcttgtccccaccatcgctgctgctgagtctttggggcgggctcggacccagggagggttatatttcccactgtcttcctggtgctaggacaggtgtttccgtgatcaggcctctttgtactccagcgctagtgagaatttgcagacttactaggacggtgacatttgcgggcaaacacgaatttgaccctactttggaagaagataaccggcacttaacatatctgatttcttggattccccctcgtatatttcggtgtgccaggagggggaaatggtctgagttcgagtctagtttaagcttcattggagtaaaggacaagtatgttatgtagatggcggtgttataggcattgggatgacttttagacattgttgcttattagcataatacgatacccacaacagattaaaaacacacgctttgctaa

SEQ ID NO: 13177 - DNA, 884 bp, Artificial sequence
  DNA replication origin
ccatctgggaggtgaggagcgtctctgcctggccgccccgtctgagaagtgaggagaccctctgcctggcaaccgccgcgtctgagaagtgaggagcccctccgcccggcagccacccggtctgagaagtgaggagcccctccaccgggcagccaccccgtctgggaagtgagcagcgtctccgcccggcagccaccccgtccgggagggaggtgggggtcagcccccgcccagccagccgacccgtctgggagggaggtgggggggtcagcccccaacccggccagccgccccgtccgggagggaggtggggctgtcagccccccgcccggccagccgccccgtccaggagatgaggggcgcctctgcccggccgcccctactgggaagtgaggaccccctctgcccggccaccaccccgtctgggaggtgtgcccagcagctcatgaagaacgggctatgatgacggtggcggttttgtggagtagaaaggggttgagaaatcggatggttgccgtgtctgtgtggaaagaagtagacatgggagacttttcattttgttctgtactaagaaaagtgcttctgccttgggatcctgttgatctgtgaccttacccccaaccctgtgctctctgaaacatgtgctgtgtccactcagggttaaatggattaagggcggtgcaagatgtgctttgttaaacagatgcttgaaaggcagcatgctcgttaagagtcatcaccactccctaatctcaagtacccaggggcacaaacactgcggaaggccgcagggtcctctgcctaggaaaaccagagacctttgttcacttgtttatctgctgaccttccctccactattgacctatgaccctgccaaatccccc

SEQ ID NO: 13178 - DNA, 1605 bp, Artificial sequence
  DNA replication origin
caccacacaaacttctctcacgtgttgggagggaccaaggcgctcaggtcctgcacctgcgttaattacggcaggcaggtccacaccaggaccccggggcctgggaaccagcctgtgtgggggggcagagaagtggtggatgtggctcgcaaaatgtccctttctcctgggacattttctcctctttatcacagtgacaggagcgtctgtgtgcgaggcctgacccagacgccggccatgcagccagcccggggtccaataggtgcatctggggagcaaagggagaccgaaaaaaaggtggttttcaaaagtgaagtgccaggttaccagagactgggcaccttcacatgaggcagcaaacaacggtttaggacactcacgaggaagcttccgtcgccggaccaaggggcagcactgcgcatgtagccaggggaggaacaatagagggtggggctaaaaggagaggcccctcagtgggaacgggtggggtcgacccggcggggggggggtggggtgaaacgagcgttaccatggcaaccctgcggcggaagctctgagaagctcttggcctctaccggttctgcgagaaagtaaactttgggcacgacaagtcatgaagtcggcacgttggggagacaccgtgtcacaatgacaaggtgagatcagctgccccggccaagctgtctcctcgagtgcaggagaggtttgtgaacagccaagcttccctccgcatggcggaactgcactggaatcctgaaagagctcggtgcagaacggccctttgctgggaatgatgggagctgtagtctcttatccgcacccaggtgttagttgtaggtttacaagactacaatcccagcacgaaacaggattgggagtggtacagatccctggagggagacatagcgcggtgcgctactgcagggtatttggcaggagtagtgtcttagccgcttccggccgttggtcgcaaggctgcgggactacaatcccagcatgcaacgggagtggggttggtgaggacacctgggggggcagcgcggggcgcgcctcgccaggcatgctgggagaagtagtttcttcaccgctttcggccgttgttcgcagggctgcgagactacaatcccagcatgcaaggggaatgggttggtgatgatacctggagagggcggtgcgcgcctcgtaaggcatgctaggaggagtagtttctttttttgttttttgcttttttctttgagacagagtctcgctctgtcgcccagcctggagtgcagtggcgcgatctcggctcactgcaagcttgggaggagtagtttcttaaccgctttcggccattggtcgcagggctaccggcctacagtcccagcaagcgccgggctcgggggtggtgcgcagcctcagagggaggagctgggccgtgtggacctctctgcttccaaacctacgctggcccctcagtctgtgccaccctggctaaggggattgagtccggagagggacttgaggggtaggtcggtgctgggcagtgaggagggtgtgatgctgcgaagtgcatctcgcctttgcccaaatcggacgggtctcagcctcactccatctcccgct

SEQ ID NO: 13179 - DNA, 1262 bp, Artificial sequence
  DNA replication origin
tcccagctactcgggaggctggggaaggagaatcacttgaacccgggaggtggagggtgcagtgagccaagatcgtgccactgcactccagcctgggcaacagagcaagactctgtctcaaaaaaaaaaaaacaacaaaaaaacttctaaccctttttcctcgtaccttatcttcttctgtgcttcatactttattttttattttttgcaataggatccggtttactctgccttggcagggtgatcctgagagtggtgggtgtcaccctctcctgggcgtagggagggccagcgggccagttaagccaatagtgggagaagcgctggtggggggcgggatttgggggtcaggggtgtaatcccgagaatgcggtgaaaccaggccgaggcctggaggcagctgtggtagcccagggcagggtggaaggcagtggactgggactgggccagggcgacaggctcgaggacccaggccacacgggcaccctgggaggtggggcgcagtgtcacatgacgcagaacatgaatcacaggcccagggctcacagtaagcacatggacaagggggcacagactcacaggccagatggacatccagccaacaccgggccagacaagtggacacagggccgctgtcacatacagaccacggggcgacatggccctaggggacacacagacttgacgtcataatgcacaaggcaggtcacagagctcgagggacctgggcaggggccgcttggcatttctgcactggaatcctgtgagacaagggtggtggccgctctggaggtgcctggggcggtcccctcaaggcccttccgggcttactccgtcttccacactgttgagcagctttcctacctcatggcagaggataaacactgtggtcacatccaggcagacccggcccaggtgggggacaatgccgttgtagaaggccttgagcccttcctttctcaggatttgcagccgcagtcccgtgtgttctgcatttgtgcttttcaggccccgcatccgggtctcgatcccgtgcagtggagcgtttcccaagacactggctgcgcctgcaatggctccgaaggccccagcgaccagcgggttcatgggcttgctggggttgtcccctcggtaccagctatgcaggggggtcaggagaagaagcggatggcctggttccagccctgcttcagcgcgggggccgtgaggccccgctgggtccccttgttcccgcacaatctccctaaccccggtgggagact

SEQ ID NO: 13180 - DNA, 1120 bp, Artificial sequence
  DNA replication origin
cccgtcccccaagcctgcgcccctaagcccattgacctttaacttcctgtagggcgccagctccggggcgctcaggggaaggagcctgcagggaccagggctccccccctcccaccgccgggcttccgggcgcctcccgcccctgccccgcagctcccgcagcggccgcgggtaccactgctcctcgaagccctggcgtcgactgtccaagtcggcgcggaagctccagaggccgcccagctccttggactcccgcgacgggctctcccggggatacagcgtccagccctgcagcgccagggcgcagccaccgccgtgcctcggatcacactttcctctccaccgctcggcagccgtctgcggggctaagagcagcgccggaggagcccggcgggtgggtcgcgtgaggcgcctgagaccgtccgcgccatctttgctgagggcgagtgccaggcctggaggggcgggcggggccccgcactgcccagtggggcctgcggctggaaccctgggttaggcctttggggaagtgggacgctcaccgtcagccccggctaagaagggcgaggtcggctccccaccccaacacaggctggatgatccagggacgcaggccaggacagaacccctgagatcgtggtatccccgtttcttcaaggagcacctcctcttgctttccacagcaggaattccagcaggccccagcgaagcctcttctattcctgtcggatgcagcctcttgcatggatgcacgtcctttggatggggccatagccttgaccctgggcctctggggccccgaccctaaccaaggggccaggagctccctcttggggttgcaggcacatgaatatgcaaggagagaggccaagtggctcaagcctgtaatcccaacactttgggaggctgaggtgggcggatcacctgaagtcaggatttggagaccaggctggccaacctggtgatatacccgtctctactgaaaatacaaaaaattaactgggcgtggtggtgcacacctgtaatcctagctgctcgggaggctgaggcaggagaatcgtctgaaccctggaggaagaagttgcagtgagccgagatcatgccactgcattccagcctg

SEQ ID NO: 13181 - DNA, 2092 bp, Artificial sequence
  DNA replication origin
aggcttgcaagttagctggggccaccacgcctggctattaaaaaaaacaaaacaaaactttgaccaggcttggtggctcacgcctgtaatcccagcactttgggaggccaagacaggtggatcacttgaggccaggagttcaagaccagactggtgaaaccccgtctctattaaaaatacgaaaatttgctgggcatgatggtacacacctgtaatcccagctactcgggagtcagaggcaggagaagtgcttgaacccgggaggcggagggtgcaatgagccgagatcacagagccactggactgcactccagcctgggtgacagagtgagactccgtctcaaaaaaaataaataaataaaatagataaataaatttttttttcttttttaaagatataggtctcactgcattgcccaggctggtctcgaactcttggcctcaagccatcctcccacgttgacctcccaaagcgctgattacaggcatgagccacacagacactggtctggccagagcggcatgtgctgcacagagctgggaggagggagacagtttagacctcctgaggtcagctctgctgaggcaggaaggtcccttggttttcaaggttcaggttgaggacaggacatgatatcaggccaaggacaccacccctgttttcctcctgacttggatatggtcagcagagaagtgggaccgggtgaggtctgggccgcgttttcctcgcttgcatccccttagaaaaactttgcagcattcagtacaggaggaagagagaagagggctgggtgcctgcgtgcgtcccactcacagtgtcctaagcaaagccccgcatccccccaaacagtcttcctccctgtgacaggcagtgggtcatctgtcttgggagatattgggccccatccactccgaaggggaactcttggccccgctagtccaggtgcacaaaccgccttggcgattgatctgtcctcagcaagttgtctgtccgttccgccaagagtccccgctatgtgtcaggacttgcactaggcctgggggcacagctctgcagcacactggcccgggatctttttggggacctaggaggtgagcgcggctcttctctccaccatcgggccccaccctgggcgtgctggttccctccagcttcaacgacatctgtcaggactggtggctgcggcagtttgttggctgggtgttgtacgaacaggaggtgaccctgccggagcaatggacccagcacctgcgcacaagagtggtgctgaggattgccagtgcccactcctatgccactgtggtcagtgcagccaggagcaggcagggtaggtgggtgggcatggctgctgaacagcatgggacccccagcagccacctacagcctgtctcctggggtgggatggtggggggccctgccctgccctgggggctgtgccctgtgtagggggataggtggcctgatctacacccttgggatgccattcttcctgtctggctggcaggtccctgagccccatgctgcgggttatgtgagggagtgcctgatagcagggcccctcctcatgccccaacctgctgccccctcctcatatctcctgtgtctgcagtgggtgaatggggtcgacacgctagagcatgaggggccgacagcagcagtctggtccaggtggggcccctgtcctcctgcccctgcatcactatcaccatcaataatacgctcaccccctccaccctgccaccagggaccatctgctacatgatcaacacctccaagtggataccatcttgtctccaccgcatgcacctaccttcccatcccaccctgtggtcttcctgctagggacagggtggccttggcagagtggaggacctggatctgaggagacctgtgagctgaggtcaagggactcagggcaagggcccagcgaaccactgtcctccgaccctaggtatcccaagggttactttgtccagaacacagactttgacttcttcaactacgcgggactgcagcggtctgtgcttctgtacacgacacctaccacctacatcgatgacatcaccatcaccaccggcgtggagcatgaca

SEQ ID NO: 13182 - DNA, 1610 bp, Artificial sequence
  DNA replication origin
tgttgcattggggattaactttccaacacatactttttaggatacacattaaaaccatagcaaatagagaccatatggctcacaaatctaaaatatttactctctgttcctttacagaaaatgtttgtctatgcttggtttagatttgttgctgtccatgtatacctagaactgggaatgagggctgtgtggatgaggggcagacattttaacaagatcaggattttattaagaaggaagaaagacggaattaatacagtataggaagtcagtgctgttccctacacatgagacttctcagactcagttttcccatctacaattgtgagatatagcaaaatatatattatgggaaattgttgagaattcaggagaaggcatgtagacataactgattgacagattcatgaaatagctgcctggatgattacgtggttagatggatggattgatggatggatgaataaacggatggatggatgggtgggtgggtgggtgggtggatggatggatgaatagatgggtggatgggtgagggatggctgcctggatggttggatggatggatggatggatgggtgaatggatggatggatggatggatggatgcagggacggatggagggagggatggatagatggatgggtggagggatggatggatgcatggatgcatggatggatggatggatgactggttggatgggtgtgtggatggatggaggatagataggtggatggatagggaatggttaaagtgaggctgggaagataaactagcccatattatgtcaaatagttctggctttattctgcaaccatggggagccttttaagtacttaagcagagaatgacaaggtgacatttgcatttgaaagagataccatggcattttgtagctgtctagagcagagaggtcatttgattgaagagcaaaaggaacaaaattattgcgggatctggccagcagcccgcaatgcaacggggctctctgttcccaggcagatcggcaggttgagaaataatagacacacacaagatagtgaaagctgggtccaggggagtcaccgccttctggtcctgcagtgccaacaatgcactggatatgccagcatttattattaagtttagtgagggcgggggtaggttagtgagggatttagggtcatttgataatgaggtgagatggtcacatggggatgaagtaattctttaacataacatttgtatgtagaagtacagtacatttgtatgtagaggtactgcatagagagataagaatttacaatatagtgtgtgcgtcagtaatttctaacagagccttaaaacaaacacaatctttccataacctatgattaacaagatattaatcagcagtaacaattgcaacaaaagctggttacaaacaatccatggaaacaggaggtgaagctagacatctggttagaccagaaattctcagaagggagtatgccttaaccctaaagaggcctagaagagccgtggcaagatgagggtgtttatggccctatcgtacccatatggacaggcgcccccccatgcgtccatttataggctctccacgagggtcgccttccattcccagagc

SEQ ID NO: 13183 - DNA, 2663 bp, Artificial sequence
  DNA replication origin
cccactgggacggctactgcccaaggtacaggaggtggcccggtggctgggggagctgctggctgaggcctgtgccggtcgggccctgcccacatcctcctccgggcccccttgctctgccctgacgtccacctcgtccccgggctggcagcagcagatcatcctcatgctgaaggagcagaaccgactcctcacccaggaggtgaccgagaagagtgagcgcatcacgcagctggagcagaagtcggcgctcattaagcagctatttgaggcccgcgccctgagccagcaggatgggggtcctctggactccacctttatctttcccgtgtgggctgagccggcccccgcagggccggcctggcactcagcccttcgagggcgggcgcttcgtcgcacccagcctctctggctggagacccccggcaggcccaggcagttcaggagtgggcgccttcctgcccgccttgccatccgggctccccaggcctgtccccggctggcccccacattgagcccttgactcggtttcggcttccggtgctgacatgggctggggctctcttgagtccgcatagtccgcagctactactgccgctgtcagcggacagtgggggacccctccacgagttaccagatacctggtttccagcggtgctgctttgggtcccatctccagggaaaagaactgctcacgccaggctgcacttccaccaaaggccagcagagggcgcgtggcagctcggatgcggcgctgaggctgcgcccgagacctgcgggtccaagggcagcttcccccaccccccgcccgcctcaaccagggcaccaggacaaagtggctgtcgctcggacgggagcagatggagggggtggggatggcctctaagcgggggatgcccgcctggcagaggagccccagggatggcggtcgggtttcaggtcccggccaagcttgagggactctgactgcagcagatgggggagccaggtgggcgagagttgggcctgcgtgtgcctcccgcagaccccggggtgatggccttcctcatcctggccaggacgctgccccactttgagtcccacaaaacaacctgtgagcctgactccctcggagggccctgtccccaggaggggggtcagcctgggcctccagacagttcccaggcatgtcatagggagagtctgtcacccccgactcaggattcccaaggtctggggtcctgctcaccctcctttcctcccacgcccaggctgaccccaggtttctatggggagaggccacttccctcagccaaggaaaaggagaacacccagggtacaggaggaggctggggcaggtcccctttggtgtcactccctgcccccctgcccaggccctctcccgctggtgctaggatacgcactggtgggggccccctactcagcccagcctggcgggccccagtgccaccagaaccaggggcacggcaacatcatgggtgggttctgcagcccagggcctccgatgcacagtcagtgtgtgtggggcacagagcccccgatgcggcgtcagtgtgtgtggggcacagggccccctatgcggggtcagtgtgtgttgggcgcagggaccctgatgaggggtcagtgtgtggggggcgtagggcccccgatgcagggtcagtgtgtgggggaagcagggacccctcatgcccaggacactttggtacactgtcccacaaggcaccctgtctcagaggaggggtcctggcaggcagagcggcaactctcttctggaacccagctccatgccaaccttcccacagcaaccccacagagccacatcccctgctgcacccgggctgcaggggtgttccaggacaggcccaagacagcccagcgtgcagctgccctcttaccctgaggatgggagtgggctttccaggggacataaagacgccaggcctggacctcctgggcgggaaagggagcgggtcctgaaggcctgtgccccacagccccagcaccaggtggactgcagcgcagtgggtgggccagcggcagccggggagaagccccccatcagcaggctggggtctgcccactagggcctccccatgtctgcctttgagggtgcctgacgtgcgctaggggatccgggcatctttacaggactggaagcaggagacagaacagtgtctgtcccggggtgatttcatcagaagaccgcccacgtagagctggaccccgcagctaaagcggaaatgtgagacaggctggcacctccggaaaaaatgcctctcagccttggtgttccatgcaaggtgagaaaaaaaaataggtcctccaagtttacagcttgcaatcaggctagtgtgtggccctacagaccacgaggggagaatataaagtggccccagctggcactgtctaggtggctggcagaggcacatgcagaccctgccttgagcccgccctagtaatgctgcgcgggtcagtctcctggcaggatgtgagcagcatctctggcctctatccacgagatgccatagcttgcgcaggtacgtacaagtgcgtgcacacacagttgtgacagccagaactgtctcaggatgtcaaaatgtgtccctgggggcagaagtgtccctggttgagaatctgccccagaggaacacaaccacaccagg

SEQ ID NO: 13184 - DNA, 684 bp, Artificial sequence
  DNA replication origin
gccgcccatcctctgggatgtgaggagcccctctgcccggccgcccagtctgggaagtgaggagcgcctcttcccggccgtcatcccgtctaggaagtgaggagcgtctctgcccggccgcccatcgtctgggatgtggggagcgcctctgccccgccgccccgtctgagatgtgaagagcgcctctgcccggccgcgaccccgtctgggaactgaggagtgtctctgccctgccgccaacccgtctgggaagtgaggagcgtctctgaccggccacccagtctgggaagtgaggagctcctccgcctggcagccgccccgtccgggaggtggggggcagccccagcccggccagctgccccgtccaggaggtggggggcagcccccacccggccgctgccccgtctgggaggtgggggggcgcctctgaccggctgccccgtctgggaggtgtacccaacagctcattgagaacgggccatgatgacaatggcggtttttgtcgaatagaaaagggggaaatgtggggaaaagaaagagagatcggattgtttctgtgtgtggaaagaagtggacatgggagactccattttgttctgtactggcaaagattcttctgccttgggatgctgttaatctataaccttgcccccaaccccgtgctctctgaaacatgtgctgtgt

SEQ ID NO: 13185 - DNA, 1241 bp, Artificial sequence
  DNA replication origin
ggctggagtgcagtggcgcaatctcggctcactgcaagctctgcctcccgggttcccaccattctcctgcctcagcctcctgagtagctgggactacaggtgcccgccaccacgcccggctaattttttgtatttttagtagagacgaggtttcaccgtgttagccaggatggtctctatcccctgacctcgtgatctgcccgtctcggcctcccaaagtgctgggattacaggtgtgagccaccgcacctggccgtgaacataatttttttttttttttttggaaaaaggcatttattggtgtggtggtctcaacaatccccatgaattggaacacacagcccccagggcctcccaccccctccctagaatccctccccagtcccaccccatcccctggaccctgggaatggaagacaacgtgggatggggcccatgcccccgtctgaggtacagtcactgagccttgccctctcctcttctccaccagactctgagtggtgtggtttggggtgggtgtttatatagagggtctcgtgggagtcggagttggtgacatggcatctttatctgggctcaggatgtctgtgtgatgcctctctgtcccccactttgtgtggtgtggtgtaccagggcggagtattcctacaatcagagctgaggctgcagcctctcagcgtcccttcctgacaacagatgcctacccagggggaaatacagctagtcaccagctacaggacagctggagccagggggctattgctggtcacagtcgctggtgtgtgtgtgtgtggtgtgtctgagtgtgtgtgagggcggtcaggtagcctttgggaagtacagttggtggagaggccaggaagtgatagaccagcaagcccacacctgtgggccagctgcaaaggccccaggggcagctggctggttccgcaggtggggaaatcaaggccaaggggagtggtggcaggggtaaggcaaagcactgaaacagacaggtgactcctgccaccagtctgacagttggatggaagcaccgattggcccaagagggggccagaaaatccagggtgggtagggacaggaaaagtgggaaggtctcaggccactgagccagcgatggagcctctggctacaggaagctggtggttgacagcagggaagcccagaacccagatggaggtcccccacttactcgcaaaggctgaatgacagcttgacaggtgagtgcgatgcccctcccc

SEQ ID NO: 13186 - DNA, 1098 bp, Artificial sequence
  DNA replication origin
ggagtggtgatgactcttaaggagcatgctgccttcaagcatctgtttaacaaagcacatcttgcaccgcccttaatccatttaaccctgagtggacacagcacatgtttcagagagcacagggttgggggtaaggtcacagatcaacatgatcccaaggcagaagaatttttcccagtacagaacaaaatgaaaagtctccaatgtctacttccttctacacatacacagcaaccatccgatttctcaatcttttccccacctttcccccttttctattccacaaaaccgccattgtcatcatggcccgttctcaatgagctgttgggtacacctcccagacggggtggtggccgggcagaggggctcctcacttctcagacgtggcggccgggcagagacgctcctcacctcccagatggggtcgcggccgggcagaggcgctcctcacatcccagatggggaggcggggcagaggtgctccccacatctcagacgatgggcggcggggcagagacgctcctcacttcctagatgggatggcggccgggcagaggcgctcctcacatcccagatggggaggcggggcagaggtgctccccacatctcagacgatgggcggccaggcagagacgctcctcacttcccagacggggtggcggccgggcagaggctgcaatctcggcactttgggaggcaaaggcaggcggctgggaggtggaggttgtagcgagccgagatgacgccactgcactccagcctgggcgccattgagcactgagtgaacgagactccgtctgcaatcccggcacctcgggaggccgaggctggcgatcactcgcggttaggagctggagaccagcccggccaacacagcgaaaccccgtctccaccaaaaaaatacgaaaagccagtcaggcgtggcggcgcgcgcctgcaatcgcaggcactcggcaggctgaggcaggagaatcaggcagggaggttgcagtgaaacgagatggcagcagtacagtccagcttcggctcggcatcagagggagaccgtggaaagagagggagaggaagaccgtggggagagggagaccgtggggagag

SEQ ID NO: 13187 - DNA, 1520 bp, Artificial sequence
  DNA replication origin
aaagctggatttatggccagatgggccacaaactgggctggattttcgtccttgccctgagtgatttcttttaacttatcataattgacagccttatacgcagctttttggagtccctctactaagcaagtgatcatataatctcgcccggccataccaggagatcctgtttgatagttccactgggggtcctcacgggggacctccctggagacctggctcaaggcgccagtggtcacctgcataggactgagctagggcccaaacaccctcccattcttcaggagtgagtgtagaagtgaggatgacatttaagtcactccaggtgaggttataagactgagttaaatattgaaattcctggatatatttagtggagtcttatggaaaagaacctaaacactggctgacctgagacaggtcagacagggagaaagaaacatgaactcggactatcccttcagctccagccacctctcaaaggggaaatagtggggtgggaggagggggattagaagtgggaccaaattgtcagccagttcgggtatggggcagagtagggacagaagggatatagggaggcatggtatgggtagaagggggactggggtctggagaagggttgggaccggagtcggacgggcagggaggagaaatatcggaagggtctgtggacaagaaggactcgctgtcgccagagggtggtaggggagcagatgggcgggacagaaggagaatttgagacaaattgcattgggaacaagggctggggagggaccgaagtgtaaaacatgcctggatgtatggaacctcaaaccatttgcccattttgtgacaaaagttgtctaagtcccacaaaatagagaaattgaaagtgccattttctggccactgagagccactgtctaatttatattggggccaggccatattacagaagaaaatgagatgtttaggttccaaatcaggtgaaagacggagcggttttagattcctaaggacacagtccaaaggacaaggaggaggaatggagggtggaagggtgcccataatgaacagcggaggactgaagaaacagagagacagggagagagaaacgaggaggagagcaaccacaaggaccttcagcaggtgtccccatctgggttgtgcagtggatgagtggccaaggcacatgtccctgtggttgaccagtcacctagggaagcctgtcttcccagagataatccatgaccaatgttagatttaggaaacacagacagtgagtgtcctctcctctctaagaaaaggaaagtttgagaaaggatggaggtctcttacctatccgaaggcagaggcggggcttttacagagctggtccgaggtaccgaggtcgcgggtgggtctcttcaagaagtcgggggaaggggttaagggacacgactcccaaaggagttcccctatcccggatttcagcatcaaatgtgtgttatggcacagtctggattgaagagaaaacccaagcaggcttcgtgtgagct

SEQ ID NO: 13188 - DNA, 1174 bp, Artificial sequence
  DNA replication origin
agaatttttcttagtacagaacaaaatgaaaagtctcccaagtctacttctttctacacagacacagcaaccatccgatttctcaatcttttccccacttttcacccttttctattccacaaaaccaccattgtcatcatggcccgttctcaatgagctgttgggtacacctcccagacggggtggtggccgggcagaggggctcctcacttcccagtaggggcggccgggcagaggcgcccctcacctcccggacagggcggcttgccgggcgggggctgacccacctccctcccggacggggcggctggccgggtgggggctgaccccccacctccctcccggatggagcggctgccctggggggggctgacccccacctccctcccggacggggcggctggccgggcgggggctgacccccacctccctcctggacggggtggctgccaggcggagacgctcctcacttcccagacggggcggctgctgggcggacgggctcttcacttctcagacggggtggccgggcagagatgctcctcacctcccagatggggtcgtggccaggcagaggcgctcctcacatcccagatggggcagcagggcagaggcgctccccacatctcagacgatgggcggccgggcagagacgctcctcacttcctagatgggatggcagccgggcagagacgctcctcactttccagactgggcagccaggcagaggggctcctcacatcccagatgatgggcggccaggcagagacgctcctcacttcccagacggggtggcagccgggcagaggctgcaatctcggcactttggggggccaaggctggcggctgggaggtggaggttgtagcaagccaagatcacgccactgcactccagcctgggcaccattgagcactgagtgaacgagactccgcctccaatcccggcacctcggggggccgaggctggcggatcactcgcggttaggagctggagaccagcccggccaacacagcaaaaccccgtctccaccaaaaaaatacgaaaaccagtcaggcgtggcggcatgcgcctgcaatcgcaggcactcggcaggctgaggcaggagaatcaggcagggaggttgcagtgagccgagatggcagcagtacagtccagcttcagctcggcatcaga

SEQ ID NO: 13189 - DNA, 861 bp, Artificial sequence
  DNA replication origin
ctgcccggccgcccatcgtctgagatgtggggagcgcctctgccctgctgccccatctgggatgtgaggagcgcctctgcctggccacgaccccatctgggaggtgaggagcatctctgcccggccaccccgtctgagaagtgaagagcccgtccgcccagcagccgccccgtctgggaagtgaggagcgtctccgcctggcagccaccccgtccaggagggaggtgggggtcagcccccgcccggccagccgccccgtccgggagggaggtgggggtcagccccccccagggcagccgctccatccgggagggaggtggggggtcagcccccacccggccagccgccccgtccgggagggaggtgggtcagcccccgcccggcaagccgccctgtccgggaggtgaggggcgcctctgcccggccgcccctactgggaagtgaggagcccctctgcccggccaccaccccgtctgggaggtgtacccaacagctcattgagaacgggccatgatgacaatggtggttttgtggaatagaaaagggtgaaaagtggggaaaagattgagaaatcggatggttgctgtgtctgtgtagaaagaagtagacttgggagacttttcattttgttctgtactaagaaaaattcttctgccttgggatcctgttgatgtatgaccttacccccaaccctgtgctctctgaaacatgtgctgtgtccactcagggttaaatggattaagggcggtgcaagatgtgctttgttaaacagatgcttgaaggcagcatgctcgttaagagtcatcaccactccctaatctcaagtacccagggacacaaacactgcggaaggccacaggg

SEQ ID NO: 13190 - DNA, 925 bp, Artificial sequence
  DNA replication origin
ccccgtccgggagggaggtgggggggtcagccccccacccggacagccaccccgtccgggaggtgaggggcgcctctgcctggctgcccctactgggaagtgaggagcccctctgcctggccagccaccccgtccgggagggaggtgggggagtcagccccccgcccggccggccgccccgtccaggagggaggtgggagggtcagccccccgcccggccagccgccccgtccgggagggaggtggggtcagccccccacctggccagccgccccgtccgggaggtgagggggcgcctctgcccggctgcccctactgggaagtgaggagcccctctgcctggccagccgccccgtccgggaaggaggtgggggggtcagccccccgcccggccagccaccccgtccgggaggtgaggggcgcctctgcccggccgcccctactgggaagtgaggagcccctctgcccggccaccaccccgtctgggaggtgtacccaacagctcactgagaacgggccgggatgacaatggcggttttgtggaatagaaaaggggggaaaggtggggaaaagattgagaaatcggatggttgcggtgtctgtgtagaaagaagtagacttgggagacttttcattttgttctgtactaagaaaaattcttctgccttgggatcctgttgatctgtgaccttacccccaaccctgtgctctctgaaacatgtgctgtgtccactcagggttaaatggattaagggcggtgcaagatgtgctttgttaaacagatgcttgaaggcagcatgctcgttgagaatcatcaccactccctagtctcaggtacccagggacacagacactgcggaaggccgcagggtcctctgcctgggaagaccagagacctttgttcacttgtgtatctgccgacctt

SEQ ID NO: 13191 - DNA, 1129 bp, Artificial sequence
  DNA replication origin
ctggccaggcagaggggctcctcacttcccagtaggggcagccgggcagaggcgccccctcacctcccggacggggcggctggccaggtggggggctgaccccacctccctcccggacggggcggctggccgggcggggggctgaccctcccacctccctcctggacggggcggccggccgggcggggggctgactcccccacctccctcccggacggggtggctggccaggcagaggggctcctcacttcccagtaggggcagccaggcagaggcgcccctcacctcccggacggggtggctgtccgggtggggggctgacccccccacctccctcccggacggggcggctggccgggcagaggggctcctcacttcccagtaggggcagccgggcagaggcgcccctcacctcccggacggggtggctggccgggcggggggctgacccccccacctccctcccgggcggggtggctggcccggcagaggggctcctcacttcccagacggggtggctgccgggcagaggggcttctcacttctcagatggggcggctgccgggcggaggggctcctcacctctcagatggggcggatgctgggccgagggtctcctcacctctcagacggggtggctgggcagagacgctcctcacctcccagacggggtcgcggccaggcagagacgcccctcacctcccagacggggtggcggccgggcagaggctgcaatctcggcaccttgggaggccaaggcaggcggccgggagatggaggctgcagcgagcggagaccatgccactgcactccagcctgggcaccaccgagcactgagtgaaccagactccgtccgcaatcccggcaccctgggaggccgaggctggcggatcactcgcggctaggagctggagaccagcccggccaacacagcgaaaccccgtctccaccaaaaaagtacgaaaaccagtcacgcgtggtggcgcgcgcccgcaaccgcaggcactcggcaggctgaggcaggagaatcaggcagggaggctacagtgagccgaaatggcagcagcacagtccagccttggctcagcatcagagggagaccgcggaaagagagggagagggagaccaa

SEQ ID NO: 13192 - DNA, 1055 bp, Artificial sequence
  DNA replication origin
ccgttctcaatgagctgttgggcacacctcccagacggggtggtggccgggcagaggggctcctcacttcccagtaggggtggccaggcagaggcacccctcacctcccagacgggaggctgacccccccacctccctcccagacggggcggctggccgggcagggggctgaacccccacctccctcccagacggggcggctggccgggcagggggctgaacccccacctccctcccggacggggcggctggccctcccggacggggtggctgccggtcggagacgcttctcacttcccagatggggtggctgccgggtggaggggctcctcacttctcagacggggcggttgccaggcagagggtctcctcacttctcagacggggcggccgggcagagacgctcctcacctcccagacggggttgcggccgggcagaggcgctcctcacatcccagacggggcggcggggcagaggtgctccccacatctcagatgatgggcggccgggcagagacgctcctcacttcctagatgggatggcagccgggaagaggcgctcctcacttcctagatgggatggcggccgggcagagacgctcctcactttccagactgggcagccaggcagaggggctcctcacatcccagacgatgggcggccaggcagagacgctcctcacttcccagacggggtggcagccgggcagaggctgcgatctcggcactttgggaggccaaggcaggcggctgggaggtggaggttatagggagccgagatcacgccactgcactccagcctgggcaccattgagcactgggtgaacgagactccgtctgcaatcccggcacctcgggaggcccaggctggcggatcactcgcggttaggagctggagaccagcccggccaacacagcaaaaccccgtctccaccaaaaaaatatgaaaaccagtcaggcgtggcggcatgcgcctgcaatcgcaggcactcggcaggctgaggcaggagaagcaggcagggagattgcagtgagccgagatggcagcagtacag

SEQ ID NO: 13193 - DNA, 898 bp, Artificial sequence
  DNA replication origin
tctctgcccggccgcccatcatctgagatgtggggagcacctctgccccgccgccccgtctgggatgtgaggagcgcctctgcccggccgcaaccccgtctgggaggtgaggagcgtctctgcccggccgccccgtctgagaagtgaggagaccctctgcctggcaaccgccccgtctgagaagtgaggagcccctccacccggcagccaccccatctgggaagtgagaagcgtctccgaccggcagccaccccgtccgggagggccagccgccccgtccgggagggaggtgggggttcagccccctgcccggccagccgccccgtctgggagggaggtgggggttcagccccctgcccggccagccgccccgtctgggagggaggtgggggggtcagcctcccgtctgggaggtgaggggtgcctctgcctggccacccctactgggaagtgaggagcccctctgcccggccaccaccccgtctgggaggtgtgcccaacagctcattgagaacgggccatgatgaccgtggcggttttgtggagtagaaaggggggaaatgtggggaagggattgagaaattggatggttgccgtgtctgtgtagaaagaagtagacttgggagacttttcattttgttctgtactaagaaaaattcttctgccttgggatcctgttgatctgtgaccttacccccaaccctgtgctctctgaaacatgtgctgtgtccactcagggttaaatgaattaagggcggtgcaagatgtgctttgttaaacagatgcttgaaggcagctaagagtcatcaccactccctaatctcaagtacccagggacacaaacactgcggaaggccacagggtcctctgcctaggaaaaccagagacctttgttcac

SEQ ID NO: 13194 - DNA, 1022 bp, Artificial sequence
  DNA replication origin
cagccgccccatctgggagggaggtggggggggtcagccccctgcccggccagccgccccatcctgggagggaggtggggggggtcagccccccgcccggccagccgccccatccgggagggaggttcagggggttagcccccaacccggcccagctgccccgtccgggaggtgaggggcgcctctaaccggctgcccctactgggaagtgaggagcccctctgccaggccagccgccccgtccgggagggaggtgggggggggtcagccccccgcccctccagccgccccgtccgggagggaggtgggggggtcagccccccacccggccagccgccccacccgggagggaggtgggggggtcagccccccgcccggccagctgccccacccgggaggtgaggggcgcctctgcccggccgcccctactgggaagtgaggagcccctctgcccggccaccaccccgtctgggaggtgtgcccaacagctcattgagaacgggccaggatgacaatggcggctttgtggaatagaaaggcgggaaaggtggggaaaagattgagaaatcggatggttgccgtgtctgtgtagaaagaagtagacatgggagacttttcattttgttctgtactaagaaaaattcttctgccttgggatcctgttgatctgtgaccttacccccaaccctgtgctctctgaaacatgtgctgtgtccactcagggttaaatggattaagggcggtgcaagatgtgctttgttaaacagatgcttgaaggcagctaagagtcatcaccactccctaatctcaagtacccagggacacaaacactgcggaaggccgcagggtcctctgcctaggaaaaccagagacctttgttcacttgtttatctgctgaccttccctccactattgtcctatgaccctgccaaatccccctctgtgagaaacacccaagaattatcaataaaaaataaataaatttaaaaaaaaaagaaacagaaatactaatagcaactgtt

SEQ ID NO: 13195 - DNA, 1082 bp, Artificial sequence
  DNA replication origin
tccctcccggacggggcggctggcctggcagaggggctcctcacttcccagtaggggcagccggttagaggcgcccctcacctcccggacggggcagctgggccgggttgggggctaaccccctgaacctccctcccggatggggcggctggccgggcggggggctgaccccccccacctccctcccaggatggggcggctggccgggcagggggctgaccccccccacctccctcccagatggggcggctggcctggcggggggctgaccccccccacacctccctcccagacggggtggctgccgggcggagacgctcctcacttcccagatggggctgctgccgggcggaggggctcctcacttctcagacggggcggttgccgggcagagggtctcctcacttctcagacggggcggccgggcagagatgctcctcacctcccagacggggtcgcggccgggcagaggtgctcctcacatcccagacggggcggcggggcagaggcgctccccacatctcagacgataggcggccgggcagagacgctcctcacttcctagatgtgatggcagccaggaagaggtgctcctcacttcctaggtgggatggcggccgggcggagacgctcctcactttccagactgggcagccaggcagaggggctcctcacatcccagatgatgggcggccaggcagagatgctcctcacttcccagacagggtggcggccgggcagaggctgcaatctcggcactttgggaggccaaggcaggcggctgggaggtggaggttgtagcgagcccagatcacgccactgcactccagcctgggcaccattgagcactgagtgaacgagactccgtctgcaatcccggcaccttgggaggccgaggctggtggatcacttgcggttaggggctggagactggcctggccgacacagcgaaaccccgtctccaccaaaaccagtcaggcgtggtggcgcgagcctgcaatcgcaggcactcggcaggctgagtcaggaaaatcaggcagagaggttgcagtgagccgagatggcagcagtacagtccagct

SEQ ID NO: 13196 - DNA, 1315 bp, Artificial sequence
  DNA replication origin
ccgggcaaaggggctcctcacttcccagtaggggcggccgggcagaggcgcccctcacctcccagacggggcagctggccgggcggagggctgacccccccacctccctcccggacagggcggctggctgggcggggggctgacccccccacctccctcccggacggggcggctggccgggcagaggggctcctcacttcccagtaggggcggccgggcagaggcgcccctcacctcccagacggggcggctggccgggcggagggctgacccccccacctccctccggacggggcagctggccaggctgaggggctcctcacttcccagtaggggtggccgggcagaggcgcccctcacctcccggacggggcggctggccgggcggggggctgacccccgacctccctcccggatggggcggctggccgggcaggggctgacccccccacctccctcccggacggggtggctgccgggcagagacgctcctcacttcccagatggggtggctgccgggcggagaggctcctcacttctcagacggggcagctgccgggcggaggggctcctcacttctcagacggggtggttgccaggcagagggtctcctcacttctcagacggggcggccgggcagagacgctcctcacctcccagacggggtctcggccgggcagaggcactcctcacatcccagatggggcggcggggcagaggcgctccccacatctcagacgatgggcggccgggcagagacgctcctcacttcctagatgtgatggcggctgggaagaggcgctcctcacttcctagatgggatggcggccgggcgcagacgctcctcactttccagactgggcagccaggcagagaggctcctcacatcccagacgatgggcagccaggcagagacgctcctcacttcccagatggggtggcggccgggcagaggctgcaatctcggcactttgggaggccaaggcaggcggctgggaggtgtaggttgtagcgagccgagatcacgccactgcactccagtctgggcaccattgagcactgagtgaacgagactccgtctgcaatcctggcacctcgggaggccaaggctggcggatcactcgcggttaggggctggagaccggcccggccaacacagcgaaaccccgtctccaccaagaccagtcaggtgtggcggcgcgtgcctgcaatcgcaggcactcggcaggctgaggcaggagaatcaggcagggaggttgcagtgagccgagatggcagcagtacagtccagcttcggctccgcatgagagggaga

SEQ ID NO: 13197 - DNA, 957 bp, Artificial sequence
  DNA replication origin
cctctgcccggccgcccctactgggaagtgaggagcccctctgcccggccagccgccccgtccgggagggaggtgggggggtcagccccccgcccagccagccgccctgtccgggagggaggtgggggggtcagccctccgcccggccagctgccccgtctgggaggtgaggggcgcctctgcccggccgcccctactgggaagtgaggagcccctttgcccggccagccgcccagtctgggagggaggtgggggggtcagccccctgcccggccagctgcccgtccgggaggtgaggggcacctctgcccggccgcccctactgggaagtgaggagcccctctgcccggccagctgccccgtctgggagggaggtgggggggggtcagcccccccgcccggccagctgccccgtccgggaggtgaggggcgcctctgcccggccgcccctactgggaagtgaggagcccctctgcccagccaccaccccgtctgggaggtgtgcccaacagctcattgagaacgggccatgatgacaatggcggttttgtggaatagaaaagggggaaaggtggggaaaagattgagaaatcggatggttgctgtgtctgtgtagaaagaagtagacatgggagacttttcattttgttctgcactaagaaaaattcttctgccttgggatcctgttgatctgtgaccttacccccaaccctgtgctctctgaaacatgtgctgtgtccactcagggttaaatggattaagggcggtgcaagatgtgctttgttaaacagatgcttgaaggcaccatgctcgttaagagtcatcaccaatccctaatctcaagtaatcagggacacaaacactgcggaaggccgcagggtcctctgcctaggaaaaccagagacctttgttcacttgtttatctgctgaccttccctccactattgtcccatgacc

SEQ ID NO: 13198 - DNA, 969 bp, Artificial sequence
  DNA replication origin
cccccgcccagccagacgccccgtccgggaggtgaggggcgcctctgcccagccgcccctactgggaagagaggagcccctctgcccagccagccgccccgtccgggaaggaggtgggggggtcagccccccgcccggccagccgccctgtccgggagggaggtgggggggtcagccccccgcccagccagacgccccgtccgggaggtgaggggcgcctctgcccagccgcccctactgggaagagaggagcccctctgcccggccagccgccccgtccgggaaggaggtggggggggggtcagcccccacccggccagccgccccatccaggagggaggcggggaggtcagcccccagcccggtcagccgccccgtccgggagggaggcaggggggtcagccccccgcccggccaggcgccccgtcccgtccgggaggtgaggggcgcctctgcccggccgcccctactgggaagtgaggagcccctctgcctggccaccaccctgtctgggaggtgtactcaacagctcattgagaacgggccatgatgacaatggtggttttgtggaatagaaaggggggaaaggtggggaaaagattgagaaatcggatggttgccgtgtctgtgtagaaagaggtagacatgggagacttttcattttgttctgtactaagaaaaattcttctgccttgggatcctgttgatctgtgaccttacccccaaccctgtgctctctgaaacatgtgctgtgtccactcagggttgaatggattaagggtggtgcaagatgtgctttgttaaacagatgtttgaaggcagcatgctcgttaagagtcatcaccactccctaatctcaagtacccagggacacaaacactgcggaaggccgcagggtcctctgcctaggaaaaccagagacctttgttcacttatctgctgaccttccctccactattgtcctatgac

SEQ ID NO: 13199 - DNA, 1750 bp, Artificial sequence
  DNA replication origin
gcggctggccgggcggggggctgacccccccacctccttcccggacggggcggctggctgggcagaggggctcctctcttcccagtaggggcggctgggcagaggcgcccctcacctcccggacggggcgtctggctgggcggggggctgacccccccacctccctcccggacggggcggctggccgggcggggggctgacctccccacctccctcccggacggggtggctggccgggcagaggggctcctcacttcccagtaggggcatccgggcagaggcgcccctcacctcccggacggggcggctggccgggcgggggctgacccccccacctcacctcctggacggggcggctggccaggcggggggctgacccccccacctccctcccggacgggcggctggccgggcggggggatgaccccccccacctccctcccggatgggacggctggccgggcggggggctgacccccacctccctcccagacggggtggctgccgggcggagacgctcctcacttcccagacggagtggctgccgggcggaggggctcctcacttctcagacggggcggttgccaggcagagggtctcctcacttctcagatggggcggccgggcagagacgctcctcacatcccacacggggcagcagggcagaggcgctccccacatctcagacgatgggcggcctggcagagacgctcctcacttcctagatgggatggcggccgggcagagacgctcctcactttccagactgggcagccaggcagagaggctcctcacatcccagacgatgggcggccaggcagagacgctcctcacttcccagacggggtggcggccgggcagaggctgcaatcttggcactttggggggccaaggcaggcagctgggaggtggaggttgtagcgagccgagatcacgccactgcactccagcctggtcaccattgagcactgagtgaacgcgactccgtctgccatcctggcaccttgggaggccgaggctggcggatcactcgcggtttggagctggagaccagcccggccaacacagcgaaaccctgtctccaccaaaaaaatacgaaaaccagtcaggtgtggcagtgcgcgcctgcaatcgcaggcactcggcaggctgaggcaggagagtcaggcagggaggttgcagtgagccgagatggcagcagtacagtccagctttggctcggcatcagagggagaccgtggaaagagagggagagggaggccgtggggagagggagaccgtggggagagggagagggagagagaattacagtttttaaaaagtagactgtagttctccttctaaagatattttacctccttgagtcaatccattcctaggtatattattttttgtttgtggctattttaaatagagctctgttcttgattttgttctctgcttaaatgttattcaagtgttgaatgttattcaaggtgtatagaaatgccagtcatttgtgtacattgatttggtatcctgacactttgctgaatcattttttaggcttgggagtctttgggagaaatctttaacgtttttcaagtagagaattatatcatcagtgaagataatttgacttcctcttttcttatttggatgcctttttcttttttcatcttgttggattgctctggctaggacttccagaactatgttgaataggaatatttagagtggacattgatcttatttttatttgtaagaatgc

SEQ ID NO: 13200 - DNA, 1095 bp, Artificial sequence
  DNA replication origin
gatcaacagcatcccaaggcagaagaatttttcttagtacagaacaaaatggagtctcctatgtgtacttctttctacacagacacagcaacaatctgatttctctatcttttccccacatttctcccttttctattcgacaaaaccgccattgtcatcatggcccgttctcaatgagctgttgggtacacctcccagacagggtggcagccaggcagaggggctcctcacttcccagaaggggcggccgggcagaggggccccccacctcccggacggggtggcggccgggcgggggctgccccccacctccctcctggacggggcggctgccgggcggagacactcctcacctcccagacggggcggctgccgggcggaggggctcctcacttctcagacggggcggccgggcagaaacgctcctcacctcccagacggggtcacggccgggcagaggcgctcctcacatcccagacagggtggtggggcagaggcgctccccacatctcagacgatgggcggccaggcagagacgctcctcacttcctggacgggatggcagccgggaagaggcgctcctcacttcccagactgggcagtcgggcagaggggctcctcacatcccagacaatgggcagccaggcagagacgctcctcacttcccagacggggtggcggccgggcagaggctgcaatctcggcactttgggaggccaaggcaggcggctgggaggtggaggttgtagtgagcggagatcacgccactgcactccagcctgggcaacattgagcactgagtgaacaagactccgtctgcaatcctggcaccttgggaggccgaggctgtcagatcactcacggttaggagctggagaccagcccggccgacacagcgaaaccccgtctccacaaaaaaatacgaaaaccagtcaggggtggcggcacgcgcctgcaatcgcaggcactcgtcaggctgaggcaggagaatcaggcagggaggttgcagtgagtggagatggcagcagtacagtccagctttggctcggcatcagagggagaccgtggaaagagagggagagggagaccatgggg

SEQ ID NO: 13201 - DNA, 782 bp, Artificial sequence
  DNA replication origin
gcacttcacccagggccccaggtcgcagagggcccggtgctcggggtcccgctccttctgcctctccacatggtaggcgtagatggagagcaggattccggcagcgcacactgcataccgggccacccgctcccaccgcggcaccgacacgctcagcaggacggccgtcgccatcctgccgccgccgccaccgcctccctccgcctccaccgcctccctccgcctccacctcagccgccgccgcccgtcgggacccgacccagctgccgcggccgccgccgcgccccattggctcggtcgcctgctccgggccccgcccccacaggcgcgcggcccaaccgccccgaaaggagtgagctggacggggcggggaaagagcgggcgggcgcggagggtgggggcggagtgcgcaaccgccggggaggccggatctgcgggcggagattgaggcgacgcgcgcgaggggtggagcccgggggagaaaggggtggggcaggggcggggcagggtaggggcggggccgagcgcgccagtgcgggagggacttagaggagcggtgcaactagcaccttgcaaggatgccactgtgggtgactgggcgaaccctcggcccctccctctggggatggcaatcaattgccatcctttttccttttttcgttgtatttttctgacccaatccaaatcaaccctggccagtgcttggagctccagagacacacacctatgacctgatcttcccaccaccacctccggggacactctgttcgacctgtgcaaaa

SEQ ID NO: 13202 - DNA, 1069 bp, Artificial sequence
  DNA replication origin
gatggcgacggccgtcctgctgagcgtgtcggtgccgcggtgggagcgggtggcccggtatgcagtgtgcgctgccggaatcctgctctccatctacgcctaccatgtggagaggcagaaggagcgggaccccgagcaccgggccctctgcgacctggggccctgggtgaagtgctccgtcgcccttgcctccaggtagccggctttggggagtgggccgggagcggccgagcggggcaagggcggagtctcggggtggggagcgcgcggcgggagctcaggcctgggggcggcggggaccgggccgctggggaacttacggggtcgggtcggggccgggtggggggtggcggcggggcgctcctgcccggggggcggcatgagcccaggccgcggggcggaggtggcggggccgcgaggcagccggggagggatgaggtggcagagtgcagccgggaggccggggcggacgcggagcggtcgggtgggccggggccgggctgggcaggagcgcgagggggctgcggagggtgggtgcaggctggcttgacaggtttcctggttctcgggaggcgggccgggggtgtgggaccttgtccgccgcacccgtgagaccagcggcagcgggcctcttgttcccccgatcgctgcagccgaggctttggggccggcgcggagacggggttgcctttcccactgttttcctggtgctaggacaggtgtttccgtggtcaggcctctttgcactccagcgctagtgagaatttgcagacttactgggacggtgacattagctggcaaacacaaatttgaccctactgtggaagaagataccagcacttaacatatctgatttcttggattccctctcgtatgtttcagtgtgccaggagaaggaaatggtctgagtttgggtctagtttaagcttcattggagtaaaggacaagtatgttatgtatatggcggtgttttaggcattgggatgacttttaaacgttgttgcctattagtataataggatacccacaacagattaaaaacacaccctttgctaaactggagcgattg

SEQ ID NO: 13203 - DNA, 1418 bp, Artificial sequence
  DNA replication origin
tttcttccgccgcggctttttgccccgccgccgcgcatttttgccgccgcggctttttgcccccgccgcctaagctttttgcctgcgccgccgcggctttttgccccccgtcgccgcggctttttgccgccgcggctttctgctcccgccgccacggctctgagggcgggagcggcagactccgctgccagctctactggcgtcctggcaagggcagcgccgaggggcgctcccggtccagctctcccggctcgggggttccttgcctaggcgccagagccccgggctccctgcctcggccgctgtggcctgcatagagcggcactgcgcgcggaggcgatgggagagaagaaggagggcggtggcgggggtgatgcagcggccgctgagggtggcgcaggggccccggccagcccggggctgcagcagtgcagacagctccagaagctcatcggcatctccattggcagcctgcgcgggctgggcaccaagtgcgctgtgtccaacgacctcaccgagcaggagatacggaccctggaggtaaggggtttggggacccgggctgggctcgaggagcggcccggacacctcccttgaggccccagttcactcctggccgagttgcatccttgagcccgcgtcgcgcccttggaggcttcccctccctcctgcactcgctgatggggcagccgagagacccgggaccagccctcaccttgggcaggatttgtggggcgagtgcttggtgggaactgggatggaggctctagggtcccgtggggcggggagggtgggggtgggctgcgcgcggacatccccttacccccgaatttccatctggtccggccctctcatcttgtaggtgaggaaaccaaaggcctgagggagaactgacttgccaggaacccctgttaaggagaattaccaaagtgtggttattaaaggagaactgagttgggagtcagacctggagtcccacacccttggttaagtcattataccaccttgagtctggcctgttgactgagggtgagccactccatcctcgtctgattgtggggtcttgacctcaaggggtttcgtgcaggaagaagcaaatgggtttgctttcctagctctgtccagtaccttagggaccctgaggactgaagcgattcttggagagccatctggtgtatgtcatgcgtgggcctttcttgaaggtctatctgcccagtgggctggctcagcccgaatgaactgtcttgaatctttggagttgtctgtgtacttttaagggcttctcatccttgcaccaaaagatcccctggaaattaggtgggaaaaccttacctgttgtggggccttgtgtttgtcttaaaagttcgtgcacatgaccaggtgtggtggctcacacctgttatcctgtcctggatccc

SEQ ID NO: 13204 - DNA, 884 bp, Artificial sequence
  DNA replication origin
aaagctcactggagcttcagcagtctaagtgcccagagagacggggagtagcctggcctgtccacgtgggtgacgacaccaacgtcttgtatgaaatcactgttgcaaacctgctgggggaatgtagaggggttgctgctctacaagacggcaagaaggatgagaatgcagtcagccaggaacacaagtcctcaatggatgacgaggtgcaagcggaagaccagcagacagcagtcactgagagggacagcaggtgactccgctgcctttgaaagagaaaggtcttggacacgaccacaggaaccatgaaggatatagaccctaccttagattctacagtacgtggggtataggagaaaaaagagtccctgcaccagacggtgccgggggatgtggggtcctgaggggccagtggggttggagggaggggaccctcctgcaaaaagctgagtggtggctccagagccgatgatgtcatcagaggagctggggcaggatggggggtggggaggagggtccagtcatattaggcaatgcacagatccgggggggaggcctatagcacagaggctctgtcctttgagggtgactgaaccaacaggggaaagcgaggcatggtgaaaatagccatggatggccagctgtggtggctcacgcctgtaatcccagcactttgggaggccgaggaggatggatcaccggaggtcaggggttcaagaccagcctggccaacatggggaagccccgtctctactaaaaatacaaaattagccaggcttgatggtgggcacctgtcatcccagctgcttgggaggctgaggcaggagaattgcttgaacccaggaggcagaggttgcagcgagctgagatcacatcactgcact

SEQ ID NO: 13205 - DNA, 1329 bp, Artificial sequence
  DNA replication origin
ctgaccccccctcccccctcccggacggggcggctggccgggcggggggctgacccccccacctccctcccggatggggcggctggccaggcggggggctgacccccccacctccctcccgggcggggcagctggccgggcagaggggctcctcacttcccagtaggggcggccgggcagaggcgcccctcacctcccggacggggcagccggccgggcggggggctgacccccccacctccctcccggacggggcggctggccgggcagaggggtcctcacttcccagtaggggcggccggggcggctggccgaccccccccccccgcctccctcccggacggggcggctggccgggcagaggggctcctcacttcccagtaggggcggccgggcagaggagcccctcacctcccggacggggcggctggccgggcggggggctgaccccccccacctccctcccggacggggtggctgccgggcggagacgctcctcacttcccagacggggtggttgccggacggaggggctcctcacttctcagacggggcggttgccaggcagagggtttcctcacttctcagacggagcggcggggcagagacgctcctcacctcccagacagggttgcggcccagcagaggcgctcctcacatcccagacagggcggtggggcagaggtgctccccacatctcagacgatgggcgggcgggcagagacgctcctcacttcctagatgggatggcggccgggcagaggcgctcctcactttccagactgggcagccaggcagaggggctcctcatatcccagacgatgggtggccaagcagagatgctcctcacttcctagacgggatggcggccgggaagaggtgctcctcacttcccagactgggcggccgggcagaggggctcctcacatcccagacggggtggcggccggacagaggctgcaatctcggcactttgggaggccaaggcaggcggctgggaggtggaggttgtagctagccgagatcagccactgcactccagcctgggcaacattgagcactgagtgaacgagactccatctgcaatcccggcacctcgggaggccgaggctggcagatcactcgcggttaggagctggagaccagcccggccaacacagcgaaacaccgtctccaccaaaaaaatacgaaaaccagtcaggcgtggcggcgcgcgcctgcaatcgcaggcactcggcaggctgaggtgggagaatcaggcagggaggttgcagtgagccgagatggcagcagtacagtccagcttcagctcggcatcagagggagacc

SEQ ID NO: 13206 - DNA, 967 bp, Artificial sequence
  DNA replication origin
ccccgtccgggaggtgaggggcgcctctgcccggccacccctactgggaagtgaggagcccctttgcccggccagcgccccgtccgggagggaggcgggggggggggggtcggccacccgccccatccgggagggaggtgggggggtcagccccccttccggccggccgccctgtccgggaggtgaggggcgcctctgcctggccgcccctactgggaagtgaggacccctctgcccggccagccgccccgtccgggagggaggtgggggggacagccccccgcccggccagccgccctatccaggaggtgaggggcgcctctgcccggccgcccctactgggaagtgaggagcccctctgcctggccagccgccccgtccgggagggtagtgggggggtcagccccccgcccggccagccgccccatccgggaggtgaggggcgcttctgcccggccgcccctactgggaagtgaggagcccctctgcccggccacgaccccgtctgggaggtgtgcccagcggctcattggggatgggccatgatgacaatggcggttttgtggaatagaaaggcgggaagggtggggaaaaaattgagaaatcggatggttgccgggtctgtgtggatagaagtagacatgggagacttttcattttgttctgtactaagaaaaattcttctgccttgggatcctgttgatctgtgaccttatccccaaccctgtgctctctgaaacatgtgctgtgtccactcagggttaaatggattaagggcggtgcaagatgtgctttgttaaacagatgcttgaaggcagcatgctagttaagagtcatcaccactccctaatcttaagtacccagggacacaaacactgcggaaggccgcagggtcctctgcctaggaaaaccagagacctttgttcacttgtttatctgctgaccttccctccactattgtcctatg

SEQ ID NO: 13207 - DNA, 870 bp, Artificial sequence
  DNA replication origin
ggctgcagtgtgagtttgggagccttttagggaggggctacagaggaggagttcctctacatatagaagaaggtggctgggggaaagatccaaggaggcgaggtcttgggctagggcttgcctggagaaatgagggctatccttgaagccctgagggaggacagtccacgtgagttgttgtgactggagggtgttgcagtcagtttgggtgaaacaaagaggtttatggaatcagggtgtaggggaatggtgaagaaggcatttttcaggtcaattgcagtgtagtgggttgtgttggaggggatgagagagagaagtgtataggggttagggactacaggatgaacagggaggacagcctgattgatagctcaggggtcctgaatgagttggtatgagccgttggattttttaatagggaggatggggttgttatatggagagtgtgttggtctaagaagactgtgtgagcagagcttgtttatggtgggttgtaagccctttggtgtgttagggaaatgggatattggggaacgtcgggaaatttagaggggtcttttaactggattttgatgcagtcctggtgagcagctatggcaggggtggtggtgtcccacactactgggttaacgagagaggtgggtagcgggtgctggagagggggtcagatgccggactagcagagagaagcaggagggacttctggttgagggggacaggaaaaggtgataaaagctgcaaaattggctaaaatgtctcggcctaggatgggggtggggcaatgaggcatgataaggaaggagtgtgaaaaaatagtattaaatagggaacaagtaagggattcagtagcacgtggacagaagacaagtc

SEQ ID NO: 13208 - DNA, 1429 bp, Artificial sequence
  DNA replication origin
tctgctgccacggctttttgccccccgccgccgcggctttttgccccccgccgccgcgactttctgcccccgccgccgcggctttttgctcccgcggcattttgccccctgccgccgcggctttttgcccccgccgccgctttttgccgccgcggctttctgctcccgccgccgcggctctgagggcgggagcggcagactccgctgccagctctactggcgtcctggcaagggcagcgccgaggggctctcccggctcgggggttccttgcctaggcgcccgagccccgggctccctgcctcggccgctgtggcctgcatagggcggcactgcgcgcggaggcgatgggagagaagaaggagggcggtggcgggggtgatgcagcggccgctgagggtggcgcaggggccccggccagcccggggctgcagcagtgcggacagctccagaagctcatcggcatctccattggcagcctgcgcgggctgcgcaccaagtgcgctgtgtccaacgacctcaccgagcaggagatacggaccctggaggtaaggggtttggggacccgggctgggctcgagcagcggcccggacacctcccttggggccccagttcactcctggccgagttgcatccttgagcccgcgtcgcgcccttggaggcttcccctccctcctgcactcgctgatgcggcagccgagagacccgggaccagccctcaccttgggcaggatttgtggggcgggtgcttggtgggaactgggatggaggcgctagggtcccgtggggcggggagggtgagggtgggctgcgcgcggacatccccttacccccgaatttccatctggtccggccctctcatcttgtaggtgaggaaaccaaaggcccgagggagaactgacttgccaggaacccctgttaaggagaattaccaaagtgtggttattaaaggagaactgagttgggagtcagacctggagtcccacacccttggttaagtcattataccaccttgagtctggcctgttgactgagggtgagccactccatcctcgtctgattgtggggtcttgacctcaaggggtttcgtgcaggaagaagcaaatgggtttgctttcctagctctgtccagtaccttagggaccctgaggactgaagcgattcttggagagccatctggtgtatgtcatgcgtgggcctttcttgaaggtctgtctgcccagtgggctggctcagcccgaatgaactgtcttgaatctttggagttgtctgtgtacttttaagggcttctcatccttgcaccaaaagatcccctggaaattaggtgggaaaaccttaccttttgtggggccttgtgtttgtcttaaaagttcatgcacatggccaggtgtggtggctcacacctgttatcctgtcctggatcccttgag

SEQ ID NO: 13209 - DNA, 1294 bp, Artificial sequence
  DNA replication origin
ggggcaaaaagccgcggcggcggggggcaaaaagccgtggcagcagaaagccgcggcggcgggcgcaaaaagccgcggcgtcgggggctaaaagccgcaaaaagccgcggaggggggagcgaaaagcagtgggagctggggcaaaaaaccacaaaaagccgaggcagcggcggcagaaaacctcggcagcgggggcaaaaagctgcagcggcaaaaagcggcgacgggggcaaaaagccgcggtggcaaaaatgcgcggcggcgggggaaaaagccgcggcggagtggggcgaaaagcagtgggagctggggcaaaaaaaccacaaaaagccgcggcagcggcggcagaaaacctcggcagcgggggcaaaaagccacggtggcgggggtaaaaagcagcggtggcaagaagccgcgacggtgggggcaagaagccgcggcggcccaggcaaaaggccgcaaaagccgcggcgacgggggcgaaaagccgcggcggcggaggcaaaaagccgcgacggcagggggcaaaaagctgcaaaagcctcggtgcgggtgaaaaaagtcgcggcgagaaaaagccgctgaggcgggggcaaaaagccgcggcggcaggggcgaaaaccagcaaaaagccgccgcggtgggggcaaaaagcagtgggagctggggtaaaaaaccacaaaaaaccgcggcagcggcggcagcaagccacggcggcgggggcaaaaagccgcggcggcaaaaacccggggtggcaaaaagccgcggcgccgggggacgaaaagcttcaaaggccgcttcggcgggggcaaaatagtggaaaggaggtagaaggctggcacagcttggcattgctggagtgtgatgtgataggaaaagtgcacccgaaaacaaagatgtaagtgggcttgactcagtgcagctaagaacctagatgttatcttgagggtattaactaataagcagtttaaatcagaatggcacattctgatttgttttttgtatgttcacatttggcagacatagatactgtttgaagagaggaaagtcagtaaatagacgtaacaaacttgaatatgtgcaaagtctagaaacaagagactagggggataagaacctttcaaaaatgcaagatttgaaaactggctgggggatgaggaaaaggcaggtctttaaggtcaatccttgttttgctttaagttgttagggggtggttttatcacatattgtagaatatgtcatttcagttttgaacatcttgagttaaattgtcctaacatatcttatgaatttg

SEQ ID NO: 13210 - DNA, 1436 bp, Artificial sequence
  DNA replication origin
ctttcttccgccgcggctttttgcccccgccgccgcgcatttttgccgccgcggctttttgcccccgccgcctaagctttttgcctgcgccgccgcggctttttgccccccgtcgccgcggctttttgccgccgcggctttctgctcccgccgccgcggctctgagggcgggagcggcagactccgctgccagctctactggcgtcctggcaagggcagcgccgaggggcgctcccggtccagctctcccggctcgggggttccttgcctaggcgcccgagccccgggctccctgcctcggccgctgtggcctgcatagggcggcactgcgcgcggaggcgatgggagagaagaaggagggcggtggcgggggtgatgcagcggccgctgagggtggcgcaggggccccggccagcccggggctgcagcagtgcggacagctccagaagctcatcggcatctccattggcagcctgcgcgggctgggcaccaagtgcgctgtgtccaacgacctcaccgagcaggagatacggaccctggaggtaaggggtttggggacccgggctgggctcgaggagcggcccggacacctcccttgaggccccagttcactcctggccgagttgcatccttgagcccgcgtcgcgcccttggaggcttcccctccctcctgcactcgctgatgcggcagccgagagacccgggaccagccctcaccttgggcaggatttgtggggcgggtgcttggtgggaactgggatggaggcgctagggtcccgtggggcgggtcgggggggtgggggtgggctgcgcgcggacatccccttaccccccgaatttccatctggtccggccctctcatcttgtaggtgaggaaaccaaaggcctgagggagaactgacttgccaggaacccctgttaaggagaattaccaaagtgtggttattaaaggagaactgagttgggagtcagacctggagtcccacacccttggttaagtcattataccaccttgagtctggcctgttgactgagggtgagccactccatcctcgtctgattgtggggtcttgacctcaaggggtttcgtgcaggaagaagcaaatgggtttgctttcctagctctgtccagtaccttagggaccctgaggactgaagcgattcttggagagccatctggtgtatgtcatgcgtgggcctttcttgaaggtctgtctgcccagtgggctggctcagcccgaatgaactgtcttgaatctttggagttgtctgtgtacttttaagggcttctcatccttgcaccaaaagatcccctggaaattaggtgggaaaaccttaccttttgtggggccttgtgtttgtcttaaaagttcatgcacatggccaggtgtggtggctcacacctgttatcctgtcctggatcccttgagtcaaag

SEQ ID NO: 13211 - DNA, 1104 bp, Artificial sequence
  DNA replication origin
aacagagaggagaaagaagaagagcaggagaaggaggaggagaaagaggaagaggaagaaggaggaagaggaagaaggaggaagaggaaggaggaggaagaggaagaaggagaaagaggacaaagaggaggaggaggaaatggaaggaggaggagcagatggaaggaggaggaagagacggaggaggaggaggaagagatggaggaggaggaggaaggatggaggaggaggaggaagagaaagaaggaggaggaggaagaaggggaaggaggaggagaaagcagaagcagaagaggcagaagagggtgagaggagtgggcaacaaaaataagatggagataagggtccgattgtgtgtggctctgcagggcctgtggaagactatgaacaattaaatgcttaattttctcactaaatgtttctacttcttcgatctttgagtggcccataggaatatgtctcatgtatgagcattgcactccatggaagaaaaatggatgaggatcgctgatacagagggcagcctgaagtgggatgaacaggaggcaatgagcccagcaaggaggtattggaataggcagtgggaaatgatgactgagccagcgctactggtgctggggaggagcagctggagctaaggcagaatctctgagttagaatcaatggggctttgtattgatttgatgtaagcagcgaagcaatgggaaaccgctaagtatgactccaaggatttggtctttgtgaccagttatgtgatggtatcattaaacaagtgggaaatccaggaggataaggaggaggaaagaatgattttgattggaggcaggttgtcttcaaagtatgcatggaatgtcaaactgaaaaagtgaatctggagctaaagagagagaaggaaactgtaatactttcgtcaggggctgataggttaggtatttgaagtgttgtggggcaaagaggtcactgagagagaatatttaaatcagcaatagaaaaggtgaattatagaactctgaaaaaaatcaggtttggagaaggaggaaaggagtgattacatattttgagaaaacttttggaatgaagtctagaggtaagttgaagactatg

SEQ ID NO: 13212 - DNA, 1270 bp, Artificial sequence
  DNA replication origin
cgaggtgggtggatcacctgaggtcaggcgttcaagaccagcctggccaacattgcaaaaccccatttctactaaaaatacaaaaactagccgggcatggtggcacatgcctgtgatcccagctacttgggaggttgaggcaggagaattacttgaatcttggaggtagaagttgcagtgagccaggatcacactattgcacttcagcctgggcaagaagagtgcaactccatctcaaaataaaataaaataaaatactaaaaaaattagccaggcatgatggtatgcacctgtagtccctgctactagggaggctgaggtgggaggatcgcttgagcctgggaatttgaggttgcagtgagctgtgattgtgccactgcactccaaccttggtaacaagagtgagatcttgtcaaaaaaatgaagggaggtggggggagggagggaggacaggggaggggaggggagggaagaaaagaaagaaggagggaagaaattagcatggtgggcatggggacagatggcaatgttaaatagtatgatcaggagtggcctcctaagtgaaaattaagccaagacttgaaggagggcaaggagctggccaaggtgctgagggaagaggattgtgggcagaaacaactgaataaactgtctgaggtgtgtctgaggctctggaaggaggccagtggagcagaaggaaagagggagagaattagggcaggaggccagggagttgctgggcagggatcagtacagactgtgtaagccctgggaggttattgctgggccagataggaaattgaagagggttctgagcagagaggcgacatgatctgtctgccgatttaaaagcattctctggctgctgagttgagaaagactgtgggaagatttgggtagaagcatgggggccaagctgtggcaacatccaggcggaagatgatagtagtcttgaccagggtcatggtggtgttgagagatggtcagaggagagaagtaggagaggaggccagggagtcggtgggtggggatcttcagtatgtgttgaagacagtcaacaggatttcctgacagactggatgtggggtgtaagagaaggcaggggtcaaggttgagttagattcttactgaattatgaagtaattttaaaaacgactactgcctttctcaatcctgtcaagtatgggatgctagattaaagaaatctcttcaggctcagtacagtggctcatgcctgtagtcccagctgtttggaaagcagaaatgggag

SEQ ID NO: 13213 - DNA, 2064 bp, Artificial sequence
  DNA replication origin
gaagaggccaatttgaggatgatttgggcctgcagaggttgctgggaggaagagctgggcctggagaggctgactgggggaagttctgggcctggagtggccaaaaagcgaaagctaggcctggaaaggccacagtgaggcatgagcgtggcctacaaaggccattgggaggcagcagctaggcctgtagaggctgccgaaaggcaggaacctggtcagaggaggccatggtgaggcaagaggtgggactggaaggtgcactgtgaggtagaggccaacaacaggcaaaagctgggcctggagagatgacaagaggaatgagctgggcctaaacaggccagtatgagaaaggacctcggcctagagaggccagtgtgaggcaggagctgggcctggacaggttgccagaggcatcaactggacctaaacaagccattgtgagggaggagctaggcctgttgaggctgctgggaggcaggcgggaacttggcccacggaagccactgtgaggcaagagatgggcctggagagggagctaagaggcaagagcagggcctgcagaggctgttctcaagccagagctgggtctgtacaggccactgcaaggcagaaggtgggcctaaagagcttgacttgaggaagttttgggcctacaaaggccggcagtagttgggcaggagctgagccataaaaggttgttgtgaggcaggagttggtcttgtagatacagccaggaggaagagctaggcctggagagaatgccgggaggcagcaactgggcctggagaggccgacttgaggaagttttgggcctggagatgatgtcccgggacaggagctgggcctggagaggccactgtgaggcatgagctgggcgtagagaggccagtgtgtggcaggacctgggcctgtccaggctgccaggaaataggtggaaacttggccagggaaggttgccatgagacaaaagttgggcctggaaaaatcatcgtgaggtatgagcttggcctaaagagccattgggtggcaggagctgggtgtgtagaggctgctgaaaggcaggcgcttggcttgtggggggccacggtgaggcagatgctgggcctggagaatctgctgtgaggcagatattgggcccgtagaggctgacagaaggcaggagctgggcctggagaggctgccaggacacaaaagctgggcctgaagaggctgccaagaggcatgagctgggcctaaagagaccagtgtgacaagagatcggcctggagaggccgacttgaggaagattttggcctagagagtctgtcaggggcaggaactgggcctggagaggccaccgtgaggcatgaactgggcctaatgatgccagtgtgaggcaggagctgggcctgtcaaggctgctgggaggtaggcaggaacttggccagggatgacctccgtgaagcaagagctgggcctggaaaggccattgtcatgcaggagctgggcctatccaggctaccaagaggcagaagattgtgctggtgagcttgacgtgaggaagttttgggcctacaaaggcctccaggagctgggcaggagctgagccaaaagagattgttgtgaggcaggaggtgggcctggagattcagctaggaggaagaactgggcctggagaggctcacttgtggaagttctgtgactaaagaggttgcaaaaaggcaaaagctgggccggaatggccaccatgaggcaggagcttggcctagagaggccactgggaggcaggagctaggcctgtagaggctgccgaaaggcaggagctttgcctgggaggctgtggtgaggcagatactgggcctggaaagtctgctgtgaggcagaggttgggcctgtagaggccaatgggaggcaggagtttgggctgaaatggcagacttgagaaagttctcagtctggagaagccaccgggatgcgggagctgggcctggagaggccactgagaggcatgagctgtgcctaaagaggccagtgttaggcaggagctgtgcctgaagaggcgacttgaggaagttttgggcctgg

SEQ ID NO: 13214 - DNA, 794 bp, Artificial sequence
  DNA replication origin
ccgctccacgtggtaggcgtagatggagagcaggattccggcagcgcacactgcataccgggccacccgctcccaccgcggcaccgacactcttagcaggacgggagccgccatcttcccgccgccgccgccgccgcctccctccgcctccacctcagccgccgccgcccgtcggggcccgacccagccgccaccgccgccaccgccgcctccgccgccgccgccaccaccgccgccgccgccgccgcgccccattggctcggtggcctgctccgggccccgcccccacaggcgcgcggcccaaccgccccaaaaggagtgaggcggacggggcggggaaggcgcgcgcgggcgcggagggagggggtggagtgcgcaacggccgaagaggccggatcggcgggcggagactgaggcggcgtggcgctgcgccgcgcggccggtcgcgcgcgaggggtggagcccgggggagaaaggggtggggcaggggtggggatgggcggggcaggggtggggaggggcggagccagagaggggcggggccgagcgggccagtgcgggagggacttaaaggagcggtctaactagcacattgcaaggatgccactgtgggtgactgggcgaaccctcggcccctccctctggggatggcaatcaattgccatcctttttccctttttcgttgtatatttctgacccaatccaaatcaaccctggccaatgcttggagctccagagacccacacctatgacctgatcttcccaccaccaccttcggttagacctgtgcaaaa

SEQ ID NO: 13215 - DNA, 1091 bp, Artificial sequence
  DNA replication origin
ggcggctcccgtcctgctaagagtgtcggtgccgcggtgggagcgggtggcccggtatgcagtgtgcgctgccggaatcctgctctccatctacgcctaccacgtggagcgggagaaggagcgggaccccgagcaccgggccctctgcgacctggggccctgggtgaagtgctccgccgcccttgcctccaggtagccggcttgggggagtgggccaggagcggccgagcggggcgagggtggagtctcggggtggggagcgcgcggcgggagctcaggcctgggggcggcggggaccgggccgctggggaactgacggggtcgggtcggggccaggcggggggcggcggcggggcgctcctgcccggggggcggcctgagcccaggccgcggggcggaggtggcggggccgcgaggcagccggggagggatgaggtggcagagtgcagccgggaggccggggcggacgcggagcggtcgggcgggctggggcccggctgtgcaggagcgcgagggggctgcggagggtgggtccaggctggcttgacaggtttcctggttctcgggaggcgggccgggggtgtgggaccttgtccaccgcacccttgagaccagcggcaacctcttgtccccccgatcgctgcagccgaggctttggggccggcgcggagacaggggggttgcctttcccactgtcttcctggtgctaggacaggtgtttccgtggtcaggcctctttgtactccagcgctagtgagaatttgcagacttaactgggacggtgacatttgctggcaaacacgaatttgaccctactgtggaagaagatacccgcacttaacatatctgatttcttggattccctctcgtatgtttcagtgtgccaggagaaggaaatggtctgagtttgggtctagtttaagcttcattggagtaaaggacaagtatgttatgtatatggtggtgttttaggcattggaatgacttttaaacgttgttgcctattagcatattcgagaccagcatattggtcaggctggtctcgaactcctgacctcaggtaatccacccacctctgccttccaaagtgc

SEQ ID NO: 13216 - DNA, 897 bp, Artificial sequence
  DNA replication origin
gtgccccatccactctgaggaggaactcctggccccactggcccaggtgcacagatcgccctggcagttgacctgtcatcagcaagttatctgtcctttctgccaagaatccccgctatgtgtcagggcttgtgctaggcctgggggcacagccgtgcagcacactggtcctggacccttttgggggcctaggagctgagcccggctcttctctccacagtcaggccccaccgtggacatgccagttccctccagcttcaatgacatcagccaggactggcgtctgcggcattttgtcggctgggtgtggtacgaacgggaggtgatcctgccggagcgatggacccaggacctgcgcacaagagtggtgctgaggattggcagtgcccattcctatgccatcgtggtcagtgcggccaggagcaggcagggcgggtgggggggcacggctgctgaacagcatgggacctccagctgccacccacggcatgtatgctggggtgggatggtggggggtcctgccctgccctgccctgggggctgtgccctgtatagggggataggtagcctgatctaccccattgggatgtcattcttcccgtctggctggaaggccccggagccccatgctgcaggttatgtgagggagtgcccgatagtagggcgcctcctcatgccctgacctgcagccccctccccgtatctcctgtgtctgcagtgggtgaatggggtcgacacgctagagcatgaggggggctacctccccttcgaggccgacatcagcaacctggtccaggtggggcccctgccctcccggctccgaatcactatcgccatcaacaacacactcacccccaccaccctgccaccagggaccatccaatacctgactgacac

SEQ ID NO: 13217 - DNA, 1553 bp, Artificial sequence
  DNA replication origin
tgtgttgttgatggcgatagtgattcggagccgggagggcaggggccccacctggaccaggttgctgatgtcggcctcgaaggggaggtagcccccctcatgctctagcgtgtcgaccccattcacccactgcagacacaggagatacggggagggggctgcaggtcagggcatgaggaggcgccctactatcgggcactccctcacataacctgcagcatggggctccggggccttccagccagacgggaagaatgacatcccaatggggtagatcaggctacctatccccctatacagggcacagcccccagggcagggcagggcaggaccccccaccatcccaccccagcatacatgccgtgggtggcagctggaggtcccatgctgttcagcagccgtgcccccccacccgccctgcctgctcctggccgcactgaccacgatggcataggaatgggcactgccaatcctcagcaccactcttgtgcgcaggtcctgggtccatcgctccggcaggatcacctcccgttcgtaccacacccagccgacaaaatgccgcagacgccagtcctggctgatgtcattgaagctggagggaactggcatgtccacggtggggcctgactgtggagagaagagccgggctcagctcctaggcccccaaaagggtccaggaccagtgtgctgcacggctgtgcccccaggcctagcacaagccctgacacatagcggggattcttggcagaaaggacagataacttgctgatgacaggtcaactgccagggcgatctgtgcacctgggccagtggggccaggagttcctcctcagagtggatggggcacaatatctcctgagacaggagcaagcccagggccacatcccagccagaggcaagaaggttcagacctgtgactaagaggcagatggccactgcctgtcacagggaggaaggctggttggaggaatggggggagctttgcttaggacactgtgagtggggtgcacactggcacccagccccctcctctttccctcctgtactgaatgctgcaaagtcagaataagaggatgtagaccaggcaaaagccgcccagacctcacccagttccacttctctgcagatcacatccaagtcaggaggggaacaggggtggcgtcctgggcctgatgtcatgtcctgtcctctatgtgaaccttgaaaaccaagggacttcctgcctcggcagagctgacctcaggacatctaaactgtcaccttctcccgatccccgggcccagctctgtgcagtgcatgccgctgtggccagagtgtgtgggtggctcatgccagtaatcagcgctttgggaggtcaacgtgggaggatggcttgaggccaggagttcgagaccaccctgggtaaatagtgacaccctgtatcttttttttttttttaagtttttttgccttttttttttttttggagacgtagtctcactatgtcgcccaagttggagtgcagtggcatcctgatctcagctcactgcaacctctactcccgggttcaagca

SEQ ID NO: 13218 - DNA, 1628 bp, Artificial sequence
  DNA replication origin
ccgaggtcccactcacctccgaggccatgttgggcggttcctcgtcgtccggaagcttcggtcctccgggtctggaagacaagaccggactgacgacctccttggccagcagggtcccccgggccgggctggctccgagttctgggcactgcgcttgagggagcgcagcccttggggacgcggacgtgagcgcgcgccacggtgctcggcgtcctccacgcccgtcccgcccatccggccgccgcgcactcacctccgcctggccgcacggatagtgtcgcgcccgccactggccagggcttttctggccgggatggcgtcagcagccgccggtcctgtccccacccctggcgacggccgcgccaataggaggccgcccggcggggtgggcgttgcctccatcctccaatcctggccgtgggcggggatacctcccgctgagctggaggctaagcggccccggggcggggaagcgggcggggaaagggttggggggaccccgacggggaaggggcctgggctggggttgaggagggtagtgcgctggcgttcgtgctgtggtcagcagacacgcaggggactggagactcgggccaggggtagaggctatgacatcaggcccgggcctggcaggttcacaagatatataaggtgaaatggcatgttcgctcattcactcattcattcattcattcaacaaacacgtaccaggcacctctatgtgccaggtacagagaaaggcatcaaggaaaaaggaaggaccatcagaaatgaagcctgtgccaggcgcggtggctcacagctgtaatcccagcactttgggaggccgaggtgggaggatcgcttgaggctacgagttggagaccagcctgggcaatacaacaagatcccgtctctacaaaaaaattaataataataaaaaaaaagccgggcgtggtggtgcacgcctgcagtcctagctactcaggaggctgaggcgggaggagcacttgagcccaggagttcgaagctgcagtgagctattgtgccacggcactccagcctgactcctctaaaaaagaaaagaaacgcggccggaggccgggcgcggtggctcacgcctgtaatcccagcactttggaaggccgaggcgggtggatcacgaggtcaggagtttgagaccagcctggccaaggtggtgaaaccccgtctctactaagaatacaaaaattagccgggcacggtggcgggtgcctgcaatcccagcgactccggaggctgaggcaggagaatctcttgaacccgggaggcggagattgcagtgagctgagatggtgccattgcactccagcctgggtgacagagcaagattctgtctcaaaaaaaaaaaaaaaaaaaaaaagaaagaaagaaagaaagaaagaaaagaaaagaaaaaagaaacgcagccgggcacagtggcttacgcctttaatcccagcactttgagaggctgaggcgggcggatcacctgaggtcaggaattcgagatgagcctggctgacatggtgaaaccttgtctctattagccgggtgtggtggtgggtgcctgtagtcccagctactccgacagctgaggcaggagaatcacttgaaccagggaggtggag

SEQ ID NO: 13219 - DNA, 1895 bp, Artificial sequence
  DNA replication origin
cagaaggtgctactccaagccaggacacatctgggccagaatggtctcttcagggccaggggatggggcactgagttgggctgggttgaatgagcaacagttaaggtcgaatgtacatgggaaataccagttttggttttgggacttgtgggttttttttctttttttgaggtggagtcttgctttgtcgcccaggctggagtgcagtggtgcgatctcagctcactgcaacctccgcctcccgagttcaagcgattctcctgcctcagcctcccgaatagctgggactacaggcacccaccactacacccagctaatttttgcatttttagtagagacggggtttcaccatgttggccaggctggtctcaaactcctgacctcaggtgatctgcccacctcgacctcccaaagtgctgggattacaggtgtgagccaccatgcctgccaggtttttttatttttatttttttgaaactggatctcactctgttgcctgggctggagtgcagtggtgagatcatgctcactgcagtctcaaactcctgggctcaagcaatcctcatgcctccgcctcctgtgagactacaggtgtacgccaccacacctgggtaattttcaaaatctttttgtagagacagggtctcattacattgccctggctggtctggaattcctgggcttcagcagtcctcccgcctcggcctcccaaagtagaaatatcagtattgttgtggttagccaccatttattgagcacctactgttgctcagccctgtgctagggatttcacatatgttattacggccttttatgaggtgggcaatattacccctatttcacaaatgaggaaagaggtttaaagggctcaagtgactggtacagaaaccaagtctgtttggctccaaagtccaggccctacccccctgccatgacccagaagcttgcagggcactgagcttgcagggcattgagaaagaggaagtgaattgctagctaatgaaggccaaaagggcctggaacccagacctcctgcttcccggagttcccttcatcaagcatcaggcgaacagcccctctcacctgaagggtccaaagcaatggcctcataatctagtgccttacagagtgaggccgacagctattattacccccattgccagataaatcaactatggcccaaggaaggaaaacctctgcctgggaatccagcatctcagtggtcaggaggagaggccaggagccactgaccctaagaggcagggtccagtgagacaggaagggaccaggcaccagggttgctggagccacgaggcgacgtcccctttttcctggctctttccacatgccacagtcaaggacaagaacacttaggggctgagctttattctataaacagggacaattgctctagcaggagaagggatgtggtgtggggtgggacctgacaggaggacacgtggtaagaaggaaggaagagttggaaggctgaaggcttgggagccacttttcctggccaggcaggcatcactgtgaggtgagggcagagccactctacccctagtagtgtgggttggtgggtttgccacaagggctgcctgcggatactggtgagtcctggtaaaggtgactgctgggctccagatgatgcgcccgggagggctgggggtgcaggcttcctaggtaattttcaaaattgcttcctggagggcgattcccagcagggtggcccgaggcaggtctggcgcccccactctctcctttggaggctaggaggaccggagtccccgaggtcccactcacctccgaggccatgttgggcggttcctcgtcgtccggaagcttcggtcctccgggtctggaagacaagaccggactgacgacctccttggcca

SEQ ID NO: 13220 - DNA, 959 bp, Artificial sequence
  DNA replication origin
aacagccaggctccctggctcaggtctgtaaaggaggaggagaatgaggaggaggaggagaaggaagaaacagccaggcctggtggctctcacacctgtaaaggaagaggaagaggaggaggagcaggaggaaacagccaggcgtggtggctcacgcctgtaaaggagaaagaggaggaagaaacagccaggcacagtggctcaagcctgcaaaggaggaggaggaaacagccagttgcagtggctcacgcctgtagaggaggaggaggagacagccaggcacagtggctcatgcctgtaaaggaggaggaggaggagcaggaggaagaagaaacagccaggaagggtggctcatgccggtaaaggaggagaaggaagaggaggaggaggaggaaacagccaggcgaggtggctcacgactgtaaaggacgaggaggaggaggaagagggagaaacagccaggtgtggtggcgcagcctgtaaaggaggaggaggaggaaacagccaggcgaggtggcttacgcctgtaaaggaggaggaggaggaggaggaggaggaaaaaacagccaagcgcagtggctcatgcctgtaaaggaggaggaggagaaggaaactacatggattggtggctcaggcctgtaaaggaggaggggaggggaggggggaggaggagaaggaagagacggaaactgccaggcacggtggctcatgcctgtaatcccagcaatttggggggcagcagtaaggaggaaggaaggaggaggaaaaagaatgaggaggaggaaagagggaggaagaaaaagaaacagccaagcgggcttggtggctcatacccatactcccagctactccagaggctgaggcagaagaaacgcttgaacctgggaggcggaggttgcagttagctgagatcgggctactgcactccagcctgggcgacagagtgagactccatctca

SEQ ID NO: 13221 - DNA, 1377 bp, Artificial sequence
  DNA replication origin
atatgatttttgccagtctgccttgggagcccaggagcagaaaaagctgactgattcgtccaggcttgagaccatcagagcaaaggtggcaagaatagtacagggccaatgacaatgcttttatcattttaaaaagtcaaacgtattttactcttttttaaaaatcgactcgctatttcctccaagagcgagtgtttggagagggggagggagaggggtggataattcctctctcactcttagaggacttgtcagaagtttcattcttaagcatatttggtctgtacagcagctgattccaggaaatccaaatcctgattcctcctggatcttaaaagatgaaaattcattgcagctccctggactatccagctaatagataaacacgtaccacattgcttatatactatgccactttagctgggaggtaggggctctttctttcctaaaaagaaagttacccaaacactgcagatggggatggagaggggatggggagtaattacaccgcaaagcctgctgactagcagcctaagaatcctttacaaaggcaattaacataaaacaatacatggcacggatagcagaattgtttcttcttaatgaatgcagtaattgaccatttaatcgctttactggagttcaccaatttctcctgccatctcccataccattcttcaggcagagtcaaatccctgtggacactggacttcttgctaccatcatctggaaagtacaaaacgcctggaaggaggaagaggctaacatgcgtgaccacccaccatgtgccaggcctactgtgtgctagactctgggcaagggactttacatgttatggggtgcagctcatgtaaggacgaatgaagatattacactatggatctgagccaggcgcagtggctcacgcctgtaatcccagcactttggaggccgaggcagaaggatagcttgaggtcaggagttcgaagccagcctgggcaacatagagactccatctctcaaaaaaaaaaaaaaaaaaagcgatgaatccggcattgcagagagtgggaaagtgtctggaggtttaagagtaagagaaggaagaggagattgcgatggtgggtggtcaaagtgaggggagaagaggcgagttgggaaaggaaggtgcttaggagcaaaagggcaagacccagggacacctggagcggggcgggcgactgccatgcagacaggactacgtacaacgggtaggatgatggggcgatgagctcaagaagcgcagccggggtagacgtgggggcaaatgtccgatcccggcgagacgagggtctcatcccaggggactgcggggctaggacgtggtcccagggctgcgagaagggagagaaagggcagagg

SEQ ID NO: 13222 - DNA, 2221 bp, Artificial sequence
  DNA replication origin
ggctgtttggagacgggagctgggcccacgggcgcagacgcgagcaaagagctgggcccggagaggaggccgggaggcagccactggaccgggggaggccgacttgaggaagttctgggcctggagaggccaccacaagggaaaagctgggcctcaagaggccgcagcgaggcacgagccgggcctagagaagccttcgggacgcaggagctgggcttgtggcgcctgccggcaggcaggagcctggcctggggaggccgcggccgggcacgagatgagcctcctcaagaggcccccggcaggcgggagccgggcctgccggggctgccgtgaggcaggcggaaacgtggcctggggaggccgacgtgaggccgcagctgggccgggagaggccgctggcaggcaggagccgggtctctcagggccgccggaaagccgaaggtgggtccgggaggcctgaacgcagggaagcctggggcctacaacggctgccaggagctgggcaggagctgggccgaacgtggttgtcgtgaggcaggagctgggcccgtggaggtggccgggagagctgggcctggagaggccgacgggaaccagttctgggcctggagaggaggccgaggggcaggagccgggcctggagcggccgccaacaggcaagaactgggcctgaggtggccaggctgaggcaagagcccggcccccatgggccactgtgcgggagaagctatggttgttcgggcatccaacacacgtgctgttcctggcgaggcttatttcaggacgatttgggcctgcagaagccattatcaggaggcagtagcctggcctatagaggctgcgaaaatttaaattcttgacctgcagaggccatgatcacgtaacatctaggcctggagggtccactgtcaggcagcggcgcatcctgaaggggcctacaacaggcaggatctcggcctgtggagaggcatcccctgatcctaaagaggccagtgtgagtgatcacatggcccacagaagcaagtgtcaggccagatcgtcgcttggagagtctgagaaaggcatgagatggacctaaacagaccattgcgattcagcacctgggcctatagaggccagtgtgaggcaggagcttgacctggagaggctggaagacgtatgagcttgtcctaaactgtccagtgtgaaggaagagtttggtctgtcaaggccgtcgggtaacaggctgtaacgtggactgggaaagcaactgtgaggcaagggctgggcctcgggaggctgggggaaggcaagacctgggcctggggaagccatcgtcaggcagtagctgggcctgtgaaggcccctgggcagcatgatctgggcctggaacgcttgacttgaggaagctttaggcctacaaaggccgccaggtgctgggcaggagccgagccaaaataggttgttttgagtcaggagatgggactgtagacccagctgggaggaagaactgggcctggagaaggcacagggaggcagcaacttcaccttgcgaagccgaactgaggaatttctgggcctggagaagccaccaaagggaaaagctgggcgtggataggccgttttgaggaatgagctgggcttcaagaggcaatgagatgcatgagctgggcctctaaaggctgccaaaaggcaggagcttcatctggggtggccaccttgagggatgagatgagcctaaccaggccattagaggcaggagctgggcctatcggatcctgccatgaggcaggcagaaacttggtgtgggaaggccggcataaagcaagagttgggtccatcaaggatgccacaatgcaggcagaaacctggcgttgggaagctgccatgaggcaagagctggtcctgtcaaagccgctgggaggccaaaggtgggcctagcaaagttgactttaagaagtctggggcatatagaggccaccaggtgctgggcaggagctgggccaaaagagggtgttgtgaggcagcagttgggcctgtagacacagccaggaagaagagctgggaatggagtggctgatctgagtacattgtgggcctggagggtatgccaacaggcaaaagctgggccaggaaaggctgccgtaaggcatgagcctggcctaaagagtccattgggaagcaggagttggacctgtatacaccgccaggaggaagagctgggcctgaagaagccaccata

SEQ ID NO: 13223 - DNA, 1075 bp, Artificial sequence
  DNA replication origin
aagagctgggaatggagtggctgatctgagtacattgtgggcctggagggtatgccaacaggcaaaagctgggccaggaaaggctgccgtaaggcatgagcctggcctaaagagtccattgggaagcaggagttggacctgtatacaccgccaggaggaagagctgggcctgaagaagccaccatacagcagaggctgggtttatagaggccgacaggaggcaggagctcagccaggtcgcaggagctcagccaggacaggctgactggaggacatttgggtgcgcagaagccactcagaggcaggagctgggctttgagaggctgcaagaggcaggacctgcccaaacgaggccactgtggaggaggagctgacctgtcaccactgcctgaagacagggagaaacgacctggagaagcctccgtgaggtaagagcttggcctggagaggtccctcagagcccgatgagctgggcctgtagagaccattgtcaggttggagctgggcgtgtccaggccagtgggaggcagaaggtgggcctagagagcttgaattgaggaattttcatgccgacagtggctgccgtgagctggacaggagctgggcagaagagtttatttgagggaagtgttgggcctgtagacggaaccaggaggaggagcttgacctgcagaggccatcatgaggcagaggcttggcctctataggccaacgggagacaggaattgggccaggagtggctcacttgaagataatattggagaaagtgacagagcatcaggcattagattctcatagggacagcgcaacgtagatccctcacatgcatggttcacaatggggtgcatgctcctatgagaatctaatgctgctgctgatctgagagaaggcagagctcaggcaggaatgtgagcaatggggagtggctgtaaacacagatgaagcttccctcattcaacaccattcacctccggctgtgtggctccttacagttccatggctctggcgttggggaccctgcccaagtacatccagaaggacccttccacaccagtcttcatagtggtcaagtgca

SEQ ID NO: 13224 - DNA, 951 bp, Artificial sequence
  DNA replication origin
ccgccccgtccgggagggaggtggggggatcagccccccgcctggccagccgccccgtccgggaggtgaggggcgcctctgcccggccgcccctactggaaagtgaggagctcctctgcccggccagccgcccagtccgggagggaggcgggcgggggtcggccagccgccccgtccgggagggaggtggagggggtcagccccccttccggccggccgccccgtccgggaggtgaggggcgcctctgcccggccgcccctactgggaagtgaggacccctctgcccggccagccgccccgtccgggagggaggtaggggggacagccccccgcccggccagccgccctatccaggaggtgaggggcgcctctgcccggccgcccctactgggaagtgaggagccgctctgcctggccagccgccccgtccgggagggtggtggggggtcagcccccgcccggccagccgccccatccgggaggtgaggggcgcttctgcccggccgcccctactgggaagtgaggagcccctctgcctggccacgaccccgtctgggaggtgtgcccagcggctcattggggatgggccatgatgacaatggcggttttgtggaatagaaaggcgggaagggtggggaaaaaattgagaaatcggatggttgccgggtctgtgtggatagaagtagacatgggagacttttcattttgctctgtactaagaaaaattcttctgccttgggatcctgttgatctgtgaccttatccccaaccctgtgctctctgaaacatgtgctgcgtccactcagggttaaatggattaagggcggtgcaagatgtgcttggttaaacagatgcttgaaggcagcatgctcgttaagagtcatcaccactccctaatcttaagtacccagggacacaaacactgcggaaggccgcagggtcctctgcct

SEQ ID NO: 13225 - DNA, 1263 bp, Artificial sequence
  DNA replication origin
ctcccggacggggcggctggccgggcggggggctgacccccccacctccctcccggatggggcggctggccaggcggggggctgatccccccacctccctcccggacggggcggctggccgggcagggggctgaccccccacctccctcccggactgggcggctggccgggcggggggctgacccccccacctccctcccggacggggcggctggccgggcagaggggtcctcacttcccagtaggggcagccgggcagaggcgcccctcacctcccggacgggggctgacccccccacctccctcccggacggggcggctggccgaccccccacccccgcctccctcccggacggggcggctggccgggcagaggggctcctcacttcccagtaggggcggccgggcagaggagcccctcacctcccggacggggcggctggccgggcggggggctgaccccccccacctccctcccggacggggtggctgccgggcggagacgctcctcacttcccagacggggtggttgccggacggaggggctcctcacttctcagacggggcggttgccaggcagagggtttcctcacttctcagacggagcggccgggcagagacgctcctcacctcccagacagggttgcggcccagcagaggcgctcctcacatcccagacagggcggtggggcagaggtgctccccacatctcagacgatgggcagccgcgcagagacgctcctcacttcctagatgggatggaggcggggaagaggcgctcctcactttccagactgggcagccaggcagaggggctcctcatatcccagacgatgggcggccaggcagagacgctcctcacttcccagacagggtggcggccgggcagaggctgcaatctcggctctttgggaggccaaggcaggcggctgggaggtggttgtagcgagccgagatcacgccactgcactccagcctgggcaccattgagcactgagtgaacgagactccatctgcaatcccggcacctcgggaggccgaggctggcggatcactcgcggttaggagctggagaccagcccggccaacacagcgaaaccccgtctccaccaaaaaaaaacgaaaaccagtcaggcgtggcggcgcgcgcctgcaatcgcaggcactcggcaggctgaggcaggagaatcaggcagggaggttgcagtgagccgagatggcagcagtaccgtccagctttggctcggcatcagagggagaccg

SEQ ID NO: 13226 - DNA, 1565 bp, Artificial sequence
  DNA replication origin
tttgggaggccgaggcgggcggatcacgaggtcaggagatcgagaccatcctggctaacaaggtgaaacgctgtctctcctaaacatacaaaaaaattagccaggtgtggtggcaggcggctgtaatcccagttacttgggaggctgaggcaggagaatcgctggaacccaggaggcagagattgcagtaagccgagatcgcgccactgcactccagcctttttttgagactccgtctcaaaaaaagcaaaaaacaacaaaaaaacccaactcgggtgctgtcgctcggctgcagtggctgcggttggcggtggctgcggcggccacctcgagctctcatgcatccgccgaggcggggcggggcgggccggccgggggccaagggcccggggctgaagcctgagggccgaggcgggcggcgaccgaggcggcttcggccaaagtcgggccgggggccggtgggtggcggccgtggccgggacgatgactctggagtccatgatggcgtgttgcctgagcgataaggtgaaggagtccaagcggatcaacgccgagatccagaagcagctgcgggggacaagcgcgacgcccggcgccagctcaagctgctgctgctcctcacgggcgagagcgggaagagcaccttcatcaagcagatgcgcatcatccatggcgccgggtactaggaggaggacaaaaggggcttcaccaagctcgtctaccagaacattttcaccgccatgcaggccatgatccgggccatggagacgctgaagatcctctacaagttggagcagaacaaggccaatgcgctccagatccgagaggtggacgtggagaaggtgaccacctttgagcatcggtacgtcagcgccatcaagaccctgtgggacgaccccggcatccacgagtgctacgaccgcaggcgcgagtaccagctctcggactcggccaagtactgcgtgaccgacgtagactgcatcgccacctcgagctacctgcccacccagcaggacgtgctgcgggtccgcgtgcccaccaccggcgtctttcgacctggagaacatcatcttcaggatggcggatgttgggggacagcggtcggcgcagaggaagtggatccactgctttgagaacctgacgtccatcccgtttctcgtcgccctcagtgaatacgaccaagtcctggtggagtcggacaacgagaaccggatggaggagagcaaagccctgttccggaccatcatcgactacccctggttccagaactcccccgtcatcaccttcctcaacaagaaggacctgctggaggacaatatcctgtactcacacatggtggactacttccccgagttcgaagggccccagcaggacgcccaggcggcgcgggagttcatcctgaagatgttagtggacatgaaccccgacagcgacaagatcatcgactcccacttcacgtacgccaccgacacgaagaacatccgcttcgtgttcgcggccgtgaaggacaccatcctgcagctcagcctcaaggagtacaacctggtctgaaagcgcccaggccc

SEQ ID NO: 13227 - DNA, 1327 bp, Artificial sequence
  DNA replication origin
atgcacaggaccatgatttcaagtggaaatgtcatcactttgaaaataatagcaactcatcctgaactccctaccttgtctgtgtgaatgtagatgaatccatcagtgggggactgggctagatgcacttcctttcacaccacattaattctgtgccctaaggccaggcacagtggctcacacctgtaatcccagcactttgggaggctaaggcaggaggatggctggaagcccaggagtttgagaccagcctgggcaacatagtgagatcccatctctacaaaaaataaaatgaaaataaagttctatgccctaaatatatgtccagctcaggctacatatctatagtgctggtgagcctgcaagaacacacaggttctggaccttgctttcagtttatttacaattcagtggaaatggaaaaatatgaaaagttgccaagcacagtggcatgtgcatgtcatcgcagctcctgagggggctgatacaggaggattgcttgagcctgagagtttgaatccagcctgggcaacatagtgagactccctctcttaaaaaaacagaaaaaggggccaggtgtggtggctcatgcctgtaatcccagcactttgggaggctgtggtgggcggatcacctgaggtcaggagttcaagacaagcctggccaacatggcgaaaccccctgtctactaaaaatacaaaaaaattagcctggcatggtggcatgcgcctgtaatcccagctactcgagagactgaggtaggagaattgcttgaacccgggagggagaggttgcagtgtgtcgagatcacaccactgcactccagcctggaggacagagtgagactcctctccgggggctggggaaatgcaacttttggcaggcatggtgactcatgcctgtaatcacagctttttgggaggctgaggcgggcagatcacttgaggtcaggacttcgagaccagccttgccaacacggtgaaacccagtttctaataaaaatcctaaaattaggccaggtgcagtggctcacgcctgtaaccccagcactttgggaggccgaggcgggcggatcacgaggtcaggagatcgagaccatcctggctaacaaggtgaaacgctgtctctcctaaacatacaaaaaaattagccaggtgtggtggcaggcggctgtaatcccagttacttgggaggctgaggcaggagaatcgctggaacccaggaggcagagattgcagtaagccgagatcgcgccactgcactccagcctttttttgagactccgtctcaaaaaaagcaaaaaacaacaaaaaaacccaactcgggt

SEQ ID NO: 13228 - DNA, 976 bp, Artificial sequence
  DNA replication origin
aaggcaggtaggagtttgtgaaggatggagtggcagtgtgaagacaccggggcagaaggaccagccatgcacaggcactcaagggtgaaagatcctatgctggccaggtgtggcggctcacgcctgtaatcccagcactgtgggaggctgagacgggcagatcaccctggccaacatggcaaaaccccatctctactaaaaatacagcaattagccgagtgtggtggcgggcacctgtaatcccaactactcaagaggttgagacaggagaactgcttgaacccggaaggcagaggttgcagtgagccgaaatcacgccattacactccagcctgggtgacgagcgaaactccgtctccaaaaaacaaaaaaaagaaaagaaaaaaaaagaaagatcccttgtcctggaagtggctgaacttgggggtggtacaggggagacaactgatgggcctagcggggtccgtgcacaggggccggtgtcactgtgctgggctgttggaaatcccctgactgctcgctggccaaggtctgtgaatgggaaacagactgtgtctgggagtgtgggggctatgcattctccctgctcactgccctggcaactgtcacggcttatctgctgcttgagccccggcgtgctccgctctcccctccctgtagcctagagttgctgctggggtcagttagccctggagacggggcctgagctgggctgtaaggctgaggggtggttgggctggagatggggtctggggcagagctctgcagcagcctgtgggtttgtgccagggttgaggatggggctgggattgcaggaaggctggtttgcatgtccaacaggaaatctctctgagaagcatgggttcacatgggctgggcctctggggcaggcaggttgggtaagggtgagatgttgaggggggtgaagctagaagcaggcagggagctagggccggatgaggcagggcagagcaga

SEQ ID NO: 13229 - DNA, 1117 bp, Artificial sequence
  DNA replication origin
gctcgttggccagcgtaaacgccaggcgctgcagcggctggtccccaggctgggccggggcgcacgtggggtcccgggggcagccgatggcgctcagcagctaggtgggcaggtcggccacaaagcgctcgaaggtcaggcagccactggccgaggccacctggcgcaggccctccagcatcccacggggcagctcccgcgtgtcggccccccgccagcgggactggctctggcgcaggtgcacgcagccgccccgcgggtcgtccaggatgtccaacagggtgcgcaggctctgcaggaaggcgcacggcagcccctccgtgctgggcgcgggcgcgggcgcgagggggaggcacgtggccccgctcagccatggcagccccagccatgggcgcccgggctcggtcccagcgtccacccgcgtccgtccccgtgcggccccacggcggggccagcccagcccacagcagtctcaacctctcgggctcaagccatttttctgcctcagcttttcgagtagttgggactacagccacgcacccctacgtgggctaatttttgtattctcgcatccagtacaaagatgctttttgtagtagccacatttctaaaaagcggtatgcaaattgagattgtcgaaaacattctaaaatgtaacagaggcacagaagcaataaaaagattcttttatcagacaacttcttccttctccgtggagctcagaggcagcttacgttgtgattagaaatgtgggcttggccaggcgtagtggcttacacctgtaatcccagcactttgggaggccaaggcgggcagatcacctgaggtcaagagttcaagaccagcctggccaacatggtgaaacactgtctgtactaaaaatacaaaaattaactgggcgtggtggtaggcgcctgtaatctcagctacttgaaaggctgaggcaggagaatcgcttgaacctaggaggcagaagttgcagtgagcagagatcaggccactgcactccagcctgaacaacaaagagtgaaactccatctccaaaaaaaaaaaaaaaaaaaagactgtgggctttacagtcagatagacatggtttcaaattcccaccctgctacct

SEQ ID NO: 13230 - DNA, 2670 bp, Artificial sequence
  DNA replication origin
cggggccacgtgcctccccctcgcgcccgcgcccgcgcccagcacggaggggctgccgtgcgccttcctgcagagcctgcgcaccctgttggacatcctggacgacccgcggggcggctgcgtgcacctgcgccagagccagtcccgctggcggggggccgacacgcgggagctgccccgtgggatgctggagggcctgcgccaggtggcctcggccagtggctgcctgaccttcgagcgctttgtggccgacctgcccacctagctgctgagcgccatcggctgcccccgggaccccacgtgcgccccggcccagcctggggaccagccgctgcagcgcctggcgtttacgctggccaacgagccacagacagtcctggagaagcccccgcccaggttcaggcggcgcggcgcggcccgcagcccggagcagctgtacaccccccgccgaggcggcgtcctgcccgcggagccagagcggacccagagcgcaagcgcggacgcaggttcattggcctgcagggccctggaggtggactcgggatgtccgactggccccccgtgcccgaagggaagtcggaggctcaccatcaccagcggcgtggactgcggcctgctgaagcagatgaaggagctggagcaggagaaggtggtgctgctgcagggtttggagatgatggcggggtcgcgactggtaccagcagcggctgcaaccagtgcaggaccgccagtgccgcctgggccagagcagagccagcgccgactttgggcctgcggggagcccccacccactggggcggctactgcctaaggtacaggaggtggcccggtgcgtgggggagttgctggctgcggccggtgccagccgggccctacctacgtcctcctccgggcccctctgccctgccctgacgttcacctccttcccggggtggcagcagcagactatccttatgctgaaggagcagaaccgacgcctcacccaggaggtgaccgagaagagtgggcgcgtcatgcagctggagcagaagtcggcgctcataatgaagcagctgtttgaggcccaggccctcagccagcaggacggggaggcctctggactccaccttcatctagcccgtttgggctgggcggaaccccagggcagttctgtcactcagcccttcgagggcggacgccctgtctcacccaacgtctctggctggagaccccctgcagcccaggcagtcccggagtgggcgccttcctgccccacttgccatccaggcttcccaggtccgcccccagctggtccccgcaccgagcccttgactcggttttggctcctggtgctgacatgggctggggctctcttgagtctgcatggtccgcaattgctactgccgctgtcaggaacagtgggggactccctgtttccagcggtgctgctctgggtcccatctccagggaaaggcaatgctcacgccgggctgcacttccgacaatggccagtagaggggggccgggcagctctgatgcggcgctgaggctgcgcccgagaccaggggtgcaaggacagcttcctcccctcaaccagggcaccaggacaggtggctgtcactaggacaggggcagatggagggggtggggatggcctctaagcagggggtgcccgcctggcaggggagccccaggaatggtggtcggacttcgggtcccggccaaggcagagagaatggctgcagcagattgcggggtggggggggccaggcaggtgagagcttagcctgcatatgcctcccgcagaccccggtgtgatggccttcctcaccctggccaggacgctgtcccctgttgagtcccacagaacaacctgtgagcctggctccccaggagggggttcagcccaggcccccaggcacatcgtaggcagagcctgcccccccaccccaactcaggattcccaaggtctggggtcctgctcactccccacccccgtttcctcccacactcagcctgaccccaggtttcagcggggagaggccacttccctcagccaaggaaaacgagaacccccagagtacaagaggaggctggggcaggtccccttgagtgtcactccctgcaccccctgcctaggcccactcccgctggtgctggggtttgcactggtggagggggcccctgctcagcccatcctggagggtcccagtgccaccagagctaggggcatggcaacatcaaggatggtccagggccccccgatgcaggatcagtgtgtggggtgcagggccccccaatgcggggtcagtgtgtggggggcgcagggacccctcgtgcccagggcactttggggcactgtcccacaaggcaaccctgtctcagaggaggggtcctggcagacagcacggcaactcctttccagaacccagctccacgctaacctgcccacagcaacccctcagagccacatcccctgctgcatctggcctgcaggggtgtcccaggacacgcccaaaccagcccagcgtgcaactgccctcctaccctgaggatgggagtgagctttccaggggacataaggacgccaggcctggatcttctgggcaggaaagggagtgggtcctgaaggactgtgccccacagccctagcaccacagccccagcaccaggtggactgcagcgcagtgg

SEQ ID NO: 13231 - DNA, 1159 bp, Artificial sequence
  DNA replication origin
accctgagtggacacagcacatgtttcagagagcacatggttgggggtaaggtcatacatcaacagcatcccaaggcagaagaatttttcttagtacagaacaaagtgaagtctcccatgtctacttctttctacacagacacagcaacaatctgatttctctatcttttccccacctttcccccttttctattccgcaaaaccgccatcgtcatcatggcccgttttcaatgagctgttgggtacacctcccagacggggtggtggccaggcagaggggctcctcactttccagaaggggcggccgggcagaggcgcccgccacctcccggacgggtcagctggccgggcgggggctgaccccccacctccctcccggacggggcggctggccgggcgggggctgccccccacctccctcccggaaggggtggctgcgggacggagacgctctttgcttcccagacggggtggctgccgggtggatgggctcctcacttctcagatgaggcggctgccggccagaggggctcctcacatcccagacggggtcgcggccgggcagaggcgctccccacatctcagacgatggccgacggggcagagacgctcctcacttcctagatgggatggcggccgggaagaggcgctcctcacttcccagactgggcagccgggcagaggggctcctcgcatcccagacgatgggcggccaggcagagacgctcctcacttcccagacggggtggcggccgggcagaggctgcaatctccgcactttgggaggccaaggcaggcggctgggaggtggaggttgtagcgagccgagatcacgccactgcactccagcctgggcaccattgagcactgagtgaaccagactctgtctgcaatcccggcacctcggggggccgaggctggcagatcactcgcggttaggagctggagaccagctcggccaacacagcgaaaccccgtctccaccaaaaaaatacgaaaaccatcaggtgtggcggctcgcgcctgcaatcccaggcactcggcaggctaaggcgggagaatcaggcagggaggttgcagtgagcagagatggcggcagcacagtccagcttcggctcggcatcagagggagaccgtggaaagagagggagagggagac

SEQ ID NO: 13232 - DNA, 883 bp, Artificial sequence
  DNA replication origin
agcccctctgcccggctgcccagtctgggaagtgaggagcgcctcttcccggccgccatcccatctaggaagtgaggagcgtctctgccccgtcggccatcgtctgagatgtggggagcgcctctgcccggccgcgaccccgtctgggatgtgaggagcccctctggccggcagccgcctcatctgagaagtgaggagcccatccacccggcagccaccccgtctgggaagcaaagagcgtctccgtcccgcagccaccccttccgggagggaggtggggggcagcccccgcccggccagccgccccgtccgggagggaggtggggggtcagcccccgcccggccagctgacccgtccgggaggtggcgggcgcctctgcccggccgccccttctggaaagtgaggagcccctctgcctggccaccaccccgtctgggaggtgtacccaacagctcattgaaaacgggccatgatgacgatggcggttttgcggaatagaaaagggggaaaggtggggaaaagatagagaaatcagattgttgctgtgtctgtgtagaaagaagtagacatgggagacttcactttgttctgtactaagaaaaattcttctgccttgggatgctgttgatgtatgaccttacccccaaccatgtgctctctgaaacatgtgctgtgtccactcagggttaaatggattaagggcgtgcaagatgtgcttcgttaaacagatgcttgaaggcagcatgctccttaagcgtcatcacccgctccctaatctcaagtacccagggacacaaacactgtggaaggcctcagggtcctctgcctaggaaaaccagagacctttgttcacttatttatgtgctgaccttccctccacta

SEQ ID NO: 13233 - DNA, 1161 bp, Artificial sequence
  DNA replication origin
tcaacgccgacccgctcgcgcccagctggggcctgacccgaccgcctcccgctactggccgacgccgcgctggttccgccctgattggcaggaagctcgcccagtcgaagagcaggcagcgccagcggccggcgcctgagtggtccctgggttggggggggggggggggggcggcctgcgagcctgccgtgcactgattggtcctctggccagcgggcgcgccctctccgagagacccggcggtggtgcgccgctacgctctcataactgggcgtcggagtctgccgtgaagagggttctcacccgcgtcagggtagacgccttatcccttcacacagggggtcacgacttactcgtgtgtctggccccagagcagcgggtccttgtctcctcaatggaaggcctgagcagcctttcctggaggatgtggcgggaggagggctgaggtggctgcggacacgccaccgcggctggccccgccccgagccgcagggcaccgcccgggtgtccagttcttcctcactcgctcgcgcagaaatccgaacgagaaaacccaaaataggagcgcttgagttcaatgaataatgacagtgactccccaccgtgaccgtttttccaccgggacacacagatggagacaggcccttccccaagatgctcccggctccctgggaggcggagtccagccctagaggctctatcagcgcagggagtctcctgggggtcaaggttcttagcccgttcaagccattttctcctttctttaaaagacaaagtctcactctgttacccaggctgaagtgcagtggcgcaatcatagctcattgcaacccctgggctcaagcaatcctcccgccccagcctcccgagtagctgggaccacagacgcgcaccaccacactcagctgattttttaaaattttggccgggcgcagtggctcacgcctgtaatcctggctctttggtaagcgatgcgggtggatcacctgaggtcaggaagttgagaccagcctggccaacatggtgaaacctcatctctactaaaaatacaaaattagccaggcatggtggcacacctgcaatcccagctactagggaggctgaggcaggagaatcgcttgaacccaggagatggagattgcagtgaggcgagatcacggc

SEQ ID NO: 13234 - DNA, 2068 bp, Artificial sequence
  DNA replication origin
cggccagtagcgggaggcggtcgggtcaggccccagctgggcgcgagcgggtcggcgttgagggagccaccgccctcccgcctgcgcactgcctctcgcccccctccggccagcccgcagccggccgcgtcatgccaggcgctgctcggcggtagggagtgcccggggccgccgcctccgcccgcccgaagccgcgcccactgcccagagccagagggatggtggtagtcacggggcgggagccagacagccgtcgtcaggacggtgccatgtccagctctgacgccgaagacgactttctggagccggccacgccgacggccacgcaggcggggcacgcgctgcccctgctgccacaggaggtacccgggcgggcggcgggccgcggggcgtggggaggggcgcgggggagaagcgggcgcggggcatagcggtcctcggcgggtgggcggggccggggttgggggcggggcccgcggacttgcgcccctcccccgcccacctgcaactcccccgcccacctgcacccctacccacccaccttcaacccctgtcaattacacccactaggtgtgcttccccaccccctacaccctccgcccagtagtcactggggtgatttactcccatcgccatgtcccacttttaccgaagacaggagggagggtgggccgtgggagggggaccctggagccccgagagctgatggtgtgtctgaccaggcaccgtagctcgagcctgtaatcccaacacattgggagggaggatcgcttgagggcaggagttggaggccagcctgggcaacatagcgaggccccgtccctactacgactggaaaaacaaaggcattttgggttggatgaataaaaaaaagaaaagaaaaagatgtcttctagagaatccaacaggatgctgtagtggttgcccacacctagtctccagctacctaaggaacaaggcaaggagctgtctgcacataaggggcaggccagttcatagatgtaggcacggtcacctggcatcccatggctttcactcacaggctgctgtgctctggtgcacaggggcttccacgggtcttacttaatgtgtgtgatactatcatgtcaacacctgaaatgacactcaagagacgggagaagataccaggcatggtggctcacatctgtaatctcagcagtttgggatgctgaggtgggaggattgcttgatcccagcagttagagactagtcagggcaacagtgagaccctgcctctacaaaaatgaaaattagccaggcttggtggtgtgtgcctgtagtcccaggtgctcaggaaggtgagttgggaggattgcttgagccctggaggttgaggctgcagtgagctgtaattgtgccactgtactccagcctgggtgtgatagagtaagaccgtacctacaaacaaacaaaaacaaaaaaagcaagagaagggaaacgatgccaggtgtggtggcttacacttgtaatcccagcactttgggaggtcaaggcaggaggatggtttgaggccaggagtctgggaccagcttgggcaacacagactccatctctacaaataaaaaataaagaggagggaaggtgaagcattactggacaccgaagatggcttctaggaggcagggactaaggtagtgccagatccaggagcatgtggtatgcggagtcccaggacaatggaggccctcaacaattgaggccctcaacaggctgggctaggtgatgctcttgggaagcagatagtgttgtgctgggattgcaagccccatacacacaatgccatgggaaaatgagcaaaaatctagaagtaatctctgcaattggaaaaaagtcattagtcacagtggtgctatttttttgtgcactgtcattgggaaaatgatatggtttgagggaaagagcacaagaccacagattgcagaccagggccccaccaccagttccccccactgatgacattgccccatgtgagctccaaaactgtttccgatggcttttgtcctctctgcttcaatcctctcatctctaatatggagcaagcacttgg

SEQ ID NO: 13235 - DNA, 1623 bp, Artificial sequence
  DNA replication origin
cggaccaacagccccgccacccccggcccaagatgccccgccgcgcagctcttagccccagtccgtccactccgtacctcgcccgcgtgtccgctggcgtccgagccgcagctcgcccgcgtctgcgccgtggtccaggtcaccgctcgcccacgtcgctcggcaggtctgggttccccagtccgctccagcctcacacacaccccctgcttgccccgcccccccggcaccgccagcgcacgcccgtaacgcacggcgcgcaaacatcacttccggggcctttggctgatgacgggaggaagtgcgagcgggatccaaaggcttacacagagtagggtgccgctctgacgcccaagagcaaatagaagagggtagcctccgcgctaaagctggggcgctggggagccccggagaaaccaacgtttcctagtctgtggctcagtccctacttccggctcccgatgcgcagcagcgggagggcgacgccggcaccgcggcgactcctggagccgaggccacggtggaagcgcgaatgggaggtggagcggagccactgcgccgagggacgcttcagaaactctgtttcagtccttcgcggatcctaggatgtgacaggtgttcgagttaaagggtcttaagccaatcgtttgatccaaaagcagctgaatctttaggaggcccaggcaggaggatcgcttgaggccaggagttcgagaccaccctgggccacagagggagagcccccatctctacaaaagaaattttacaaatcagccgggcatgatggcgggcacctgtggtcccaactactggggaggctgaggtgggaggatcgcttgatagcccaggaagttgagggtgcagagatccctccactgaactccagcccgggtgacagagcagagcgagaccctgtctcaaaaagaaaaaaaaaaaaaaaaagcgtaactgagacccagaagtgaaataattaaccagtgtcacaaagtatgaatggttgagtcacaaattggatactgtttactttctttatgtgattcccatgtaaggaatattaaaaacagtagctacatgctgattgctctgagtcctggatgccatctatggtgaaaggtgcagtcacagaaagaaagaaaagaaaatacaatgctgtggctcttagatagacctgggttggaatcccagctttgctaattgtcgctgtggtgttcttggacaggttgcccaatttttcagtcttctttttttcttttttgagacagtcgcgctctgtcacccagagtggagtgcagtggtgtgatctcggctcactgcaaactccgcctcctaggttcaagcgattctcccacctcagcctctcgagtagccggaattataggcgcccgccaccatgcccagctaattttttcgtatttttagtcgagacggggtttcaccatgttggccaggctggtttggaatcgtgacctcaagtgatccgcccgccttggccttccaaagtgctaggattacaggtgtgagcctccgcacccggctaatttttgtatttttactagagacagggtttcatcatattggccagtctagtctagtactcctgacctcaaatcatccacctgcctt

SEQ ID NO: 13236 - DNA, 743 bp, Artificial sequence
  DNA replication origin
cctgctggagagggacaagagtcctcagccctgagcatcactgaggcttgggtgaagggagggacggaggcccagccagaccctgcacattccagccctggttcattctggatccaagcactgagatctctccctaccagggcacccagccaagccccactgcgatggggccagatccagaggacagccctactgggccggagcttgctctctgctcagtccttaaaagtccatcggcctgagctcctctttcgccttgaaggggtcctgcctgtgtagggttgcgttcctgacatgccatggatgagggagtgactagaggtctccccggaaagtgtttgactccaggtcagatcctgggaaaaggccacagccccaggacctggagccaagggactgagggccaagcgggccccggagggggaggtaggggaggggaaaggggagttgggggaggggacttagtaagagggtacagctcaattagctgggacagtgaggaggagtaaaggggcttaggggtgtggaagggagctcaatggagaaaaggggttcgtgcgtagcagggggcccaggctttccctccctggtcacacttctgccactcagctctcttcacaccacccaccctaagccgtgccctctgacctcccacctgcctggggctgaccactctgccttgtctctttccatccagggccttgggaactccaagacagaatggcccgaggcctggacactct

SEQ ID NO: 13237 - DNA, 966 bp, Artificial sequence
  DNA replication origin
aggacagagatgaggatggaggtgaaagagggacagtgagtgagaagagagtgagaatggaagggaagattgaagtgaggaagggagaacagaggggaggatggagatgaggaacgaagaatggaggggaggatggaggggaggatgaaggcgaggatggtggtaatggtggaggtcagggctgggtgcggtggctcacacctgtaatcccagcactttgggaggccgaggtgggtggatcctgaggtcaggagatcgagacaatcctggctaacacagtgaaaccccatatctactaaaaatacaaaaaattagccaggcatggtcgcacgcacctgtagtcccagctactcgggaggctgaggcaggagaatcggttgaacccaggaggcagaggttgcagtgagtcgagatcgcgccactgcactccagcctgggtgacagagcaagactctgcctcaaaaaaaaaaaaaaaaagtggaggtgaagatggagatttggatggaggtgaagatgcaggtgagcgtggaggtgagtttggagatgagagtggagttgaaggtggaggtgaggatagacgtgtaggtgtaggtgaaggtggtcttgaggatggaggtgaaggtggaggtgaggatggaggtgaaggtgagggtggaggtgaggatggcggtgagggtcgaggtgaggatggaggtgaaggtggaggtgaggacagagctgaaagttgaggtgaggatgatgaggatggaggtgaaggtggaggtgaggacagagctgaaagtcgaggcgaggatgatgaggatggaggtgaaaatgaagttggggatagaggtggaggtggagataaggatggaggtgatggtggaagaaatggtaaaaatggtgaagacactggtgatggcaatggtgaaatgggaatgccattgtgggtcatgaaatcgaaggtcatggttatggtgggaacag

SEQ ID NO: 13238 - DNA, 1131 bp, Artificial sequence
  DNA replication origin
gatgcctttatgtggtagattaagtggtggagcctattgtttatcccctgtcgatagatgaggaagctggcgctcagcagaaacagtgagtgacttcctcagggtctcagggctgctgagaggtggaggctggaaatgctcccaggtggtctgagatggaagccctgctgggaagtcctccctcaggggacaggagcctgtggacatgccttgcaccctgttgcactctccgtggacgtgaggaagtgctgctcttttcatcttagagatgagaaagggaggcctgaagaggaggcagtgacttttggaggccaccctgagtctatggcacagctgaaacactgattttgctttcagctcttccctcctactggaatttcctgatttctttgagatctgaagtaagggggacaaggctcctgggcctccatgagccaggtggccctgatgatgagccacccacagatccgcaggcattggctgcaggtgccaagccagtcagcacagacctctgccatttgctgtcattgccatgcaaggaaagagtcccagctcacaggcagacgtgctccacaaggcagccaggacctgcaacctggccacatccatccatcatctagggtcacctctccgtccagacccatgcctggttattaagaagtatttagtgatggcaggagacccacctggagactggatgggtgatggtggcagtgatgatggtggagttagtgaagacagtggaagtgagaatggaggtaaggacaggtgtgaaggtgaaggtaaaggtggaagtaaggatggaagtgaaggcagaagtaaggatgaaggtgaggataaaggtgaggttgaaggtgaggataaaggtgaggttgaaggtgaggatggaggtgaggatggagagcaggaggaaggggaggacagaagtgaggttggagaggagaatagacgggaggacagagatgaggatggaggtgaaagagggacagtgagtgagaagagagtgagaatggaagggaagattgaagtgaggaagggagaacagaggggaggatggagatgaggaacgaagaatggaggggaggatggaggggaggatgaaggcgaggatggtggtaatggtggaggtca

SEQ ID NO: 13239 - DNA, 1104 bp, Artificial sequence
  DNA replication origin
aattctcctgcctcagcctcccaagtaactgggattacaggcatccgccaccacacctggctgatttttgtatttttggtagagatgggatttcaccatgttggccaggctggcctcgaactcctgacctcaagtgatcctcctgcttagcctcccaaagtgctgggattacaggtgtgagccaccgtgccaggcccagcacttggtttcaattctcacttgtgagcaggtaggcaggggtggtatagccccacttttcagagggaggcacagaactggcaggggtggggtggattcggggagaattgcctgaggtcatctagtctgaaatgacagcgcagggattcggggccaggctgcgggcctcctggttccttttttaacctcctgctgctttgggactgtgtaccacatttcaagggggcacacagggacactgaggcccagcccctgccctggagccatggctgggccaggtaaggggaaggttaggctcatggcagcagagtggggctgggagggagagagtaactccaggcctggcaacaggacttggcagaatgtccttgaggagttcaagggcaagaatgttgggaagggctgggctgaggtgggtgtcagggaaccaggaggccttggaaaaccagagaagaggaagaagggggtcacaggagagggtatctgatcaggcaagtgttggagacctgagaaggcaccgtgtggggttgaggctctaagagcatgaacgcctggctggtaaataaggatcttggaggctgtgcatgatggctcacacctgtaatctcagcagtttgggaggccaccgcaggtggatcacttaagcactaggagttgagaccagcctgggcaacatggtgaaaccctgtctctccagaaaaaaaaaaaattagctgggtatggtggcacatgcctgtagttcctactactcaggaggctgaagtgagaagatggcttgagcccaggagttcgagactgcagtgagctatgattgtgccactgcactccagcctgggtgacagagagcgagaccttgtctaacatcaggattcttggcatcaggtctgccaggagagccaccctcct

SEQ ID NO: 13240 - DNA, 1220 bp, Artificial sequence
  DNA replication origin
ccggcaactagcgtctgggacggagaggccgcactctgaggattaagggagccgagggcggcctggaacggggaaggcggcgctgacggagacggaatgtgggacgaaggacagcgggaggcaccgacgcgcaactgccccagccgcgcggatggcacggaccgaccgccctgccacccccagcccgagacgccccgccgccccgctcctgtagctgagagccgagcagctctcagccccagtccgtccgctccgtacctcgcccgcgtctccgccggcgtccaaaccaccgctcgcccgcttcgcccgggtaggtctgggctccgcggccagctcccgcctcacacccaccctcctgctcgccccgcccccggcaccgccagcgaacgcacgttacgcgcggcgcgtaaacgtcacttccggggcctttgactctggacgggaggaagtgcgagtggatccaaagggtcgagcggagtggggtaccgccctgacgcccaagagcaaatggaagagggcggcctccggggtaaaggtggggcgctggggagccccggagaaaccggcgtttcctagtctgtcgctcagtccctgcttccggcttccgacgcgcaacagctggagggcgacgctggctccgcggcgactcctggggctgcggccgcggtggtagcgcgaatgggaggtggagcggagctactgcgccgagggacgcttcagaaactctgtttcagtccttcgcggatcctaggatgtgacaggtgttcgagttaaaaggtcttaaggcgatcggttgatccaaaagcagctgaatctttaggaggcccaggcaggaggatcgcttgagtccaggagttcgagaccagcctgggccacagagcaaggtcaccatctctacaaaagaaattttacaaatcagccggacatgatggcgggcacctgtggtcccaactaccagggaggctgaggtgggaggatcgcttgatagcccaggaagttgacggtgcagagatccctccactgaactccaggccgggtgacagcagagcgagatcctgtctcaaaaaaaacataaccgacatccagaagtgaaataaattagccagtgtcacaaagtattaatggttgagtcacaaattgaatcctgtttacctgattctttacgtgattcccatgtaaggaatgttaaaaacagtaaatactaattcctctgcgtcctg

SEQ ID NO: 13241 - DNA, 1181 bp, Artificial sequence
  DNA replication origin
cggctctcagctacaggagcggggcggcggggcgtctcgggctgggggtggcagggcggtcggtccgtgccatccgcgcggctggggcagttgcgcgtcggtgcctcccgctgtccttcgtcccacattccgtctccgtcagcgccgccttccccgttccaggccgccctcggctcccttaatcctcagagtgcggcctctccgtcccagacgctagttgccgggatctccagcgccagccgagccccgacggcctgacgcggagcatttcctggccgcctccctctccggcggctcccctcgccccggctcccaccttccgtccaggccgctggctccgaagcagcgtctgtggtcgcacggggcccctcccacaacctccccggaaagcgctggtatgggacgctcggacccagaccacagcccccggccgcggcaggggcgcggggacttgatcccacgtcaccctagggggcagaagtgtcccggagttgggaggggatttgaagcctgtggtcctgacttccaccccgtggctgagggcgaggctgcggggccggggttaggagcagaagtccctgcttccgaaccgtctgggaggagagccgagggatgcccatcacggcagtttagggagagagagggagggactctgccgctttggaggctaggtcataggcagctggcggtgtctcagcgcgggtgaccaatccttgcggttgggaaatgtgtcgtgggcgcccgtgggctcgttttgcctttgagattaggtaggaaattttcccaggacgagtttaccggagcaccttgggagttggtttttggcctggagagctgctttcccccctctaaacctagaactgctttgtttttatttattatttttttcgacatgggatctcacagtgttgcccaggcaggtgtgaaactcctggccttaagtgatcctcccgcctcggcctcccagagtgttgggattataggcgtgagccattgcgcggctttaactgctgttaaagagtgtgttccggccgggtgcggtggctcacgtctgtaatcccagcatttggaaggccaaggcaggcggatcatgacgtcaggagcttgagaccatcctccctaacacggtgaaaccccgtctctactacaaataaaaaaaaaaaagaaaaagaaaatttgcc

SEQ ID NO: 13242 - DNA, 1234 bp, Artificial sequence
  DNA replication origin
tctcttggtagtatgttaattgtattctctctctgaatcttttttccccatttctttggcatacattttcacttgtcttggttgagtaggtgaagagctgtttttcggactctttggaaggatggatgatagtcttggctaatggtaaccagttccagggagctagggtcagcgtgagctggaatgagttcaaattagaaagcactggcactcagtggcaggactataagtgaccgcaaagtgttaaacacatcttgaaagggatagtgacatcattctcagaatctgttgggaatacacatatcctgtagtctcattcctgtttgagtctataaagacattttaaagagtaataccctgagtggttttctggccagcttgcctgctcatttatctttgaggacagcatccctcgtggagctccgcaggccccaggggtgtatggattctacattggaaaatgctgatgctgagagactgggtcttggcggacctcaaggagtctgcttttcctctacttattttccttacttttcctggcagctggcattgctgtttaaatgggttgttctttgctgtttaagttgtttggtagtgatgtgtcaggatgcaggttttctgaatactttttcagctggttacttgagtggtggttagggaggagctgtcttggggctgttctggagctgttgaggtcgggtgtctgtctggatactcacagcctatctgttgaggagaatgcagttctcattgtgctgcctttggtggtgctgtgtgtggctttttagatgtgggtggaggtgagttgggggagttaatgagatcttttttaggtgcttttgataaagtagtctgcactagaggattcattgtgactttttcccttaacctgcacatacttctctgctcacccttgctgtctttctcatgtctttgattttccaatctcctcttggttgaatttacataaaggctctgctatggtttaaatgtgtcccccaaagtttatgtgctggaaactcaatcctcaatgcaacagttgagatgtggggcctaataagacagccctcatgaatgaattaaagttgttattgtggtaatagattagtaacacaagagtgggcttattgtaaaagagagttcagcccctcttgccctcttgctttctcgcactctcttgtccttctgccttctgccatgggaagatgcagcaaaaagaccctcaccagatgca

SEQ ID NO: 13243 - DNA, 3331 bp, Artificial sequence
  DNA replication origin
ccgcctcgggtgggcccgcacaggccatcagcgggaggcaggagctgggcccagaggggccgacgttgaggaagggagccttgggctgggagacgccgtcgggctgggcgggagccgggcctggagaggccgccgcgaggcacgagctgggcctggaggggcccgcgtgaggcaggagccgggctcgtggaggctgccgggaagccggcacgagcatggccggggaaggccgccacgaggcaggaggcaggcctggagagctggaccggaggaggcttcgggtctacggaggccgctgggagctgggcaggagccgagtcacaggaggatgttcagaggcaggagctgggcccgcgggcgcagccacgagcaaggagctgggcccggagaggaggccgggaggcggccactgggctggcagaggccgacttgaggaagtcctgggcctggagaggctgccagaagggcaaaggtgggcctcaggaggccgcggcgaggcacgagccgggcctaaagaggccattgggacgcaggagtcaggcccgcggaggccaccgaaaggcaggagtgtggcctggtgcaggccgtggtgaggcacgagatgagcctaaagatgccatcgggaggcaggagccgggattgtcggggctgccgcgaggcaggcggaaacgtggcccagggaggccaacgtgaggcaagagctgggcctggagaggccgctgtcaggcaggagctgggcctctccatgccaccggggagccaaaggcagggcctgaaaggcctgacttagaggatcctggggtttacaaaggctgccaggagctgggcaggagctgggccgaacgtggcttttgcgaggtaggagctgggccggcaggcacagctgagagggagagttgggcctggagaggccggctggaaacagtactgggcctggagaggatggtgagaggcaagagcttggcccatggaggctgccaacaggcagggcaggagcttcggctgatgtggccacgctgaggcaacagctgggactggggggttccacttttagaaggcagaggccgtgcttctaggggcctatgacaggcaggagctaggcccggcgaggccgacttcaggatactttgggtctgcacaggccatcagcggagggcaggaattgggccctggatgggccaacttgagaaagccttgggccggtcggggtgggcgggagctgggccttgagagaccaccgtcaggcgtgagctgggcctagagaccccagtgtgaggcaggcgccgggctttttgaggccgccgagaggctggcaggaatacagccggggaaggccgccgtgaggcaagagctgggcctgggaaggccgctgcgaggccacaggtgggcctgaagagctgtgctggaggaggtttcgggcctacaaaggccgccaggagctgggcacgaaccgagtcaaaagcggctgtctgcaggcaggggctgggcctggaggtacagccgcgagagtgtgctgggcctggagagtaggccgggagacagccaccaggacaggggaggcttgccaatttgggcctggagaggccgccacgaaggaaaagctgggcctttgaaagaggccattgtgagggacgagccgggcctaaagaggccgtcaggacgcaggagccggacctgcggaagccgccgaaaggcaggagcctggcctgggggaggctgcagtgaggcatgagatgagcctaaagaggccatcaggaggcaggagctgggtctttcggggctgccgcgaggcagggggaaatgtgtcccggggaggccgacgcgagacaagagctgggcccggagaggccgctgtcaggcaggagctgggcctctccaggccgccagggagctgaaggcagggcctggaaggcctgacttagaggagcctggggcctacaaatgctgccatgagctgggcaggagttgggccgaacgtgcctgttgcgaggcaggagctgggccggcagccacagccgggagggagagctgggcctggagaggccggctggaaacagttctggacctggagaggatggcgagaggcaagagctgggcctgtggaggctgccaacaggcaaggcaggagcttggcctgaggtggccatgctgaagcaagagctgggtctgggggggtccactgtgaggaggcagaggccatgcctctaggcgcctacgacaggcaggagctgggcctggcgaggccgacttcaggacgctttgggcccacacgggccatcggcgggaggcaggaacttggcctggaagggccatcttgagaacgccttgagccgcgagacgctgttggggtgggcgggagctgggcctggagacgccactgtgacgcctgagctgggcctagagaggccagtgtgaggcgggagctgggcttgttgaggctaccgcgaggccggctagaaaatggccggggaaggccgctgtgaggcaaaagctgggcctgggaaggccgctgtgaggggagactgggtatggagtgctggactggaagagatttcaggcctacaaaggctgccaggagctgggtaggagccgagtcaaaagaggctctttggaggcaggagctgggcctgtagacacagctgcgagagaggactgggactggagaagaggccgggaggcagcaactgcggtgggggaggccgacttgaggaatttctcggcctggagaggccaccaaaagggaaaagctgggcctaaggtggccgttgtgagaaatgagctgggcctaaagaggccatcaggatgatcaggacgcagagctcggcctctgctgcagaggctgctgaaacgcagcagcttggtttggcgaggccacggtgaagcatgagatgagcctaaagaggtcactggaaggcagtagctggacctgtcaggacatgacgctcaggtggttatgcgagcgatggggaggggctataaatacaaacgaattttcccctcactttgctgctcaccaccagctctgtggccctgtggtggagacccctgctcaggtgcatttgaaaggttccgtcccatgccattcttcagagtcatctttattgccacagtggtgaagcatagcatccgttaactcgcatggcatatgccttggctagcatttcatcacaataaacagtaagtggtagcttcactcattgtgaggacacttcctggaaatcaccagcatcccatgtcccattggcaagaaactcagcactgctccttggataaccaaaccaaggctgaaatcccatgtatatgtgtctatctcctggtactcttcctagca

SEQ ID NO: 13244 - DNA, 1912 bp, Artificial sequence
  DNA replication origin
tttgggactcagaatggcttccttgctcctcagcttgcagacagcctattgtggaaccttgtgatcctgtgagttaataccccttaagaaactcccttatatatatacatctatcctaacagttctgctcctttagagaactgtgactaatacgaagggtgacaatagaggaatttatatgctagacttttatactttacctcaattttcattaccttttgaagaaaaaatgtttcacataataatcacataacaataatttattcaaatttattaaggcaggagctgggcctaaagagggtgctgagaggcaggagctgggcctggagaggtcaactgaaggaaatttttggcctaaggaggctgccaggaagcaggagctgggcaaaaacaggttgttgttaggcaggatttgggctcatagaggcagccaggaggcaggaactggatctttataaaaggggcaacgtaaggcaggagcagggcctgcagagtctaccaggaagcaggaccagggcacaagaggctgacatgaggcagaaagttgcccttgggaggccactgtgaggcaggactcttgaaaggacgcaaagctgggcctgtagtggctgctaaaaggcaggaacgtggtctggaaggccctggtgaggaaagagttgggccaaaagaggccactaggaggcaggagctgggcctcaggaggctgccataaaacaggagctgggactcggaaggcagacatgaagcaaaagctggcctttggaaggctgatgaaagggagaagccgggcctggtgaggttgacttgagaaagtttggggcctggagagatccatgggaggcaggagccaaacttgtagacgctactggaaggcaggaggtgggcctggtgaggtaaacatgaggaagttctaggcctggagagacaagtcggagaaaggagctgggggtaaagaggctgttgtaaggcttgagataggcctgcagaggcggcctggaggcaggagctgggcctggagatgccaaattgaggaagttttaggcctgcagaggccgtgaagagaaaggagctaagcctggagagaccgatgaaaggcagaagctggggctagagaggccattggcaggcaaaagctggggctagagaggccattggcaggcaaaagctcggcctctggaggccgcaaggagacaggagccgggcctggtgaggttgacttaaggatgttttggtcctggagaggccgggcctaaagaggctgttgaaaggatgatgccaggcctgtagaggccaacagaaggcaggagctgggcctgagaagcccaaattaagaaagttttaggcctgtaagttccctaaagaggcaggagctaggcatgcatggagaggctgctgtgaggcagaagctgggccactagaggttgccaagaggcaggagaatggcttgaagatgtagcagtgaaaatgagctgagtctaaagaggtcattgttaggcagaagctgagatcctagaggacactcagaggtacaagttgggcctggagaggtcgactggaaaaaattattgacttaaaaagagcaccaaggcagtagctgggcctggagtggacacaggaaggcagaaggtgggacctgggaggccgccattaaacaggagctgagtttatgaggcaaaagctgggccttaaaaggctgaccagatgcagaagctaggcctggtgacgatgacgtgagaaagttctgggcctgaagggacaatgcaaacgcaagagctgggcctaaataagccattcgaaaaatggagttcggcctcaagaaactgcagaaaagcaaaagctgggcttggagatgctgcaacgaggcaggcacaaaaatggtctagcaactggaaacagctctgggcctggagag

SEQ ID NO: 13245 - DNA, 759 bp, Artificial sequence
  DNA replication origin
gcagttggggcggggtctgcaccctgagaagcggtgaaaaaagccggcggaggagccgctcccgaccagcacgctccccgctcccggccccgcgggcagccccgactgggcccgaccccagcccgccctccagccccggctcaccccgccccggcgggcagctgcgcgccccgggcccagccgggccagctgctcggcggacgcccgcggtcgcgctgggctcactcgtggcggcgcgtggcgggcccgaggccgctaggcaccatcttctccccgcgccgggggcagcgtctggctccgcggggccgacgcgaagaccagacgccaaccgggctcccgccgccgcctcagttcgggctccggcaaccgcggtttccgggtgaaaaaaaaaaaaaaaaccacgccacctccaacgccgccgtgacctccgaccccgggcgtccgacggtggcgcggccgggacaagcttcgtcagaggcaggcggcggagaccacgcttccgggacgggtagcgtgcatgcggacgtgcgtggagtgcgtgatggacgtttatgggtctgtgtgccggtctggtgttgtgcgtgtgcgtgtgtgcgtagtgcgtgtatgtggcttgtagtgtgcatcgtgtacaacggtgtgtgcagtgagtgcatgtatgtgcatctgtgtgcgcgtgtgtggtgtgtgatggtatgggtgtgtgcatgcgtagatgtgtagggagtgcgcacacgtgtgcatgctcatgtgtgtgct

SEQ ID NO: 13246 - DNA, 1423 bp, Artificial sequence
  DNA replication origin
tctggccacgcttgaggagcccttcggcccgccgctgcaccgtgagagcccctctctgggctggccgaggctggagccggctccctctgcttgcagggagaagcgcgggcgggaaccgggctgcgcgcggagctcgcgggccagcgcgagttccgggtgagcgtgggctcggcgggctccgcactcaaagcggccagcaggcgccgctggccccaggcagtgaggggcttagcacctgggccagcagctgcggagggggcgcagggtcccctagtactgccggcccgcccgcgccacgctggaattctcgcggggcctcagccgcctcccggccgggcagggctcgggacctgcagcccgccatgccagagtcccccgcggtgggctcctcggcagcccgagactcctcgacgggcgccgcccactgcgcccggtcccatcgaccgcccaagggctgaggagtgcaggtgagcaccacaggactagcgggcagctcctcccacggccctggcgtgtgatccactaggggaagccagctgggctcctgagtcaggtggggacttggagaacctttatgtctagctaaaggattgtaaatgcaccaatcagtgctctgtgtctagctcggagtttgtggatgcaccaatcagcactctgtatctggctaatctggtagggacttggagaacctttatatctagctaaaggattgtaaataacaccaatcagcactctgtgtctagctcaaggtttgtaaatgcaccagtgttctgtgtctagctaatctagtggggacttggagggccagataagagaataaaagcaggcggctggagccagcagcagcaacctgcttgggtccccttccacactgtggaagttttgttttttcactcgttgcaataaatcttgctgctgctcgctctttgggtgtgcactgcctttatgagctgtaacactcacctagaaggtctgcagcttcactcctgaggtcagcgagaccacgaacccacctagaggaatgaacaactccagacgcgccgccttaagagctgtaacactcacggcgaaggtctgcagtttcactcctgaagccagtgagaccacgaacccaccagaaggaaaaaactctgaccacgtctgaacatcagaaggaacaaactccggacacaccatctttaagaactgtaacactcacctcgagggtgtgcagcttcattcttgaagtcagtaagaccaagaacccaccaattctggacacagtgcaatcatagctcactgcagccttgaactcctcaggtcaagcaatcctcctgccacagcctcctaagtagctgggactacaagtacacaccaccatgtccagctaatttttgtattttttatagagatgaggtctcactatgttgcccaagctggtctc

SEQ ID NO: 13247 - DNA, 1021 bp, Artificial sequence
  DNA replication origin
gaaactcctgagctcaggagtttgagaacaccttggacgacatggtgaaaccccatctctactaaaatacaaaaaaattagctgtgcgtggtggcacgtgcctgtagtcccagctactcaggaggctgaggcagaagagtcacttgaaccccggagccagaggttacagtgagctgagatagtgccatggtactccagcctgggctacagagtgagggaaggggaagggaaagggaaggggaaagggcggaggggggaggggggagggagggagggagggagggaggaaggaaggaaggaaggaaggaaggaaggaaggaaggaaggaaggaaggaaagggaagggagagagggatgctacagttgtcaaggagagaggtattagagtccaaaccacagatggggcagatggagatgggaagaaggagaactcaggagatatgaaggaagtagaagtgataggtcttgatttgtagaacattcaggtgaggacatcgaagagactccactttccttaaataacgacaataataataagtgctacaaaggagttcatggatcaagttaaatgacacatagaaagtgcttagaacagtacgtggctgaattaggctcattgaagatcaggtcctaaaatgagtatgacttagaccaatatcactactatataagcttgcaggtcaaggtcagaaatatagagtcggaatcaacaaatggatgtcagtttaaggcatcaaagtggacctgattgcccaaagcacacatgcacagttaggagattggagagcagggaggcaaaagggggcacccatgctaaggagctgctagagaggaagtggtggaagagtgagaaaaaatagctcagcttgaaccaggtaagaacacgccacagaagccaagaagaaaaagtgtgctgagaaggagaaagtgctcagcgctgcagacaggtaaagtgagatgaacatggacaaaggcctattggatttggccacaaagaagttaaaaggcagaatgttttaag

SEQ ID NO: 13248 - DNA, 1276 bp, Artificial sequence
  DNA replication origin
gtacctatgaatatatgaccttattttgaggtaggattttacagaagtaatcgagataaaatgaagtcatgcagtctggagacaaaaaaataccacatataggctgggtacggtggctcacacctctaatcccagtgcttcgggaggcttaggtgggaggatcacttgagcccagaagttcgtggctgcagtgagctatgatggcgccactgtactctagcatgggcaaatgagcaagaacctatccctactaaaaggaaaggaaaggagaggaggggaggagaagggaggggagggtaaaggaggggaggggaatggaggggaggggaaaggaaggtaggggagggaagaggaagggaagggaggagagggaggggaggggaaaggaatggaggggagggaaggggaagggaagggaggggaggggaggggaagggagggaagtggagggagaagaaaggggaggggagggaagggagagggaagggaaaggaaagggaaggaggagggaaagggagggaaaagaaaagtacaaaaggtaaggggtaagtacaggaaaaagtaaataaattaaggttggagtaccagaaaattctacagagaagtgatggtaattgagttggggctggatgagtcgtgagcaaatgagttgtgagctggagttcacaaggtggaaagatgagaaggcatcccctccctgtgaatagccaagatctgcttggaacaaaggacatgtacatgggttaagtgcccacaatgagcctgaagtggtaggagaggttctggaaaattgtgcagaaatgtcttagccctattattatgaaaagtgcaacctggaagatttctcctgcaaaatgctccaagtaaacaggcactccccaaagaagtttgggcctgtcactcatcatacatgcctcctgaacatccttatccccgctagctgaacatctccattgcatcgtgcaaggatgggttgcagccctggtaacattctgtgtgtttgtagctcaacactgagttctctaataagagactggtttattctgtggggacctattacagacagcattgtagccccctcccaattcatatattgaagccctaacccctcgtgcaactacatttggagacagggccttggaaggaggggattaaggttaaatgaggctgggcatggtggctcatgcctgtaatcccaccactttgggaggccgaggcaggaggatcacttgagatcaggagttcaagacctgcctggccaacatggcaaaacccc

SEQ ID NO: 13249 - DNA, 1072 bp, Artificial sequence
  DNA replication origin
gtttacaatcccttagctagacataaaggttctctaagtccccactagactcaggagcccagctggcttcacccagtggatcccgcacccagcagcaggtggatctgcctgccagtcccacgccttgtgcctgcactcttcagccctttggcggtccatgggaaagtgtgccatggagcagcacatggcgctcatgggggaggctcgccagcacaggaggccacggtggtggtgggtgggggggtggtgggtggcggggtggtgggtggccgggggggtggtgggcggcggggggggtggtgggcggcggggggaggtggtgggcggggggtgggcgggtggagtctcaggcctcaggcatggctggctgcaggtcctgagccctgccctgcggggagccagctaaggcccggtgagaaatggagtgcagcgcgcctgtgggccggcactgctgggggacccggcgcaccctctgcagctgctggcggaggtgctaagcccctccctgccagggctggcggggctggctggtggctccgactgtggggccctctgagcccacgcccacccgaaacttgtgctggcccgcaagcgcaatgcagcagccccggttcccgcccacgcctctccctccacacctcctggcaagctgagggtgctggctccggtctcagccagcccagaagggagcccccacagtgcagcagcaggctgaaggactcctcaagcatggccagaatgggcgccgaggcccaggagacgcggagagcaagcgagggctgtcagcacgctgtcacctctcaatttgttatattggcacagtagaaatacctagtccagataaatagtcaacgatgcctcaaagaaaatgttatgaagcagtgtttatttttgcagatgctgacgagtatattgatgtaatagccattgttactgtagtgccgaagtgagaaaaaatggcattagctccaagataaaacagaggttggggcatgattcagtctttaaaataattagttcaccctagaaaaatactgacagcacaaaattttatttgtataaatacagagtt

SEQ ID NO: 13250 - DNA, 1222 bp, Artificial sequence
  DNA replication origin
aattatctacgtgtctgtctcttccatcagacctagatctcctggagtttacagacactgcttagttgtctctgcatcttcaattttaagtattaatattgtgtggtaatctgattacttttatttttcctttgtcttcaccgccaggagactgtaaactgtatgaaggcaggagctgtgtctggttctctgcttgttctccaagatccagagtagtatatgaaatttactttttttaagtgactgtatgaatgaatcgaaggatgagtagatgggtaggtaaatgcttgggtgactggaagaggattgtaggaaagaagagggagaaggagggaaggataaatggatggatggtgggtagatggataaatggatgggtggttgaaaggaaaggaagaggtgggtaaggggtaaggagggatggatgaatggatagatggtgggtagatgaatgggtgggtgggtggatggatgggtgggtggtgggaagggggaagaagtggagagaggggagggtgggataaatggatagatggtaggtagacggatgagtgagtagatagatgggtagagggatggttaaaagggaagaagttgagatggaggagggatggatggatagatggatgatggatggatgaatggatggatgatgaatggatgaatggatggacaaatggatagataattggtggatggatggatggaaagatggatggatgatggatgactggatggatggatggatgatggatggatgaatagatgaatggatggatgatggatggatagatggatcaatggatgatggatggatagatggattgataaaaggatgcattataacaatgggaccaacaaaagtgaaagaaagaaaacccaccactgatacacaggatgatgtgtaggatgtccagaaagtgtcatggaggaagtgctgcctgagttgagcctttaaggaaaggtgaaacctcagcaggtagaaaaggagcagaaacaggagacgtggatgaggaaagatgcaatgagaggaatgcagagcagctaggagtcctcagcagccagagaatatcacacaggagagatcacagaggggattagtcgggaaatgtaggtgccaggaacttatcacactggggcctgaatgccctgttaaggaagttggaatttatcacacacaaaccaataggagacacctaaggaaaaaccttgcttcttcgca

SEQ ID NO: 13251 - DNA, 927 bp, Artificial sequence
  DNA replication origin
ctcccaggccacttcgcgcgcgcgccccccacatcctcctcgggacacttgtccctggatcctctacccctggccggcccgaggccgccttctcgggaagccccaccagcccccaagggtgttttcccttggctacctgcgctgcgaggagagaagggaattcagagaaggggtacaaggggggcgtccctgggagggggcgcgactggaggagacagaacggggagcgggtgccaaagcgcgggcctttgctccgcctgggcgcagtgggagcaccaactggcagagttggaaacttttcctccacgtggcaccacagtgcgtggacgagcgaccccgcgcccggatgacccctgggattcccgcctcgtcttccagcgggggacctagggacgcacgggcggcttcagatccgggagcgcgaggcctaacagccgggggccgaacttgaacctcggaggcggccgcgggcgaggggcggggccgaaggggccgggaccgccgccccagctcgaggacccgttagaccggcaaaccgcagtccctgccccgcgggcttcctttactttttgggagtggggggcggtttccctgctttttccaccacagcccctcctcccgccgcaatgtggctgatgctcataaaaagttgtattaaagagctgactgcagccgagaatcgatcaacaaaagcgaccagcctctctgggtaaaatagctgtgcgtttttcagggcactggaattgatctatacggatcagaaagaccgacagcccgctctcagcagcctcttggatacgcttcactttctgtccaggcacataaacaccacggcaccaacccttcgtcctccctagtagcccatacttgtggaggaagaaaaggaaaataaactggcatgtattaattacaatgggccaggcaccg

SEQ ID NO: 13252 - DNA, 1013 bp, Artificial sequence
  DNA replication origin
ggctcgcgagcgcggccagcccccagccttttgctttctacacactctacaactggggagggggcgggggaggagggagcccagccgtccacgtgatcccgccggccggggccgcgggggcgggagcgcgcgccgagagaggcgcggggagggcgggtgcgcgggagcgcgcgcactcgagcgagcgagcgaaagcacgaacgagcgagcgagcgagcgagcgagcgggcgggcgcggggttgggctgaggcgggcggcggcggcggcggcggcggtgggctggccgcggagggggaggagcgggagctgcgcgaggcaggcgggcgggcggaggatggggcagtgcccgggctcccgctgcagccgcccggggacacgccgtgcaccctccggctcggggctttctcggcggcggcggcggcagcagcagcagcgttagcggcggcggcgagagcagcgttcccggctgcgcttctccctcaggcggggcggcgagagaagcggcggcggcggcggcggcacaccggtgtctctcccgctggagatttctttctgctttcctcatcgactgactgactcaccccctcccttttttgaggaagggtgacctcttctctgggactggaaaaaatatttttgtgaggaggggggcgggtggcagcgacagggtttgcttcttctcttctttcatctccctctcctcccccctcgaagaccgaaaagcaaaccccacaactgctccagcagcatcctccttcccttcctccgcctcccttctcctccgccgctcgcagtttcgccctctcttccgctaatgattgcattattatgctcccctctctggggggtctcgcccctcttgggtcgctccggagccccggcctcccctggctgcatttcttaaaaatttgggagcctgggagtgagttttctccgaggcgtgtgtgagaggcggcgggggtgttttcctgcgcgaggggcgggtgaagttcattgcccccacttttcccgc

SEQ ID NO: 13253 - DNA, 1048 bp, Artificial sequence
  DNA replication origin
gggctcctcgcctctcgccctcgctccccgtccctcctcccctctctccgccccttcccccttttctttctcctctctttcttcccctctctcccttctttcggccgccgtctcccccgcgccctcctcggggcggagggaagccgtgaagggggagggagggctcggtgtcaatttttttttgtgtggctgcggccgtagcctgtggcgggcaagcggggagaccccggcgcagcagaaccatggatggcccgacgcggggccatggactccgcaaaaagcggcggtcgcggtcgcagcgagaccgggagaggcgctcccggggcgggctgggggccggcgcggccggcggcggcggggctggccggacccgggcgctctcactcgcctcgtcgtcgggctccgacaaggaagacaatgggaagcccccgtcctccgccccgtcccggcccagacccccgcggaggaagcggagagagtccacctcggcagaagaggacatcattgatggatttgccatgaccagctttgtcacttttgaagcgctggaggtaagggggaccccccttcccccgggttccctttatgcacgaccccactcggctgcgcccggctctcctgcctccctcgccgcgctccgggctgtctgtctgtctgtctgtctgtctgtctgtctaggctgaggtcttattgttggtggggggagctgggggcgcgggcagacaggcagcaggagggagtcgcaaagccgtgcctggtctcgtttcctcgctcgcctttcccctgcgccccctccctgcaccccctccacagcagatgggcagaaagaaaggggttcgggcatcacaacaatgcgccccctctccacagagagctctgcccccactccttcctcctctccctccccaatcatggcttcttggctggtggaagtctctttgctgggtttggggcgcctgtggacggttctgtgtgctttctacagagtcatatgttcgtgtgtgtgtgtgtgtgtgtgtgtgtgtgtgtgtctgtgtagtatatacct

SEQ ID NO: 13254 - DNA, 2563 bp, Artificial sequence
  DNA replication origin
caataacacctcttcccacttcttttcactcccagcattctgtctacccctcttcctgctttctttctctccttggcactaatcaccatctgacacatgcattatgtgttttactcattcactcaccattcccttgtactcatagaatgtagggattcttgactgtttggactattgcggctggagtagtgtctgatgtgtagcaggtgctcagtaaacatttgttaatagcagagtgaactcctcctgatggtctctgcgtgtctgagaccctgtcccaggaagctgcaggccctgtgctttctcagactggctgtgtggaagatgccaagtataggattaataacacaggacctcagcgaaaaccgagggtccagaatccctgactcagctatgcccctaatgaacaggtaacgcaaacttctgtccctgcagctttaaaataaggggaatgccaagaaaatctacctttcagaattattaggaaattcaaataacatgtaggaagaaccttggaaaagttaaaggcattctccacatgcatgaggatattattctccaagataaagcagtgctctccattttattttccaaaaaccaagtattctcagttacataacaagaaagtctaaccatggttacacgtaagggaaacagcacaacaatccatcatgacctcttctgtttccaaactttgacttgccctagataaagcaacctgtctgaagcctcaagaagtgattgtgtgtctgtgcgactgtgtacgtgatgtgtgtgagtggggtgtgtgatcgacgctgatgtgacgtgtgcatgtgtgtggggggtgtgtgtgtgtgtgactgtgtacgtggtgtgtgtgagtggggtgtgtgatcgacgctgatgtgacatgtgcatgtgtgtgaggtgtgtgtgtgtgcctgtgtacgtggtgtgtgtgagtggggtgtgtgattgatgctgatgtgacgtgtgcatgtgtggggtgtgtgtgtgtgtctgactgtgtacgtggtgtgtgtgagtgggatgtgtgatcgacgctgatgtgatgtgtgcatgtgtggggtgtgtgtgtgtgtctgactgtgtacgtggtgtgtgtgagtgggatgtgtgatcgacgctgatgtgacgtgtgcatgtgtggggtgtgcgtgtgtgtgactgtgtacgtggtgtgtgtgaggggtgtgtgatcgacgctgatgtgacgtgtgcatgtgtgtggggtgtgtgtgtgtgtgactgtgtacgtggagtgtgtgatcgatgctgatgtgacgtgtgcatgtgtggggtgtgtgtgtgtgtctgactgtgtacgtggtgtgagtggggtgtgtgatcgacgctgatgtgacgtgtgcatgtgtggggtgtgtgcgtgtgtgactgtgtacgtggtgtgagtggggtgtgtgatcgatgctgatgtgacgtgtgcatgtgtggggtgtgtgtgtgtgcctgtgtacgtggtgtgagtggggtgtgtgattgatgctgatgtgacgtgtgcatgtgtggggtgtgtgtgtgtgtctgactgtgtacgtggtgtgtgtgagtggggtgtgtgatcgacgctgatgtgacgtgtgcatgtgtgtggggtgtgtgtgtgtgtgactgtgtacgtggtgtgtgtgatcgatgctgatgtgacatgtgcatgtgtggggtgtgtgtgtgactgtgtacgtggtgtgtgtgagtggggtgtgtgatcgacgctgatgtgacatgtgcatgtgtggggtgtgcgtgtgtgtgactgtgtacgtggtgtgtgtgagtggggtgtgtgatcgacgctgatgtgacgtgtgcatgtgtggggtgtgtgtgtgtgtgtgactgtgtacgtggtgtgtgtgatcgatgctgatgtgacgtgtgcatgtgtggggtgtgtgtgtgtgtgactgtgtacgtggtgtgtgtgagtggggtgtgtgatcgatgctgatgtgacgtgtgcatgtgtggggtgtgtgtctgactgtgtatgtggtgtctgtgagtggggtgtgtgatagatgctgatgtgacgtgtgcatgtgtgtggggggggtgtgtgtgtgtgactgtgtatgtggtatgagtggtgtgtgtgatcgatgctgatgtgacgtgtgcatgtgtggggtgtgtgtgtgtgactgtgtacgtggtgtgtgtgagtgggatgtgtgatcgacgctgatgtgacatgtgcatgtgtggggcgtgtgtgtgtttgtgtacgtggtgtgagtggggtgtgtgatcgatgctgatgtgacgtgtgcatgtgtggggtgtgtgtgtgtgtgactgtgtacgtggtgtgtgtgagtggggtgtgtgatcgatgctgatgtgacgtgtgcatgtgtggggtgtgtgtgtgtgtgactgtgtacgtggtgtgtgtgagtggggtgtgtgatcgatgctgatgtgacgtgtgcatgtgtggggtgtgtgtgtgcgactgtgtacgtggtgtgtgtgagtggggtgtgtgattgatgctgatgtgacgtgtgcatgtgcggggggtgtgtgtctatgt

SEQ ID NO: 13255 - DNA, 1173 bp, Artificial sequence
  DNA replication origin
aacggcggggcgcggggcggcggcgcctctggccggagcttgcgggctggcgggtgagcgcccggggctggctgggctccggcccgcgctcggcttgcgggcgcctgcctctcccgccggttcacagctcaagtgaactccatcggcggccgccgcgggctccctggctggacggtagcaggagggggcggcggctacgcgggggccccttgctccggacttcgctccccgactgcgccgagcgcgcctcctccagacgctcgcagctctcggagcgggacttcctcggcgcgccgagcccgagccgccggtgccaccgcccctcctccgtcccgccccgcgcgccccgcccctcgccgcccctcctctcgtccccggcgccgggtcggcccagcggaggcgcggtccccaggcgcgacatcgacagctgttgctccccccgcggctcgagccctcggctccccccggctgccttccttgcgggcgggcgcggcggaaactgcaccgctcctcgccctccccgcagttgccgcttccaagattgcgccatggcagggaaaggccactaggcccgcagcctggggttgaattgccaccaagccagtcacatctgcaaagagcaggctctctgggcggttgtgagggctcagtggtaaagtcatgtatgtaaaaggcctggcacatagtaggcgctcaatacaaaataatcattgcattgtggaaaatggagacggggatcacggtctgggtctcagacacaaaggtcttcacctaacctccttccccaccacagccgactgaccgcagtgtgctcggtttgatgaataacttaagagcatgaactggccacttagaaatcctctcctcccagctcctcacaccctctgacacgtgcacaccctgcatccacaaaagtggagcctgttgcttcccctggcattcaccgaatgtagggaaagaatgaaagcaatggcaaagcctcgctacatgggcagcagttacgtctatcatcctaacatgtatcgtgtctgtatcccctagagcacagtgcagtgcccccagagggtgtgggggactgaatggccagaaatgaggcactcagcagattcccctgagcaacccactcccaccagaacgcaccccgggcgaggaaaccctctgaaaacatctgga

SEQ ID NO: 13256 - DNA, 801 bp, Artificial sequence
  DNA replication origin
gccgttgcagcgcctcctgggccgcgcgccggcgagatccgcacaaaatccagactcccggagcggctccctccagcaccgcggcgggcccaggaccaggcagcccgcggcgcggctggagaggcgggaccggctgtcggggagccccgggcggccgccggggagaagccgccgcgcgccctcctcctcctcctccctctccctcctccctccctccgcacatggtctcctttgtcctgtcgccgccgccgccgcctcgctcttagctccgcgcgccgcggcggcggctcaggccgctcttctccgcctcgccctcccgccggccggcccgggacgcgccttgttagcccccgccgcgccagcgcggccccgcgcgccgcaggagcggcggggagacagtggcgagcgcgggccgggcgatctcggcgggcgcgctcctcccgccgcccggggcctcggccgcgctggatgtgtgcgcgcggcgccggctctcggtcgccccgaagctgttgcccggttcggatctggttcggcgcctccgctctcggactttggcgaggaaggagcccagagactcttgtggacagagccgggtcgagagttgggcgttttctcttcgtgtgttttggtggtttcccccctggtctttgacgatcgcccttcgggagccctgctaaagaaccaaaccatgaacttggggctgaccggaccgtttaaccctttgcaaccaggtaatgaagcccccggggcgcggctcgcttgcctacctctcgcggtcggaagggaggcggccggatcggg

SEQ ID NO: 13257 - DNA, 1185 bp, Artificial sequence
  DNA replication origin
ggaagcgctctccgcccgggagggggctgatgcccatgaagggggtcatcatgcgagtcctgtccaggctgctgatgctgttcatggggtgaatgcccgtcacccccaccgtcatgggcatcgaggccaggggccccgggtgcacgctggacgaggagttgggaggcggcggctccgaggcccggtgggtctgcggggcctctggaggcaggtcatggtcttccttccgctcctccttcaccttgacctcggagctcttcttggggttctcgtaggccggctcacccttgcgcggctcggcctcccggctcgaggtgctgttgggcctggcactctccaccaccggggtccgcacgtagggagacggcacccgggccagctgcttggcctcttcgcccgcggcgcgcccctcgtggccgtgcccgtccttctcgggcaggtggccctctttcgccttgtgctcgtcggcggccaggtccttgcgggattccgagtggtctctctccctctctttgggtttgtccttctcccgagcctcagtgttcagatgagcccggatctgttcagtggagctgcgggtatgtcccagggcattcaccgggaggacaggtgctggtgaagggtggctggagtgtctcttctcgacgctttccctgggggagagaggggaagacaaggacgcagatgaaatgaaaggggcgagtcggccgggccaggggctgcgggtgaaatggtggtgtgaagaggacaggctgggggctgcttcccatggtcgccaaggcagcagccgtgccctggacagggcagagccagccacccttatcctacttacctagattttagaggaagcttaatgggggagatggaccagggatgagggtgagggggagtctgctgggagcaagaatctctctgcatgttaagagcctcaaccaagagcacagaagaagagcttccagaaagccaagatggctgcatgtggtcaataaggcaatgatgtggcaatccagcccgactgtctggactcccgggatcatctagtgtaaagaatcacgttttaagagcccaacgcccagtatcacttttcttccaactttgcaacactgaaccagtggaagaaagggttcaacatcagtgtcacagaagtctcttgctccttacaaggacaagtgaccagtttcagag

SEQ ID NO: 13258 - DNA, 1324 bp, Artificial sequence
  DNA replication origin
gagggggagagaggaaacggggagggggagagaggaaacggggagggggagagaggaaacgggggggagggagagggagggggagggagggggagggagggggagggagggggagggagggggagggagggggagggagggggaggggaggagacggggagggagggagcacgagagagagagacagacagacagagagagagggagagaaatgggggagagagggagggggagagagagaaaataagataaagacttaaggaagagacccttccttaagaaggctgtggccaggtgcggtggctcacgcctgtaatcccagcactttgggaggccgaggcgggtggatcacctgaggtcaggagtctctactaaaaaaaatacaaaattagctgggtgtggtggtgcatgcctgtaatcccagctacttgggaggctgaggcaggagaattgcttgaacctgcggggcggaggttgccgtgagccgagattgcgtcattgcactccagcctgggcaacaagagcgaaactccgtctcaaaaaaaaaaacaaaacggctgtacctccctaaaatcttaccttcattttactaaaggaactacacctgttattcctatagctaatgctaaaatcaaggtgtccgttataaaagatctaaaacaaaccctagcaattgagacaggataccgagatacaaatgcctggctggaacggattaaatatttcgtctgcaccctaagcaaaagcttgtgcacacggtagaccagaggcccagatcgtctcctctccacttagtctccccgccgaccgggcatgagctgtatgtatggtaactctttttcaagacccccacagcctgggaagacaaatcgtgccaagctcttcctctgctgttcccagttcaacaccctgcgggtcaggccccaagggccatccagcctccgccttccaatgccaaagtttacctcgtgtttctcacaacggggaaaacttagcgttcctcggagacttcagtctggcaataaaagatttagacagaaacagaaagattggagagagagagagagagaggaagagaatgagagactggaagaaacagattaaagagagatacagaaggtgaatctggggagagagatagtgtaaaaggaagagagaggaagagacgagacagacaaaaagcgcgagcaagaaggtgagagaaattaagaactatgaaagacagcagctaggagacaaaggaggcagaagactgcctgggtgccacagcacccacaccgtcctcttgccccctgtcattgcgaccccagagctggtccttgat

SEQ ID NO: 13259 - DNA, 1068 bp, Artificial sequence
  DNA replication origin
cccaggctggagtgcagtggcacaatctcagctcactgcagcctctacttccaggtacaagcgattctcatgcctcagcctcccgagtatctgggattacaggtgcccgccaccacacctggctaatttttgtttttttagtagagatggggttttaccatgttgcccaggctggtctcgaacttctggcctccagtgatctgcctacctaggctcccaaagtgctgagattacaggcgtgagtcaccttgcctggccctttttttttttttttttttttttttgagacagcgtctcactctgtcacccaggctggagtacaatggtgcagacatagctccctgtaaccttcaattcctgggctcaagtgatcctctcaccttgacctccaaaagtgatacatgttttttaatccaatttggtgtcagacagctctgggctcccaacgacttttgacacttgccagctttgtgtcctctatataatctctctcaaaatctgaaacacgctaagactcttgtctgtgaaaatgaatgtgctaattgaggctgcctctgactcccggggattttatatgtggaagtgctttggaaaccagactgccctggcagctgagagattttagaagtcattggtatcacttgactacatttgctgttcattaaccatacttttcatctttcaaagcccagaaaatagccttcagatgtgagaacactggtgggaaatgaggtagtacaaattaaacacataaaatcatttgaggttgagttttcattgttttgggcaacatttcttgctatatcatctcaaaacactccgcaggtgtgggtcaaaactttattttccagctgtaaaaagggagatttagatatctaaacattattattattattgtagaaaaaaaccaagacatccaatcccaatcagggttcttttatgggaagacaaacctgggagacctgggactgtatcatttctgaggtttatattggggttaaggtgcataaaatcggctgccctcggtcacccttgaaggggacagttgagattccacaatgcattcac

SEQ ID NO: 13260 - DNA, 1686 bp, Artificial sequence
  DNA replication origin
atcctctggaaacaaatgctgtgtcctcacatggggagggatgcaagggcaaaaaggaatgaacggctcccttctacctctcttataagatagtaaatcccatttgtgaaggtggagccctcatgctgaatcatctcctaaaggccccacctcttaatactatcacactgggcttaggttccaaagtatgaattttggggggacacatacattcaaaccacaacaactaccaaagtgccagctgtggggagaggtgaacacagggatgagaagctggaggtgactctggggtgacagacagaggctgagagagagaatagagagagaggggagagaaagagaggaggaggaggaggaggagagaagtgggggaagggaggaaaggagagagaaagagggaggagaaagaaagggggatggaaggagagaaggagggagagaagaagggagtgaggaaaagagagggagggaaggagaaagagaagaaggtagagggaaggagggggtggggaagagagagagaaggagggtggagggaggaagagagggaatgagagggagggtggagggacagattgggaaaggaaaagggagggatagagagatggggaaaggagagagaaggaggaggaaagagaaaaagagagaggaaggggagggagagagagaaagagagaggaaggggaaggaagggaaagagagaaggagggagagagaagggggtgagggagacagggagaagaagggagggagagacaggaaaagggagaatgagagggggtgagggaaggagagaaggagagaaagagagggaggaggaaaagagagagagaggaaaaggagggaaagagagggagaaagagggaggaggaaaagagagagagggagaggaaaaggagggaaagagagggagaaagagggaggaggaaaagagagagagggagaggaaaaggaggggaagagagggagaaagaaagagagaaggaggaggatagagatagagagaggaagggggagggggaagagatgaagagtggggagaagggagaaagggagggaggagagagggagggagagagagaaaaaggatcctcagcaaggtggggacacagaggctccttgggcacagttctctgcatagccagtgtcttaatcccttttgtgctgctataacaataccacaagctaggtaatttataaaaaaatgaaagtttatttggatcatggttctggaggttgggaagtccaagactgaggggctgcacctggtgagggatttcttgctacatcataacatggaggaaagcatccacagtgaaagagaatgcacgtgcaagatggaaggctacactggcttttataacaaatcccctcttgtgataacaagcccactcccatgataacaacattaacccatttatgaaggctctgcctcttaacagtctcacctcttgatactgttgtgttggggattaagttcctaacatacgaactttggaggacaggttcaaaccatagcagccagagagccagtaaggggagtggtgacattcaaattagaggacagggtgtctgtcctccttcccatgcctcccctgacagcaggcagcaagagcaatggagcagagagaatggtgggggacaagacacatagttgctagatccggagctggagatgggaagcac

SEQ ID NO: 13261 - DNA, 971 bp, Artificial sequence
  DNA replication origin
tgccctgaaggccccgaaggctctcggcgcggtttgggggcttggaacgtgtccgggagccggcggcgctgtgagcgctggtgagtttgccggcggggtggggtggactccgcgcggggggcggagaggacgtagcgctcggcccggcgcccgccccctagtgctgcccccactttgagagtaattgagacttgagcgtgactgcggagcctggaggatgcgggctccccgagcgggcttcccctctgcccggcgcgatggagcgggtcggtgagcggaacaaaggcgcctgcccgggggagcgggtcttccgctgaagagcgcgggtggcgcgccgcgacggccgcctgcgggccaaggtgggaggctgtgcggccccaggcgcggcgcgctccgccgtgggcgggcggcgatccctgagtccggcacctgtgcgccgctccctctgtgcctcccgggcagccccgcctgccggcctcggagtccgcggcgccggcggctagaggtccagaggcgaaccacttgctggtgcagaagagaaaccctcaaatccctggcctttcgcggagacgcctggacggggccgtgcgccgtggactgagcaggcgtctcggggagcacttctgcagagcgaggacttccatgtgagcgattccgttctccccaccaccaatccgacctcccagccgtctccgccgcccgagcatccttgaggtgggacgagcaggggcttggatccctgccggccgtctggtgtgtgaggcttgcacggcccctggctgccccgcgcctcgccggagcccgagggggcgcaggtccggggcgagggccggccgggctgtttgatggcttcactgagaagagtcaaagtgctgttggtgttgaacttgatcgcggtagccggcttcgtgctcttcctggccaagtgccggcccatcgcggtgcgcagcggagacgccttccacgagatc

SEQ ID NO: 13262 - DNA, 1511 bp, Artificial sequence
  DNA replication origin
gcttggatccctgccggccgtctggtgtgtgaggcttgcacggcccctggctgccccgcgcctcgccggagcccgagggggcgcaggtccggggcgagggccggccgggctgtttgatggcttcactgagaagagtcaaagtgctgttggtgttgaacttgatcgcggtagccggcttcgtgctcttcctggccaagtgccggcccatcgcggtgcgcagcggagacgccttccacgagatccggccgcgcgccgaggtggccaacctcagcgcgcacagcgccagccccatccaggatgcggtcctgaagcgcctgtcgctgctggaggacatcgtgtaccggcagctgaatggtaaggacgcacgccggcgcctccggggctcgacgcgggcgggccgggcacagggtgagccccagggtccttgcgcgctgcgccctgtgcctgggagccggcacaccctggctcccgcgcgctccttcttacccttcctgccccgtttcgggcagatggccggggctgctggaaagaacaacttgcctgattcttttctgtgccccacctgcaaatttggttttatcctggaaacatgtcagtacagttggctcccggtccccgcgtgcggactggaaatcattccctggcgactccagcccgagcgcagaaactagtggaggggccacatgggactggaggcgcgcgggcagacgtgtaggaggaaatagtcttagagcccagcgtttggtggggtaccagtagggaacctgggagattggagggcttggatgtctgcagacaaagtcaaggccccaggtcgcggagctaatgcgcttaggtagtatatgggaggaatatgtcatctgtctatgaggcgagctgctcagctaagaatgaggactcctcccttcctgccgcctgtgtttctccttgggggctgcggaggggcgattgttaaagctcagggtgggcctgcgaagtttccagaatgtagcacagagagatgtggcatcccattagtgacagttgtctgaatctgtcccatctaaaatgttgtgctcagtacttcaggagaagagggagactttttatgtgctcttgtcacacctgggccaggtcattggacactagctgtccccaacgtcagagtgagtgttacctacctgagtacaggcaggtttccaggatgcgtggggttatccaaggcagatacgtacttaggtacagactacctcctccctttctgagcttgtaactcatgttctcaaacgaactgcagataatcacgaagatcgtgataataataactgatggaattcttgctctgtgccagatgcgtgcaaagacattacaagtacattatctcactgtatgttcacatctgtccagcgaggctccacccatccacagaggggaaatgagaagactaagcgaggggaggttaactaagttgccctgtgttaaataagatataactgcgccccaaacctctgtaatcggaataataatagagt

SEQ ID NO: 13263 - DNA, 1651 bp, Artificial sequence
  DNA replication origin
ctcactgcagccttgaactcctgggctcaagtgatcctcttgcctcagtctccctagtagctgggactgtaagtgttcagcaccactcccagctaatttttaaatttattgcagagacagggtgttactttgttgcccaggctggtttcaaactcctggcctgaagcaatcctcccacctcagtctcccgaattgctgagattacaggacacttctgagcatgctttcctaacctcccccaacagtggtgaaatattccaacgagattacagaggagaggggcctcttctccctcttcctaaagagggcttagtaggagacctgactcagtaaatctgaaagaataaataggtgtttgtcatttgcaaagagagataagggaagtagcaacatagtatatagtcctgaaagtgaaggcctgctccaaatacagccatcagctctgtagggtgggttaaggaggggcagagcactgaggttcctagagggtggaggtgaccgaggagcttagaagaggatggacatggctgaggagcttagaagagggtggacatggccgaggtgcttagaagaaggtgggcatggatgagaggcttagaagagggtagacttgactgaggtgcttagaaaggggtgtggccgatgtgggtagaggagggtgggcatggctgagggggtggacatggccaaggtgcttagaagagggtgggcatggctgaggtgggtagaagaggggtgggtgtggctgaagttggtagaagagggtgggcgtggctgaggtgggtagaagagggtgggcgtggctgaggtgcttagaagagggtgggcgtggctgagatgagtagaagacccagggtgggcatggtggaggtgggcagaagaggttgggcgtggctgaggtgggtagaagagggtgggtgtggccgaggtgcttagaagatggtaggcatggggctgaggtgcttagaagaaggtgtacatggcccagttctggaagcgcctgggacatcaaagaggggatggatgtgaccttgccggatgcccatgggctctggcctggtgtggaatagcaacctgcttgttgaatatatgagtgaatgggagccagtgagaaatttgaagctgaagcaaagcgtgattagacgtgatgtctttgacacaccactctggatgctggaggtaccatcaacaagaagggaaggagtcaaggatgaatttttgagattgaacgctagatgatggcattgcaagctttcgaatgcgttcgggtagaaggagcagaatgaccaaatattttgtttttcattgaatgtgtgggcagtcctggcccattactccagaggtaaaatgtgttccagcatgtttttccattgagataacttccttttccattatggtgacagttctgaaagaaagggtaagggcggggattgtggggggacccaggggagagaggccgaccaatggttctttcatgtgctgttttatcaggcatattgtcgtgaaaccaattttcatgttgaaatggcttttcttcccgtaaacaaattgctttttatgttgttgaatgggatggcaggcagcctctttgaagattagctaactcagttctcagccggtgctaaaatacgcaccttcagagcccagctaa

SEQ ID NO: 13264 - DNA, 1505 bp, Artificial sequence
  DNA replication origin
ttgaagtatcccataggtacagaaaagtgtaccaaggatattgtacagctcagacaattttcaccaagtgggataaccagcccctaggtcaagaaacagaacctaagccttgaaaacatgcttgcttgagagagaatccagagacaaagggccatgtaggattccatttctctgaaatgccccgaatagacaagtctatagagacagctggtagagtaatggatgcttagggctggggaataaagagcccgatagccaaagtgtagagagggttttttgttttctttttttctgaggtgatgaaaatgttctaatattgactgcagtgatacacatgtctgtgaatatactaaaaaccattgattgtttgcaaagagaaagagagggagagagggaggaacggagggcggagagagggagggaaggaagaaagggaagggaaaaaagcaaggaagcagggaaggaagggagaagggaagggaggaagaaaggatgtaaggaaggaaggagggaaggagggaaggaaagagggaaggagggaaggaaagagggaaggaaagagggaaggagggaaggagggaaggaaagagggaaggagggaaggaaagagggaaggaaagagggaaggagggaaggagggaaggaaagagggaaggagggaaggaaagagggaaggagggaaggaaagagggaaggagggaaggaaagagggaaggaaagagggaaggagggaaggaaggagggaaggagggaaggaaagagggaaggagggaaggaagaagtcaagggagaaggggggaaggaatgaaagagggagagaaggaaggagtaaaaaagagagaaatgacacaagaaaggagggaagggaaggagagaggacaggatggagggaaggagaaaaaggagagagagaaggaaggagggaaggaaggaaagagggaaggagggaaggaaggaaggaagtaggaaaaggaaggaaagggagggagggaggaagaaagaaagaaacagaacatgactggaatttctgagtcctggaaatggtgatgtgtgatgcctttcaaatccccagccttcctggagagcagccactacctttacttctaacactgtgtattcacttctcctgcttttgcattttaggtaaaaggaacaaaatggtctattgtgtctggcctcttagctcaacattacatttgtgacattcctgtgtatcgagcatggcttctggcttttttaaaaatagttgttttcccattacaaattaatatacatccattaaaaaaaagtccctggaaaatacggaaaagcaagaagaaggaataaaagtctccaggcattctgccacccaggtggaaccactgttgacatattgatgtatttttttactctttttttctctgcctatgaagtgttaaactgttgttgtagcaggcatatccatgtggttttcaaaatatcatccatgcaactgcagtcttccatggacatgcctgagtggctgt

SEQ ID NO: 13265 - DNA, 1629 bp, Artificial sequence
  DNA replication origin
gggctgcggagccccggcccagcaagaggtgagtgccgccgccggctccctagcttacccgcgcgcgcgctctcttttcttcttccctcggtcctcgcttctctctagggtgtccaaacccccgggctgtcgcgggccctggtgctcagagtgggcagatggttggcagacagcgcctcccgtacctgttggctccgacactggggcacccaccccgcgggctgggggccgcgccggccaccttgccttccgtggagctggctcctggccgcctgcctggggacgtggggctagggaagggccgcggcggactcggctgtcccggcaccgtgcgggctggaggctgggagccgctcttctagcccccaggcgccagtggccaccaggctgcgcgcccccgcccgcaggcgcccgggcgatggggagggagggcaggggactcggagccgcaccgcagcccaggtgggagcgcccggcggcaaccaggtctcttcgcgaagccggagtcatggcgatcgggggaggcgggaggcagggttctctccacctccggcccctagcgctgactgcttgcctttctgggcgcacgctcctcgccgccacccaccccgagtccgggggcgccagggtgcaaggggtaaccagagaggcctctgcagtccggctgggacctagtctctgagctccaagcagctggatgggtctggcgcccaggtgggggtgggatccgtcttccccggacagtctgggtttactcgggttcctagtttctccggactagcgcagcgcggagtgaacttcccgagacttggtccgagggcgcctaggcagcagcaggtagttctgggccacccttggggcgagggcgagcgggggacgccccatccagacgggctgggggtacagagcgtgcaccgaggggatcggcttgcgtcttagccttgggccacgtgcgcccgggccaccagcccaccatcgtttcccactgctcttttttcttggacgaggcttgtgtgaggaaggcgcctttcttccatttgggtcgaagcccgtagctcctgggtgaagcggtgcctgcagttccctgagtgccaagactggggcgccagccatccccaggccctgagccggttttctgcaaaaaaggagacttttttgggctcagggaatagcagcttagcgccggctgtgtgtggctgggaagtctgtttagtggtgataataactacattctagagtgacccacagtagcctctgcgacagagttgggatgaccttctcagaaagaatgggtagatttctgcgctgtgtgtgttgagacacacgcaacattcgtgcacatagaactcatgagctcctagcattttcaggttctgcttctttaactgatgacttttgctcaaaaagggaaattatttttcaattcgggcatcagagctttggaaaggaatttaaagccatttggtgtgaaattgtcttgaggctagaacaggacgtgtttttcatagaagccccattccagctctccttcttggcttgttcgtggttttatttcattttttgtggggtgggaggaggtgttggaagaagaatgtggagttttgatttttatctgctacctgtactcat

SEQ ID NO: 13266 - DNA, 1666 bp, Artificial sequence
  DNA replication origin
tggttaccagaggttgggaagggtgaggggggctgggtggggggtgaggaggttgggtaggtagggatggttaataggttaaaaaaaaaaaaacaagttagaatgaataagacctattatttgatagcacaacacagtgactatagtcaataactcatattttacaataacttagagtgtaattggactgtttgtaactcaaaggatgaatgtttgagggaatgctacccggttctccatgatgagcttatttcacattgcatgcctgtaacaaaacatctcatgtaccccataaatatgtacacctaccatgtacctataaaaataacaaaaacatatttaaaaaagattactagggaagtagggtctatacaagatagtaataatacaggttaggaaatgctaaatgctaaaggcgtggcacccacaatgagtgcctcagggactctgaaaccacacccaggtgagacacacacacacacacacacacacacacacacacacacacacacacacacacacacactgtgctgctggctgacaaaaacgcccaaacttccctggcagttgaaccaaacagtggagaggtgattgctgagttgtttgcatgagaggcttagagcagcattgcctgcttttgttctgattggtgtgaaatttttcacatgtatcttttctctggttctgggaattgaagacatctgagctggtgagcagtctttgccaccaagaggggacaagaaactggggacccgggagaggagggtgctgtaaggaaggactagcctgctttggccaggtttgttgctctttctttattggcacaaccttgggggcagcagaaaggaactggcaagcgtctaatctgtctacgggacagtctgagacccaccttgctgctttctttctttttcttgccaagacaaaccttggttgcactgtgtattccgtcagttcttgggaggcagacaggtggggactgggaaaggtgactgctgactccaagcacatgcgttgcccttgagacctggggcaggggtctgtctgggcgtagactcagtagaggtcagcgcatgggcaggttgcagacagtctgcgaatttgtagctcacacctctgcccaagcgccctctccttcccatcggatccattctatgaccttggaagaagtgggggccacaccacatgttctcaggccctggaggagtgggatcgctggtgggtgggcgatgccctgcggcagccgtgcctccctggacgtctccaggggcggtcacgcggaatgctggtccccgcagtttcggccattggcccctccacttcggcgccccgccttccccctgggctcaggtgtaatcgtggatctagggtgtgggcacctgggatgaagtagtgaaggcggcgggcgctagggtgagttgtcctgtgctgaggagcagcagtttgccggagttaacgtgggcagcctctttgggaagggaaggaaggagcaccgtctgccaagcgcctgctcgccccccgcgtgtctgcctgtgtgtgccgtgcatgtgcatgcgtgtgtgtgtgtgtgtgtgcgcgcgagtgtgagtgcgcgcgcgccgaggcgttcctcaggttgcgctgcttggaaaccgagggagccattggagaggcggaggttgggggg

SEQ ID NO: 13267 - DNA, 946 bp, Artificial sequence
  DNA replication origin
cttcaggtcaccgcttgctctagttcccaggctttggcctctagtggatgagaatcaccgagtctgcggggctggacgctgaccgcccgggccagcacctaggcgggcgggagctgtgcggcccagggttcgcgcgggccgggtagaggctcgagccgggacccccgagcgtgaaccccggagccagcggcgctggggccagaggggccaggcgggaggtggtggcggaggcgaaggggcgacgggacctgggcctggcccgtgtgtgtcctcggcggcctggcgccggccgtcgctgtacggtgagccccagggaggcggatctgggccccgagaaggacacccgcctggatttgccccgtaggcccggcccgggcccctcgggagcagaacagccttggtgaggtggacgggaggggacttcgcgagcagacgcgcgcgccagcgacagcagcccgccccggcctctcgggagccgtggggcagaggctgcagagccccaggagggtaagtcttgggttttcgggcccggagcgagaagggcctgagtgaagtcaccgtgtgttggggaccttagagtgtggggcagagggagcgtcccgattgcttgccggagagacatgtgttgggtttgagggcaaggtccggctgcaccgaacaggcgctgcatgggaagatctgggaggacaaggcttacggaagcgtggagggtgtcaccaccctcagctgcggacgtcatctccactccccgctaacccctaacagtccttcctcctcctctctgtgctccagatttcgaccgcctctaaacgtccgtcagcacttctattctctcacttaagtgtctgctgatcacccccttatatctgccctgggagaatcgtagtaatgcaggaacagtctgcagggattctctgctgctgcctcagttgctaggggaagagac

SEQ ID NO: 13268 - DNA, 1135 bp, Artificial sequence
  DNA replication origin
tccgttggctgtcgacttggccagaggcgaagcgaacagtgttcgccgatgacgcgccttccgaacgaaggaggacaaggggcgccgatgacgcgccttccgaacgaaggaggacaaggggcgcgaacctcggggctcgcggctcagtccccaccaggccgcggtagcccccacggtcagccaggccagtgcagccgcagccggcacgaggtacagtaagaggccaaccagcgacaggcccaggagcaccgccctggccggcccgccgcagccccggccccggccgtccctgacactcgctatgggccgccgccgctcgcctgctccagccgccgcagccgccggagacatcgcggctccgcgccgcggaggagacttaaatatcccagcgtgcaccgcgccgcgcgtcgcgtcatcgcgcgccctctacgtcatgcgcgcgcgactccgggagacgctaccgcccggcagcgcccgagacccaactggtttggaaaatgccgcctgcctttaacgcctgtttctgactcttgaggttttccgcgtggctcccagcgccacatccatccggaggcgatcccgtggaaggatcgcgtccaagataaaagggcccgagacctatgcttacgtaattcctaatccgtgatcttttatgggggctgaattcccctccagcacagcctgttaccaggtacttttcacaaacgctactagcggttgtgagtccctcccccctccatttctatgttacaaattgaaaacgtgggacgattacctaccaaatttcacatcatggcccagatatcgggtggattttgtggctctgtgatcgacttatacctatgctaaagttaacggtctgagaaggtagattagtggttgcctagggctagggagtgggtttgggggtggggaatagaaagtgactggtcatggttataggcttttttgtagcaccataaagatagtttaaaattagattgtggtggtgattgcaccaccctatgatttgcatggtatgtgaattatatcttaataaagctgtttaaaaagtctggtagtctgccaatacactttggtgtagttcagtttcctcagccattcattcattgatttattcattccattgtttatg

SEQ ID NO: 13269 - DNA, 1702 bp, Artificial sequence
  DNA replication origin
cacattgatcccaaagctcccactgccagcgggggctgccgaacccccaaacgtgaagggtgatggtgttgtgctgccaaacaccgagctgctgctcccgctgctggcggtctgggtggtggctccaaagccggagctggtggctgcaccgaagaagacagcagtggagccgccaaaggcgggctgtgagctggcgggagcgccgaaggccgaagccgtggctttcaacccaaacgccgagtgcgtggcaccgccaaagataggatggatgggcgtaggcacgtacgcaggcacgaccttgatcatggacggaggtgcaggtgtgggtgcagcagccggggctgcagagtttccaaaagtgaaagagctgccaaagctgggggcaagggccggcttggcggcccccggtggctgcccctcagcggccccaaatgcgggctgggggttggctcccggatatgatgggagcggggacttggcgcttgagccaaagggaatgttgaacgtgggggtgctcgtgttactgaacgtcagagtgggctggctgctggtggccggggcggaggtggcgagggtgctgccaaaaccactaaagtcggcagcgctgctgctggtggccgttggcacggcagtgtgcagggactggctgaaggtggtgactgtggtggttgtgggcaaggcaggaggtttgccaaactggaatatggagcccatggccggggtgaagctggcagcagaggcctggggcgccccgaagaggaaaggctgtgaggcggcagtggcggtgctggtcgtggtactcacactgctgctgctcacactgtttatgccaaagccaaacgcaggcttcgaagcagagtctgtggatggactggcagaggtgatgggagccacagcagaggtggcgctggccaggccagtgaagagcggggcagttgtggtgggagcagtggcgggagtagttgtctgcttgaagaagggagcaggcaagggcacagatgcaggtggccccatgctgctaaagacaggctggaaggtcggggctgtggtgctggtggtcgtggggagggaggagctggagggcgctgtggctgtgactgaagggccaggcggtgtggggccttccttctcactcttgggtggagccgtgaaaatgggcttgaacatgggaggtgctgaagatgcagcaggggcggcagggctggaaggtgaggtgttctgtgttccaaacaggaagctttgcttgggggcgggggacggggcagatgtggcttggggtttggtagccgtctctgcctgaagggttggaggtgccttggtgtcagtggctggtaccatggatggagcagggatcagccccagcaaagtggtcgggggtttggagtcaaaggaggggctggggagcagccctggcggccctgactgtgataaacccagcgggggtaggaggctgggtgtctttggaggtgagagggcctcagtggttgctgctccagcagattctggaagaagaatagaaaatgtgaaattggaataaacacttcaaagatgatggtattcagtatttcagtgtcctccccacgcctaccacagagcctgggatccaagagtcagtcaataaactcagctaagtctacactacaggcctgtacagtaaatcaaggaagtgttatttctacctcacagatcatcagacagaagg

SEQ ID NO: 13270 - DNA, 704 bp, Artificial sequence
  DNA replication origin
gtttggtatgttgaagagcagaacaaagacaagcatggcaggagggcaggagctaaagcagtggtgtggaaggaggccaagaggcaaggattgtttgtggccagggttgggtgtttgggtcttaagtgttcaggaaaaccattgcagaatcaggcagaaggatgcagtgatggttcctcccatgtggaagatgaatgtagatcccatggcttctgtttgcttcgtgaagtagagaaaatctgggagagagagggtcaggataaagtgtataaaaaaaggggtcttttgaaatagtcattttggacagtgggggaaaggaacatcatattaaaaagtgtgatcagtttccaggcagtttgtgggctggaaaattgtgattgtgaagttaaagtgaggccagttagcatggcatgtgtttcccagcgacactgtgggtgtagacctaaggtcagcggacagctggtgccacccggccatggagaccccagcaagcacagcaggaggggcagcgggtcagtgccccgatgcagctcagggggtgcaggagtggagagcgggtgaagtcagctgcaggaggggtggtgcctacaggagattcgggagccggagcagttgtggtgacagtgtggctgcaggagtggtggcaggggtcggggagaggaggtcatgggggtggcagggttgaggggctgagaggaccatca

SEQ ID NO: 13271 - DNA, 1032 bp, Artificial sequence
  DNA replication origin
acctgtggtcccagctactcggaaggctgaggggggaggatcacttgagcccaggagttcgaagctgcagtgagctgtgatgtggccactgcacttcagcctgggcgacagatctagaccccattctaaaaaaaaacaaaaaccccaaacccacacccacgaaagggtaatgttggcaagaagttgggtgcagaggtctactggtgaacatctgtggggaaagggtctaaggctgggaagcgagacgccaggttccgatcctgttgtgtagttaatttctggtgtggtcttgagtaaggtaccccacctttatctgtaaccatctagtcaggtgatctctttagccattccagtgcccgggctctattagagttagttctaaggcattcatacttcttgcttagggcgtttctgtctttgatccctcatccccaggtgctagtgtatgagttgttgggaaagggctttcgagggggtgggggccaatggaaggctctgttgggacggcaccaggcgaggtgttgagttggctcggctcaaggttcttcggggtgtgagctggcatgaggacctgttggaagtgggatccaggcctggtccaggtgagctggaaggagttgaggggcgggggaggtggggaactttgctcctgcctactcactgctcattgcgtcctacctagcctcccagctgcctcgatttgtgcgtgtgaacactctcaagacctgctccgtttatgtagttatttcaagagacaaggtttctcctatcagggtcgggcttccaggtgagagcttagagccctggctgtcctcatctagggaggtgtctggggtactgggaagagaagtggttggatagttgtgactttgctctctgggctttgttcctacctttccagcagtttctccatctccaaggtttgttttcctcgcatcccttaaacatcgaactcctaggagccccatcctacattcttccggagctctccgttttttctctaactttagctcctgcctcccacctggtgat

SEQ ID NO: 13272 - DNA, 905 bp, Artificial sequence
  DNA replication origin
ccccatgtcctagctgccctccctgtggcgtgagccttcggcctggtgcgccccgctgcccttcctggctgtgactctggtggggttccgaaggcccctttatgcccggcagacccctaccgacggcggcattccattctggggccacgaggaggcactcatcgtttcgttccaaccgccgccaacggccctggccctcgcgagctctggaactacagaggtcgcacggtgagttgccaggtgtggcccgtaatcggagcgcacaaaacatgatgggacacgtaacgggaccacacagggcacattgggcacttgcaggggcgcgaggtggcggcacgtaatgggagcgcgctgagcatgatggggcatgtgcgggagcgccaggcggggcatgtaaccagagcgtgcggggcatgatggggcacggacatggggggttaggtggggcacgtaattggagctcgcggggcaggatggggcatctaactggagcgacagagagcacgatggggcacttacaggggccggaggctgggtacgtaatgagagcgagcgggaaatgatggggcacctaacgagcacgcagagcatgatggggcacgggtgcgaggtggggcgcacagtgggagcgcgtggggcatgatgggacacatggcgaggccgtcagggcacaggggaagcacttttggaacacgtgagtgacagggctgccgcccttgaaggagccctcggagtggctgcgtggtggggcacgtggggcaggttcaggaaaaaggatgcagcatgtgattgcagggcaacctggtgaggacacgagagccacctgccaccagcagggttcagggctcccagctgtgggttacttccaccttctttcactttccctcttccattgtattctagag

SEQ ID NO: 13273 - DNA, 1761 bp, Artificial sequence
  DNA replication origin
gcctcaggtttcgcccttcccttcccttcccggggacaatcccgaccttcaccgtcaaggccttttgcaaacacacacgcacgcacatgtatttttggaagaaggggaaaaattccaagagaacctccgctgggttaaaaatgaagattatattaagagtgaaaggcaagcggggcggctggggcgcagacagaggcccctttcatgcgcccggccgcgagccgcgggccgctgccaacacaaacgcgggcggaaccgaacccgcggagcgccggccgcgctgccaggccccatccagcccgccccggctggcgctgctccgcgtttccgctctgctgacgtgcaggaatcgcggggcggccgggtgggcggcggggacccctgtgcgccccgagcccccgggtgggggccgcaccactgcccgtctcccctccctctgctcctgctccgtccgttttcttccaggccctggcggatcacgggtgcccaggggctcggaggccgcctcctctgggaagcctgcccaggttccgctggactcccacaggcaatacccctgggccttcctcgcggcccctgttggccccaattcccccaccccctgcaaggtctgtgcctctcctgcagccccgccaccaactagggcgagaggagctcgcccccacccaaacgtattggttcgatgaaggaagggcccatggttctgccactggccctggacacccagtgctggtttcccgtggaagtccccctggactgagtggcggctgggtgctctagtgatttgcgacctggggcctctgactcccatcatgttgggaaagtcgttgaacctcaccggtgaaacgggcacagtgaagtcatttccccgaagtctcaggactctgtgtaaggctggggacaggggcttgttggggcctaagggcaccttgggaactgcaggagcccgttctgcctccataagacactcactcctggcagggtcccctctccgggcacagcccagatccacccccatcatccctctccatctgtggctccctgcccctcacagaggattcatcactctgttcagaatccccaggactccctagggaaggaggtcccagcctggcctcccaagaccgtgcttgcccaattccaggacttcctcacatggctcctacctccagcacagaagcggcactaaaccaggtggtcaatcagggagcaccaccgaggttctgaatggtccagggatgagcagtgatgcctcaagctaagccaatcaaagccttccctgggattgtctcaaggagtccgcagtgagattctgggtctcagtactgggaaagggtgaggctgaggctgcctgctgtcctgggggcctcaccctgccaccaacaggaagccacacagagggaagcagaaatgagacgcagccagtgagggcagggtacaaaggtgagatcccggagagacagatgctgggacatcatccttgggtactggttccaacagtgcctgcagatggagccaccctcggagagtccacaacagcagccaatccattctatgcgtgtctgagctactttaagtcgggtttttgactgtttgaatgagagtctcatcttggctaggcaccatggcgcaacaactggggaggtggaggtaggaagattgcttgaggccaagagtcccagagcagcctgggcaacctatcaagacgctgtctttacgaaaagaaaaaaaactagctaggtgtggtggtgcgtgcctgtg

SEQ ID NO: 13274 - DNA, 1002 bp, Artificial sequence
  DNA replication origin
tcgatctcagctcactgcaagctccgcctccagggttcaaaccattctcctgcctcagcctcccgagtagctgcgattacaggcgcccgacacacgcccggctaatttttgcatttttagtagacacggggtttcaccatgttggccagactggtctcgaactcctgatctcaggtgatccgcccgcctcggcctcccaaagtgccgggattacaggcgtgagccacggcgcccggcctgaataaatcttttaaaacataaaaatctgggtgagcccctggccggccggcacagatgccggggtggggccgcgaatcggttgggacgcactctatccggcctaggggcacccgggccagcacccggccgccgcgcgtgcgcagtgggcggggtgccccgcgctcctacctgcaagtggccagtgccaagtgctgggccgccgctcctgccgtgcatgttggggagccagtacatgcaggtgggctccacacggagaggggcgcagacccggtgatagggctttacctggtacatcggcatggcgcaaccaaagcaagagagggtggcgcgtgccagacaccaacggtcggaaaccgccagacaccaacggtcggaaaccgccaagacaccaacgctcggaaaccgccagacaccaacgctcggaaaccgccagacaccaaggctcggaatacacgccagaccacgacggagggcgaccacctcccttctgaccctgctgcgggcgttcggaaaaaaaacgcagtccggtgtgctctgattggtccaggctctttgacgtcacggactcgacctttgacagagccactaggcgaaaaggagagacgggaagtattttttccgccccgcccggaaagggtggagcacaacgtcgaaagcagccaatgggagcccaggaggcggggcgcctgtgggagccgttgagggcactttcccagtccccgaggcggatccggtgttgcatccttggagagagctgagagc

SEQ ID NO: 13275 - DNA, 952 bp, Artificial sequence
  DNA replication origin
cactccagcctgggcaacacagtgagactccaaaaaaaaaaggaaagaaagagagagagaaagaaagagaaagaaagaagagatgaaagaaagaaagaaagaagagatgaaagaaagaaagaaagaaagaaagaaagaaagaaagaaagaaagaaaggagaaagaaagaaaagagaaagaaagaaagaggaggggaggggagggagaggggaagggaaagggagggggaggggaagggggaggggagggagaggggaagggggagtggagggcgagggaaaggggaggggaaggagaggggaaggggaggggaaggagaggagaaggggaggggaaggagaggagaaggggaggggaaggagaggagaaggggaggggaaggagaggagaaggggaggggaaggagaggggaaggggaggggaagggaaggggaaggggaggggaagggaaggggaagggaaggggaagggaagggacccaggctaacagactccagataccagcagcagcccttgagccatgttgcctaattgtccccaaggagaaaacttcccaggtcttcggaggcagcaaaagctttcctggcacagagctagaaaagaagattctcatggtgtcccatgtggcaggaactacaggagctggggtgggtaatccatttaggccacttgacaaacacctatttttaggtcaactctgagaatagaaagatgaaaaaggagtggcctctgccatcctggagctaagcaactggtataagggaagtgacagcccccatggaatcggaccatttcaacttcatgcgatgaatgacaggtcagggcttctgggcatgaccataggaatgaccacagctaacattgaccatgggcctaatttgtgtgctgtttgcttttttttttttttgagacagagtctcactcaagtcaccaggctggatggagtgcagtg

SEQ ID NO: 13276 - DNA, 1260 bp, Artificial sequence
  DNA replication origin
ggcccggagacccgggagctcggcgccgggcgcggggggcggcggcggccgggccgggccggacaaaagggaggaggcccgccaagttgcaagggggagccgcggggcgagggaggcagcgccggcagagcagcagccgaggggccgagcggcggagcagcggcgcgcggcgcccggcgcggggggagcagctggtgttcgctgtaacaaacaacttgccactcaaacgccggtccccgctgcgcatgcgcggcccgcgcgcggcctgccgggacttgtagtccgcctgggggggctcccccggtgctgctgctgctgctgctgttgctgctgttgctgccgcgggggctgggcggccggagctaccggcagcccggtgcacgggaaatgcaggagcgcgggcaccctcaggactaaggggaaggccgaggggaggcacggggcgggtggagccagcctgagcctaggcgcgccctctggcacccagtcaggctcggtactaggtgcttggagtgtaaagcgagcaaaccagacgactccggtgctggagaaggcccgagtctgggagcgccaagatgtagggcaatcggtcatgagagtgcggagaagccaaaccgaaaagcttgctggggacccggagggaggggattgacaggtcaaagggggtgacccgggggaggggacactcaggctgggttttgaaggatgaatgggagttcctagcaagagagtgagggcgcgcggatggaggacagaggccttccaagctgcaggaacagcgtgtcctagggcacagaagcgtgaaagcccccacggtgctgtgtttggctttgttgcagcggaaaatgtgagggaggagagaaaagagataaggcaggcatagtcaccaggagtcaggtcgggagggtcatgtgtgcagagctaatgaggtggccatttatcccactggagagggggtgatggggactgcgaagggtgaattcggggaaaatgtaaagtgcgtctgaggcacttccaaccccagggcccacgcgcccggaccacagaggttcctccttcatggctgtctggttttgaaatgttctgggttaaagtgattggtgcttccacctttggcagagtaatctggggacgcgatgggtgagatctatctgccagggcaggctgagaactctttttcaggggaaaattgcagttgtgctccctcaccttccctcagccctcctctgttaggtaggaacatactaggttttgtcattt

SEQ ID NO: 13277 - DNA, 1274 bp, Artificial sequence
  DNA replication origin
aagcccagaggattggggtgaggaccatctttgcagttgtcctggattgcagaaagggcacaaacgtggacccaagtgctgccacgccccagccttgagacccagggcaagagggtcagcttctctcaaatggactcatctgtaaattggagataaaagtaggacctaggctgggcacggtggctcacacctggaatcccagcactttttagtaccgaggtgggaagatcgcttgagtccaagagtttgagaccagcctgggcaacatagcgagacccccatatctactaaaaacacaaaaattgtccgggtgtggtgccgcacacctgtggccccaggtgaggcaggagaattgcttgagacttggaggtcaaggctttagtgagctatgattgcaccactgcactccagcttgggtggggaggggaggggaagggaggggacaggaggagaggggaggggacgggaggggcaggaaggctgggcatgttggctcccgtctgtaatcccagcactttgggaggccaaggcaggtggatcacctgaggtcaggcgttcaagaccagcctgaccaatatggtgaaaccctgtctctactaaaaacacaaaaattacccggtagtggtgatgggcacctgtgatcccagctacttgggaggctgggacaggagaattgcttgaacccgggaggcggaggctgcagtgagctgaggttgtgccactgcactccagcctgggtgacagagcgagactccctctcaaaaaaattaaaaagaagacagaattgcatctaagatccactgccctggatacacaaactgaatctaatgaagataaacccaaactaagggacattctacaaggtaactggtctgctctctgcaaaacatcaaagttgcaaaagacaaagactgattaagaccgatccagaatccgctggcacggtggctcacgcctgtaatcccagcactttgggaggtcgaggcgggcagatcacctgacgtcaggagttcgagatcagcctggctaacatggtgaaaccctgtctctactaaaaatacaaaaagtagccgggcatggtggcgcatgcctgtaatcccagctactcgggaggctgaggcacgagaattgcttgaacctgggaggcggaggatgcagtgagtggagattgtgccattgcactccagtctgggtgacagagtaagactccatctcataaaaaaaaaaaaaaaagactgatccagaatcaatggcaaaaccctgtctctaccaaa

SEQ ID NO: 13278 - DNA, 1855 bp, Artificial sequence
  DNA replication origin
gtagcggggcgggaccagagggcggaatcagagggagaggcggggactggaggcgggggcagaggaggagccagcgctagggggcggagcgatccctaagaggcggagtcagagggagaggcacaagcgggaggcgaggccagagcgcggagcaggagttggagaccgcggcggggcgaggccagagagcgctgtgggcggggccagtgtgcggggcggggcgtctgactcggccccgctctctgcccgcagaggaggagcggcagacgcagcgctctaaaccgcagccggcggtgcccccgcggccgagcgccgacctcatcctgaaccgctgcagcgagagcaccaagcggaagctggcgtctgccgtctgaggctggagcgcagtccccagctagcgtctcggcccttgccgccccgtgcctgtatatacgtgttctatagagcctggcgtctggacgccgagggcagccccgacccctgtccagcgcggctcccgccaccctcaataaatgttgcttggagtggaccgaggctctgcaggaatgcagggagggccgggctccgccccagggttatttctaagttgaggacaggaggttgtgagttctgctggggggaagttgcaagagccgaggtctggttgcatgttgccctggtcttggccaagaacaggtttgcacaaggccaagttcaagaggaactcccggtttcctgctgaccgtttggtcagaaaccacctgcttggactctggcggaagagtcctgaagatgggtgcacacagtgcagcagggcagccctgtctcatggcaggagacaggctgccgtccagggtgtaggagtgacctcatagctgggataaaaaatatattataacttaggttcgggcgcggtggctcacgcctgtaacccagcgctttgggagaccgaggtgggaggatccgttgagctcaggagttcgagaccagcctggccaacatggtgaaaccccatctctaccaaaaatataaaaattagctgggcgtggtggcatgcatccataatcccagctactggggaggctgaggcatgagaatcgcttgaaccggggaggcagatgttgcagtgagccgagacggcgccactggactccagcctggacaacatggtgaaaccccatctgtaccaaaaatataaaaattagctgggcgtggtggcatgcatccacaatcccagctactggggaggctgaggcatgagaatcgcttgaaccggggaggcagatgttgcagtgagccgagacggcgccactgcactccagcctggactacagagcgagactccatctcaaaaaaaaaaaaaaaaaaaagtaacttaggtgcagggtgtcctctgttattcactgagaccgtgccccggttatgaggttgtaccagaaagcaagtattcactatgcacactattcaccgctcaccctagcattgaagccagcctgtagcctgaaagcctttgctttgagggcaggtctttccccaaaatgcagacacgaaggtgcaaagtgaagctgccagtcttgcaaaagatgtaacttgtcacgaaggccacgagtggcagggagagctgtcccacatttgcggaagtggctatgtgaggacgggggaggcgggtcccttagagataagagacaatcataaggggagatatcagagaaaatcgtaaggggagcagatggttgtcaagagaataggctgaccatcgaaggactggcagaagctttcagaaaaccactggacggctgggcacagtggcttaggcctgtaatcccagcactttgggaggctgacgcgggtgaatcacttgaggtcaggagttcca

SEQ ID NO: 13279 - DNA, 964 bp, Artificial sequence
  DNA replication origin
cgggagggaggtgggggggtcagccccccgcccggccagccgccccgtccgggaggtgaggggcgcctctgcccggccgcccctactgggaagtgaggagcccctcagcccggccagccaccccgtccgggagggaggtgggggggtcagccccccgcctgggcagccgccccgtccgggagggaggtggggggggtcagccctccgcccggccagccgccccatctgggaggtgaggggcgcctctgcccggccgcccctactgggaagtgaggagcccctctgcccggccagccgccccgtccgggagggaggtgggggggtcagccccccgcccggccagccgccacgtccgggagggaggtggggggggtcagcccccctgcccggccatccgccccgtccgggaggtgaggggcgcctctgcccggccgcccctactgggaagtgaggagcccctctgcccggccaccaccccgtctgggaggtgtgcccaacagctcattgagaacgggccaggatgacaatggaggctttgtggaatagaaaggcgggaaaggtggggaaaagattgagaaatcggatggttgccgtgtctgtgtagaaagaagtagacatgggagacttttcattttgttctgcactaggaaaggttcctctgccttgggatcctgttgatctgtgaccttacccccaaccctgtgctctctgaaacatgtgctgtgtccactcagggttaaatggattaagggcggtgcaagatgtgctttgttaaacagatgcttgaaggcagcatgctcgttaagagtcatcaccaatccctaatctcaagcaatcagggacacaaacactgcggaagcccgcagggtcctctgcctaggaaaaccagagacctttgttcacttgtttatctgctgaccttccctccactattgtcccatgaccctgccaaatccccctctga

SEQ ID NO: 13280 - DNA, 1331 bp, Artificial sequence
  DNA replication origin
gctgacccccccacctccctcccggacggggcggctggccgggcagaggggctcctcacttcccagtaggggcggccgggcagaggcgcccctcacctcccagatggggcggctggccgggcggagggctgaccccccccacctccctcccggacggggcggctgcccaggcggggggctgacccccccacctccctcccggacggggtggctggccgggctgaggggctcctcacttcccagtaggggcggccgggcagaggcgcccctcacctcccggacggggcggctggccgggcggggggctgacccccccacctccctcccggacggcacggctggccaggcggggggctgacccccccacctccctcccggatggcacggctggccgggcgggggggctgaccccccacctccctcccggatggggcggctggccgggcggggggctgacccccccccacctccctcccggacggggtggctgccgggcggagatgctcctcacttcccagatggtgtggctgccgggcggagaggctcctcacttctcagacggggcagctgccgggcggaggggctcctcacttctcagacggggtggttgccaggcagagggtctcctcacttctcagatggggcggccgggcagagacgctcctcacctcccagacggggtctcggccgggcagaggcgctcctcacatcccagatggggcggcggagcagaggcgctccccacatctcagacgatgggcggccgggcagagacgctcctcacttcctagatgtgatggcggctgggaagaggcgctcctcacttcctagatgggatggcggccgggcggagatgctcctcactttccagactgggcagccaggcagaggggctcctcacatcccagacgatgggcggccaggcagagacactcctcacttcccagacggggtggcggccgggcagaggctgcaatctcggcactttgggaggccaaggcaggcggctgggaggtgtaggttgtagtgagccgagatcacgccactgcactccagcctgggcaccattgagcactgagtgaacgagactccgtctgcaatcccggcacctcgggaggccgaggttggcgggatcactcgcggttaggggctggagaccggcccggccaacacagcgaaaccccgtctccaccaaaaccagtcaggcatggcggcgcgtgcctgcaatcgcaggcactcggcaggctgaggcaggagaatcaggcagggaggttgcagtgagccgagatggcagcagtacagtccagcttcggctccgcatgagagggaga

SEQ ID NO: 13281 - DNA, 1602 bp, Artificial sequence
  DNA replication origin
ccccaaacgtgaagggtgatggtgttgtgctgccaaacaccgagctgctgctcccgctgctggcggtctgggtggtggctccaaagccggagctggtggctgcaccgaaggagaagacagcagtggagccgccaaaggcgggctgtgagctggcgggagcgccgaaggccgaagccgtggctttcaacccaaacgccgagtgcgtggcaccgccaaagataggatggatgggcgtaggcacgtgcgcaggcacgatcttgatcatggacggaggtgcaggtgtgggtgcagcagccggggctgcagagtttccaaaagtgaaagagctgccaaagctgggggcaagggccggcttggcggcccccggtggctgcccctcagcggccccaaatgtgggctgggggttggctcccagatatgatgggagcggggacttggcgcttgagccaaagggaatgttgaacgtgggggtgctcgtgttactgaacgtcagagtgggctggctgctggtggccggggcggaggtggcgagggtgctgccaaaaccactaaagtcggcagcgctgctgctggtggccgttggcacggcagtgtgcagggactggctgaaggtggtgactgtggtggttgtgggcaaggcaggaggtttgccaaactggaatatggagcccatggccggggtgaagctggcagcagaggcctggggcgccccgaagaggaaaggctgtgaggcggcagtggcggtgctggtcgtggtactcacactgctgctgctcacactgtttatgccaaagccaaacgcaggcttcgaagcagagtctgtggatggactggcagaggtgatgggagccacagcagaggtggcgctggccaggccagtgaagagcggggcagttgtggtgggagcagtggcgggagtagttgtctgcttgaagaagggagcaggcaagggcacagatgcaggtggccccatgctgctaaagacaggctggaaggtcggggctgtggtgctggtggtcgtggggagggaggagctggagggcgctgtggctgagactgaagggccaggcggtgtggggccttccttctcactcttgggtggagccgtgaaaatgggcttgaacatgggagatgctgaagatgcagcaggggcggcagggctggaaggtgaggtgttctgtgttccaaacaggaagctttgcttgggggcgggggacggggcagatgtggcttggggtttggtagtcgtctctgcctgaagggttggaggtgccttggtgtcagtggctggtaccatggatggagcagggatcagccccagcaaagtggtcggggggttggagtcaaaggaggggctggggagcagccctggcggccctgactgtgataaacccagcgggggtaggaggttgggtgtctttggaggtgagagggcctcagtggttgctgctccagcagattctggaagaagaatagaaaatgtgaaattggaataaacacttcaaagatgatggtattcagtatttcagtgtcctccccacgcctaccacagagcctgggatccaagagtcagtcaataaactcagctaagtctacactaca

SEQ ID NO: 13282 - DNA, 1385 bp, Artificial sequence
  DNA replication origin
gaagagacaggcactgaatatagaactcagtgagatgccagggaacgatacatgttttgctaacgtagtaatgactggaggagccattgtggatttaactggtcaaaggccttctgagtagttaacaattgtaagctgaaggttgggcgcagtggctcacgcttgtaatcccaatattttgggaggccaaggagggtggatcacttgaggacaggagttcaagactagcctggacaacttggcgaaaccctgtctctactaaaaataccaaaaaattagccgggcatggtggtacccacctgtaatcccagctactcaggaggctgaggcacaagaatggtttgaacccaggagttggaggttgcagtgagccaagatcatgccactgtactccggcctgggtgacagagcaagactctgtctcaaaaaacaaaccgtaagctgaatatgggggtggggtgggggtgggcacagcacaagtggacatgcctttcaggcccaggatggcgcatgcaaaggcccagaggcagaaacatgtttggtatgttgaagagcagaacaaagacaagcatggcaggagggcaggagctaaagcagtggtgtggaaggaggccaagaggcaaggattgtttgtggccagggttgggtgtttgggtcttaagtgttcaggaaaaccattgcagaatcaggcagaaggatgcagtgatggttcctcccatgtggaagatgaatgtagatcccatggcttctgtttgcttcgtgaagtaggagagaaaatctgggagagagagggtcaggataaagtgtataaaaaaaggggtcttttgaaatagtcattttggacagtgggggaaaggaacatcatattaaaaagtgtgatcagtttccaggcagtttgtgggctggaaaattgtgattgtgaagttaaagtgaggccagttagcatggcgtgtgtttcccagcgacactgtgggtgtagacctaaggtcagcggacagctggtgccacccggccatggagaccccagcaagcacagcaggaggggcagcgtgtcagtgccccgatgcagctcagggggtgcaggagtggagagcgggtgaagtcagctgcaggaggggtggtgcctacaggagattcgggagccggagcagttgtggtgacagtgtggctgcaggagtggtggcaggggtcggggagaggaggtcatgggggtggcagggtcgaggggctgagaggaccatcagtcagcctcacagggcgaagtcaccgtgagtggtgatggggaggaagccagtgagccaagggtcctctgtgaatcagggagtgacctggcagttgacaggtgacatgaggacatggcagattaaagtgatctgaacttgagt

SEQ ID NO: 13283 - DNA, 1683 bp, Artificial sequence
  DNA replication origin
tcgtgccagcaggtgtccaggatggggtagagcttgccctggaagtcggcctggaaggtgtagagcggccgcaggtcatcggggcggtcggcatcgaagaaggtgagttcgccctgctcatagtgcaggtagagcccgatgcggtgggggtggccggccacgggcaggggtacccgggggcaggcaaaggcttcgtacacccggccctccttcaggccgatcagccacacgccgtgctcgggggacctgttcagcttgcccttacggctggctgtgcccttgatgacccccaggcgccagtcgctcttgctgcccaccaccacctcccagtagtggcggccgcaggagaagccgcggctggccaggacgcaggtgctgtagtcgaagcgctcaggctggctggctcgccgctgggccagaagcccgcactgcaccaccgtgttgcccttggagagctccaggagtgggtgggcagtggcagggtccaacttgagaggctccggggctgggagggagatcacagagggtctgtgaggccacgtggagggcagcagacccggcccacagaagctgatggaggccctgaactccccaaggagaggggctgtgtcttcctcatctctctagccccagggtctagaaggggccagtacagggctgctccctgaatgaatgaatgaatgaatgaatgaatgaatgaatgaagttttacataaggaagatcaatcacagactgattgcatccacccaaggcaaaaacagtgtttatataaaagggagcagcttggtgggctgtggggggctgaggtggctggagaaagaaatggacactgggctcggggttctggcctgcctgcctgacacagaggtgttgtgggaaggacccggaagacacctgtcctgtgagcctatagctcagccctcagggatttctggagaacccataacaactgcagctgttggatttgctagcctagtcagcctattcaaggacgaactagcccacctgagctttttgctagttaccagctgatccgtttaccccagaaatgtgagatgtgctcccccctgcccgcctcccaccccttcccgccacccaagttgccgcaaggaaagaaggccaaggggaagaaggtggctccggcccctgctggcgtgaagaagcaggaggccaagaaagtggtttatcccgtttgagaaaaggcctaagacttttggcactggacaggacttccaggccaaaacggacctcgcccactttgtgcaatggtcctgctcggtcagggtgcagtggcggacagccatcctctataagtagcagaaactgtctcctgctattaaccagttcacccaggccctggaccgccaaacagctattcagctgcttaagctggcccagaagtacagaccaggggcaaagcaagagaagaagcagagactgttggccctgactgagaagaaagctgccagcaaaggggatgtccccactaagaggccacctgtccttggagcaggaattaacaccgtcaccaccttgatggagaacaagaacgctcagctgggccaggcacagtggctcatgcctgtcatctcagcactttgggaggctgagacaggcagatcacttgaggccaggagtttgcaagcagcctggccaacataatgaaaaaccccgtctctact

SEQ ID NO: 13284 - DNA, 888 bp, Artificial sequence
  DNA replication origin
taacgcgcttccccccatgtcctagctgccctccctgtggcgtgagccttcggcctggtgcgccccgctgccctccctggctgtgactctggtggggttccgaaggcccctttatgcccggcagacccctaccgacggcggcattccattctggggccacgaggaggcactcatcgtttcgttccaaccgccgccaacggccctggccctcgcgagctctggaactacagaggccacgcggtgaggtgcgaggtatgatccgtaatgggagcgcacgaaacatgatgggacacgtaacgggaccacgcagggcacgttgggtacgtgcaggggcgcgaggtggcggcacgtaatgggagcgcgcagagcatgatggggcacgcgcggtagcgcgaggcggggcatgtaaccatagcgtgcgggtcatgatgaggcacggacgtggggggttaggtggggcacgtaattggagctcgcggggcaggatggggcatctaactggagcgacagagagcacgatggggcacttacaggggccggaggctgggtacgtaacgagagcgagcgggaaatgatggggcacctaacgagcacgcagagcatgatggggcacgggtgcgaggtggggcgcacagtgggagcgcgtggggcatgatgagacacatggcgaggccatcagggcacaggggaagcacttttggaacacgtgagtgacagggctgccgcccttgaaggagccctcggagtggctgcgtggtggggcacgtggggcaggttcaggaaaaaggatgcagcatgtgattgcagggcaacctggtgaggacacgagagccacctgccaccagcagggttcagggctcccagctgtgggttacttccaccttcttt

SEQ ID NO: 13285 - DNA, 1446 bp, Artificial sequence
  DNA replication origin
tgggccttcctgaatcaggagggactaagggacgtctcatgccagatgaagccagaccgtggtcatgaggtctggaggtgtagatgtggcaaacatcgccaagttcctggtgacctctgagaaagccactcttctagagccaccactccagcaacgcgggttgaagggagcactgggggagggcaggcacttccaggggaggcctcttgatgataccctggtcccctggtggcatcacccgccctcctcctccacaaagagaggcagtgcagcctgctcccccaggacttggtttctgctctctaagccgattctgtcagaaggtgaggccctggtaggtgggggcacaggccgggggcctcctaggccaggcagcacgcccagccctcgagaaggacccatggcctggatgggtccctttcccagcccttcgccgctgggttatatctgaaatgctctgaagtgtttttggggtggcgggaggcaggcagtgaagagagtacaagcaatgggcagccttcccaaaagaggagccaggaaatcccggagctggaagcttggaaattcaaggaagacagtgtcttggggaggaggaagtttcagagtagtaaagtcaggtccgatcgggacaaagaaatgcctgctggatcccatggcccgagcagatcagcagcgagatgggacggcagcggggcaaggagtcactggctgagagtggagaagccagtgtagacggcacccttgaggaaggagggtgaccaaggtcagggaggctaatgagaggggacacggggtcgagaaaggcttcggggcagtgtgggcactgtgggggagacctggaggcacagctgtgggtactcatggaggctgagaggtggggcagaacaggggaggggagcctcctgcctcagccccatgagggagcgtgggaccctgggaaaggctcagagacgcctgtgtggggcagaaagcccggggtgtcggggtacgggagggtgaggtggcctcagggctgtgtggggcagggagcccagggtgttggggtgcaggagggtgaggtggcatcaggcctgtgtggggcagggagcccggggtgttggggtgcaggagggtgagatggcctcaggcctgtgtggggcagggagcccggggtgtcggggtgcaggagggtgaggtggtctcagggctgtgtggggcagggggcccggggtgtcggggtacaggagggtgaggtggcctcagggtcgtgtggggcagggagcccggggtgtcggggcgcaggagggtgaggtggcctcagggctgtgtgggacaaggatcccggggtgtcggggtatgggagggtgaagtagcttcaactttccattaagctgctggcatcagctccccacactgggagcgggcttagggaaccccaagcctggtgtgcagcgtttcgttatcagg

SEQ ID NO: 13286 - DNA, 1144 bp, Artificial sequence
  DNA replication origin
tggagccggtggggccagtgtcactggcacagaggaagaggcatgtctgcccctcaaggacccagaggaggcagtgagggtgggtgaagattcaggagtaggaggaggtgtgagggaaggggtctttggcccgtgggagggcttatttcccacctggtggcttttattttctctgggcctggagaggcgtggggctgcctggaagggaagggggatgtgggcatcaagagggaagctgggaagggcctccttgcagaatcaaaaaggagccagtgacgcaggaaagggctgctgagtaattctgaggttggaaacgcacctcggtgactttcacgtctattccatggagccggagtgaggctctctgtacgcaccgtggaacactgtgctattgatggctgtgagctatggactgtgtccacacagggtcgcccatctaggcgcctgctttatagtccaaatgccaggtggggtggggcaagtggaccttccagtgccctttgaggagctgctgccaggaggcagggccacgtgtgtgtgtgaagaggggatggaggtgcctggcccaggcagaggtgcacagtgtccatgagggtcaggggtgccccctgagatggctcctcctctaaactgggttgggggctgggcgtggtggctgatgcctgtaatcccagcactttgggaggccatggcaggtggatcacctgaggtcagaagttcaagatcagcctgggcaacttggtgaaaccgcgtctttactaaaaatataaaaattggctgggcgtggtggcggacacctgtaatcccagctactcaggaggctgaggcatgagaatcgcttgaacctgggaggcggaggttgcagtgagcagagatcctgccactgcactccagcctgggtgacagagcgaggccctgtctcaaaaacaaagcaaaacaaaacaaaaaccaacctgggttagggacccaaattggttagaggacgtagaagaggtaggtgacatggcttagggtttcaattcttccagtcaactgtgatttttcttttttttttagacagggtctagttctgtcacccaggctggagtgcaatgttgtgatctccgctcactgcaacctccacctctcaggttcaagcgattct

SEQ ID NO: 13287 - DNA, 1723 bp, Artificial sequence
  DNA replication origin
ttcccttcccggggacaatcccgaccttcaccgtcaaggccttttgcaaacacacacgcacgcacatgtatttttggaagaaggggaaaaattccaagagaacctccgctgggttaaaaatgaagtgaagattatattaagagtgaaaggggagcggggtggctggggcgcagacagaggcccctttcatgcgcccggccgcgcgccgtgggccgctgccaacacaaacgcgggcggaaccgaacccgcggagcgccggccgcgctgccaggccccatccagcccgccccggctggcgctgctccgcgtttccgctctgctgacgcgcaggaatcgcggggcggccgggcgggcggcggggacccctgtgcgccccgagcccccgggtgggggccgcaccactgcccgtctcccctccctctgctcctgctccgtccgttttcttccaggccctggcggatcacgggtgcccaggggctcggaggccgccgcctccgggaagcccgcccaggttccgctggactcccacaggcaatacccctgggccttcctcactgcccctgttggccctaattcccccaccccctgcaaggtctgtgcctctcctgcagccccgctagcaactagggcgagaggagctcgccccctcccaaacgtattggtgtgatgaaggaagcgcccctggttctgccactggccctggacacccagtgctggttccccgtagaagtccccctggactgagtggaggctgggtgctctagtgatgtgcgacctggggcctctgactcccatcatgttgggaaagtcattgaacctcaccggtgaaacgggcacagtgaagtcatttccccgaagtctcaggactctgtgtaaggctggggacaggggctgtgggggcctaagggcaccttgggaactgcaggagcccgtcctgcctccataagacactcactcctggcagggtcccctctccgggcacagcccagatccgccgccatcatccctctccatctgtggctccctgcccctcacagaggattcatcactctgttcagaatccgcaggactccctgggggaggaggtcacagcctggcctcccaagaccctgcctccccaattccaggacctcctcacgtggctcctacctccagcgcagaagcagcactaaaccaggtggtcaatcagggagcaccaccgagcttctgattggtccagggatgagcagtgatgagtcaagctaagccaatcaaagccttccctgggattttctgggtctcagtactgggaaagcgtgaggctgaggctgcctgctgtcctgggggcctcaccctgccaccaacaggaagccacacagagggaagcagaaatgagacgcagccagtgagggcaggggataaaggtgagatcccagagagacagatgctgggacatcatccttgggtactggatccaacagtgcctgcagatggagccaccctcggacagtccacaacagcagccaatccattctgtgcctgtctgagctactttaagtcgggtttttgactgtttgaatgagagtctcatcttggctaggcaccatggagcaacaactggggaggtggaggtaggaagattgcttgaggccaagagtcccagagcaacctgggcaacctatcaagacgctgtctttacaaaaagaaaaaaaactggctaggtgtggtggtgcgtgcctgtggt

SEQ ID NO: 13288 - DNA, 1764 bp, Artificial sequence
  DNA replication origin
ggggcgagctcctctcgccctagttgctagcggggctgcaggagaggcacagaccttgcagggggtgggggaattagggccaacaggggcagtgaggaaggcccaggggtattgcctgtgggagtccagcggaacctgggcgggcttcccggaggcggcggcctccgagcccctgggcacccgtgatccgccagggcctggaagaaaacggacggagcaggagcagagggaggggagacgggcagtggtgcggcccccacccgggggctcggggcgcacaggggtccccgccgcccgcccggccgccccgcgattcctgcgcgtcagcagagcggaaacgcggagcagcgccagccggggcgggctggatggggcctggcagcgcggccggcgctccgcgggttcggttccgcccgcgtttgtgttggcagcggcccacggcgcgcggccgggcgcatgaaaggggcctctgtctgcgccccagccaccccgctcccctttcactcttaatataatcttcacttcatttttaacccagcggaggttctcttggaatttttccccttcttccaaaaatacatgtgcgtgcgtgtgtgtttgcaaaaggccttgacggtgaaggtcgggattgtccccgggaagggaagggaagggcgaaacccgaggcggagagggagggagacaggaatgtctttctttcttcctgtgcccgggcctcctcggggtcgccaccgccgctgagggtcccccatcctgcgcccccctccggggactggaggtgcaggacaggatgggggggtcctcctctgaccacccccacatccccaaccccgggatgaatgaacgggctttttggaaattggggtcagcagggaggggtgggcgtctcctccaggggtcgctccccggagctggtcagagaatggtgtcaccaggtgtggccagctggggctgtcctcccagagcgggtaggaagggagacaggacatcagtcctgctaggaaagaccctactcttttttatttttatttttttctctgagacagggtcttggtctgtcacccacactggagtgcagtggtacaatcatagctcactgcagcctctacctcctaggctcagatgatcctcctgcctcagcctcccaagtaactaggacttcaggcagtgtcaccatgcccagctaatgttttgatttttttttttttttagagatggggtctcactatgttgcccaggctggtcttgaactcctggccttaagcaatcctcctgccttggcctcccaaattgctgggattacaggtgtgagccaccgtgcccagccctatagcctactctgtgctgatgcttgcttgtgggcttaaatagcctgccacagtgtccggaaactgtcaccagtcagccctttgttcacttgctgggcagaggggcgttacacctgagggaattttccagattatacccacggaggctgtttggagagttctcacttcaaacatctcagggctcatcacagagctttccatgcatgttcccaggcaagtctcttgtggtcagggaagtcaagtaagattatccccgcagaagggaaaaagaaggctcagagaagacaactagcttgtccccaagttgtggagcatgagggagctagggtggggatgaaaaagcgggtgatgggaagcccaggttctccctgctggatgcctggttttcaaactgttttctgcagagcttctgttcatattgggggtcctggaaagt

SEQ ID NO: 13289 - DNA, 1274 bp, Artificial sequence
  DNA replication origin
tctgtcctgtctcctctgcagctggcctgagccagcccaagtcagccgtctctaccgggcccctcttctccagcagctcagtttgggaggcagcacccgtcttgggagacgcagggcaggcagtaagcctggtgctggaggaagagaagggggaagaaaaggagaagggggaggagaaggagaagggggaggagaaggagaagggggaggaggaggggagagggaggaggagaaggggagtgggagagggaggaggagtaggggaaaggggaggggaagagtgaggaggaggcggggggaggggagggggagggggaagaggagaagggggaggaggagagaggagaagaaacctggtccagatgggcaaatggggcttgaccagcgggtggggccttgttgggggtggggggcgggtgcagggttggctgggccatctctgctccacgcacagccatgtgcaggatgccatgtggctatttttacccctgccaaggaaatagcctgatttatgtgaggcatggtcccatttgttcgggcctgtgttataaatacacctggccccacactcgtgttcacttggacagagaactcaggtcctggcctgcacagcctctctctggcctccctccctgcctcaccctgctatgcagccttgttgagaaggccttctgttacagtagggagctagtcacacaggagcagggcaagacccccacaaccaggaatgtcaggcagccaccaggtgatggtcagatggttgagtttttgttgttgctttttgtttttttgtttttgagacggaatttctctcttgttgcccaggctggagtacaatggcgcgatctcggctcacagcaacttccgcctcccgggttcaagctgttctcctgcctcagcctcccaattagctgggattacaggcatgtgccatcacgcctggctcattttgtatttttagtggagacagggtttctccatgttggtcaggctggtctcaaattcccgacctcaggtgatccgcctgcctcagcctcccaaagtgctgggattacaggcatgagccaccacgccgggcctgttttttgtttttgagacggaggcttgctctgttgcccaggctggagcacaatggtgtgatcttggctactgcattctccgcctcccaggttcaagcgattctcctgcctcagcctcccgagtagctgggattacaggcgcccaccaccataccctgctaacttttgtatttttagtagagacggggtttcacc

SEQ ID NO: 13290 - DNA, 968 bp, Artificial sequence
  DNA replication origin
ctggggctgatgtcatcatgggggcggcttgaggagggctgagctctccctgaccctagactcttctttactaacaggctagtgtccatatggatggatcattcattcactcattcgtttatttaatacactccctgtctgttcgacgcacactccccttctctccacttctggccccgtttcctctaatccttcattccttggttcccagagggttaaatgtagatcgatatgtcacctctggctccaaaggtctctgaagggccaggtgtggtggctcaagtctgtaatcctagcactttgggagaccgaggtgggtggatcacctgaggtcaggagttcgagaccagcctggccaacaaggtgaaactccgtctctactaaaaacacaaaaattagccggacttggtggtgggagcctgtaatcccagctactcaggaggctgaggcaggagaatcacttgaacctgggaggcagaggttgcagtgagctgagatcacaccactgcactccagcctgggcaacaagagggaaacaaaaaaacaaaaaacaaaacaaacaaaaataaataattaaaaaataagggtctctgaagacttcctgctactttctgggtccatgcccctcctcttcatcctccacgtcccaccgggctcttcaggccccagcctagataacaccaggctagattttgatctcccagggactgggtgtcgggagggaaaggcggggggagtgtcagagaggggatggatttctcccacccacactcggggaggcctccggatggatgtgtccttccatctgatggacctcaggattgggagaaagatcggggacaagagacgggcacaacagtcacctggtttctttttcttcctttattttttgagactgagtctcgctgtatcacctaggctagagtgcagtgacacgatcttggctcactgcaacctccacttcccag

SEQ ID NO: 13291 - DNA, 1202 bp, Artificial sequence
  DNA replication origin
tatggtacctgtgaccctgggggacccaggtgaggcaccgtggctcaagcctgtaatcctagcactttgggaggccaaggtgggagaatcacttgagcccaggagttcgagaccagcctgggcaaaatagcaagaccccaccatctctaaaacaaaaataaacaaaaaagtcagggatggtggtatgcgcctgtagtctcagctactcaagaggctgaggctggagaatcccttgagcctgggaggctgcagtgagccatgatcacaccactgcactccagcctgggcaacagagtgagaccctatctctagaaaaaaaataaaaagaaagacagggagagggggaggggaggcagggggagggggaggggggaggaggggaaggggagggagggggaggaggggaaggggatggagggggaggaggggaaggggagggagggggaggggttagagggagggagggggagggggaggggagcgggggggaagggagggcagggcagggcagggcactgcagggaagggaagggacccagctttgatcacctgggcattgataatggagggtcccaaaacttcagcagcagctgcccagaataaagtgcatgctctcagggatggcagtggaagttcctccaagcagagaccccgcctcacctcttcatttcctgtcacacccgacaccccactcttactcctccccagaaacaccctgcaaagccatgcttccaggcctttgccaggcttgtttccccagctctgaaggtcttcctcctcttctgttccatctggcaccccagattgaagcatcacctcccagggccagcccagcagagctgggctggggctggaggctctgctctgtggatccagggtccaggccagcccatctgtccagcacactgtggcctctgcatccgtgccctccctcggccccatgccagccactgttcaagggccatggaataacatcaagaaataacatattggccgggtgcaatgactcacacctgcaatcctagtactttgggaggccaaggtgggaggattgcttgagcccagagttcaagaccagcctgggcaacacagcaagaccccctctctccacaaaaaaacccacaaaaaaacaaccatattatttctctgtatctggccccaaggaggcctaggtgcacagatgatagtgatgtgtggcccca

SEQ ID NO: 13292 - DNA, 1329 bp, Artificial sequence
  DNA replication origin
ggagcgcgggcgcggggctgcgccgtgccaggcggtggagatccccatgtgccgcggcatcggctacaacctgacccgcatgcccaacctgctgggccacacgtcgcagggcgaggcggctgccgagctagcggagttcgcgccgctggtgcagtacggctgccacagccacctgcgcttcttcctgtgctcgctctacgcgcccatgtgcaccgaccaggtctcgacgcccattcccgcctgccggcccatgtgcgagcaggcgcgcctgcgctgcgcgcccatcatggagcagttcaacttcggctggccggactcgctcgactgcgcccggctgcccacgcgcaacgacccgcacgcgctgtgcatggaggcgcccgagaacgccacggccggccccgcggagccccacaagggcctgggcatgctgcccgtggcgccgcggcccgcgcgccctcccggagacctgggcccgggcgcgggcggcagtggcacctgcgagaaccccgagaagttccagtacgtggagaagagccgctcgtgcgcaccgcgctgcgggcccggcgtcgaggtgttctggtcccggcgcgacaaggacttcgcgctggtctggatggccgtgtggtcggcgctgtgcttcttctccaccgccttcactgtgctcaccttcttgctggagccccaccgcttccagtaccccgagcgccccatcatcttcctctccatgtgctacaacgtctactcgctggccttcctgatccgtgcggtggccggagcgcagagcgtggcctgtgaccaggaggcgggcgcgctctacgtgatccaggagggcctggagaacacgggctgcacgctggtcttcctactgctctactacttcggcatggccagctcgctctggtgggtggtcctgacgctcacctggttcctggctgccgggaagaaatggggccacgaggccatcgaggcccacggcagctatttccacatggctgcctggggcctgcccgcgctcaagaccatcgtcatcctgaccctgcgcaaggtggcgggtgatgagctgactgggctttgctacgtggccagcacggatgcagcagcgctcacgggcttcgtgctggtgcccctctctggctacctggtgctgggcagtagtttcctcctgaccggcttcgtggccctcttccacatccgcaagatcatgaagacgggcggcaccaacacagagaagctggagaagctcatggtcaagatcggggtcttctccatcctctacacggtgcccgccacctgcgtcatcgtttgctatgtctacgaacgcctcaacat

SEQ ID NO: 13293 - DNA, 1116 bp, Artificial sequence
  DNA replication origin
ttgctatgtctacgaacgcctcaacatggacttctggcgccttcgggccacagagcagccatgcgcagcggccgcggggcccggaggccggagggactgctcgctgccagggggctcggtgcccaccgtggcggtcttcatgctcaaaattttcatgtcactggtggtggggatcaccagcggcgtctgggtgtggagctccaagactttccagacctggcagagcctgtgctaccgcaagatagcagctggccgggcccgggccaaggcctgccgcgcccccgggagctacggacgtggcacgcactgccactataaggctcccaccgtggtcttgcacatgactaagacggacccctctttggagaaccccacacacctctagccacacaggcctggcgcggggtggctgctgccccctccttgccctccacgccctgccccctgcatcccctagagacagctgactagcagctgcccagctgtcaaggtcaggcaagtgagcaccggggactgaggatcagggcgggaccccgtgaggctcattaggggagatgggggtctcccctaatgcgggggctggaccaggctgagtccccacagggtcctagtggaggatgtggaggggcggggcagaggggtccagccggagtttatttaatgatgtaatttattgttgcgttcctctggaagctgtgactggaataaacccccgcgtggcactgctgagtcctctctggctgggaaggggggaaggtaggagggtgagggccctgcaggagtctttcttgtaagcagagctggcagtgggtgctggcaccccccaatcaggaggaagtccccccggaacagctgtgcattgcaggagtcccagacaccatgtgtgcgtgttttcccctcccgcccgtctctgtgcttccaaatggagacagggacgcctgcggatgttcagggaattccccagggtgacactgccacctctggccccagggagtccagtttgaggctatggatgagttttccttctctgggaacttgctctccttattggcgtggaaagtaaaggtgtcagcctgtgtcaatgttgtcacgaggaccgcctccctggggccttgg

SEQ ID NO: 13294 - DNA, 1853 bp, Artificial sequence
  DNA replication origin
ctccaggcccgcgagcggccggggcgcgctgacagctgccccgggccggggatgcgcggctgacctggtctcgcgagccccaggccctaccccggcccagcccggcccagcccggcccgcgcggctggaaaaggatactcccgggtgcggaaggcctcctgagtgtgcgggatggtgaagagcggctcctctccgggcaacggcttcaccagcgggaagggcttgcggcccaggagcggcgccatcgcggcggcggcggtggggactggcggctgctggggccggccccgcggcgcagcactaggccccgcggcccggagcgagcgccaggcgcccgggggtggggtgggggaagggaggggtgagagggcggcgcgaactccggctccctcaccgccggcgcggccgcgcgacagtcatggagcggaacgccacggcgcagagctcccgcgcacaccgccgcgcctcccagcagccccccgccgacctccgcttcgggtcccggcggccggcagtcacgactcctcctcagcagcaccggaggaaattattgaaaaatggcgggagattcccctcctcccccgggcccggccaacgcacacactaacttgctcccccgtggcgccggtggcgaatgctccaataggcggagagctggtcagcgctcacagcctattggctcggaggagctgccgctccgcgcctgggtcccgcccccctgcccctgtcgcgtagttgggttgcagcgcactagagggcagtctgaagaggtgaaaggtcacgttatgtaagcgcccgtgataggcgtgcgggcctccgacggcagagttaaaagtgggggacagcgggggatggagaggacgagaactcaaagaggtcaagccggagaagcccctcgcatatacagatactgcgccatctgtcaccgacggcgacaccgacatccgggcaccactgtccgtgtggtgcgccggagggggagggtgagcgcgcggccaggggctttgtctttcctcttgggcgcctcccccttcttaaaggcgccgtgctcggccacgcccggggatgcgcgggtggggctgggctgcagggaggggttggcgggaagtggccccgggagcttaccctaccaaaggttctgcggaaggacaacgtgggggccagctttgctcaccccagagttaacttctgggcgggagtgtggttgagatctgggtagaagtatactgcttgtttctaggggctggctggaaagtagaatatagaagcttctttggagaaatagattaaaagacgtacttagttttttggtttttggtttttgttttttttgagacggagtctcgctctgtcgcccaggctggagggcaatggcgcgatatcggctcaccgcaacctccgcctcccgggttcaagagattctcctgcctcagcctcccaagtagctggaattactggcgtgcaccaccacgcccggccaattttgtattattagtagagacggggcttctccatgttggtcaggctggtctcaaactcccgacttcaggtgatccgaccgcctaggcctcccaaaattatcattatttttttttttgagacggagtttcactcttgttgcccaggctggagtgcagtggtgcagtctcggctcactgcaacctctccctcccgggttcaagctattctcttgcctcggcctcccgagtagctgggactacaggtgcgcgccaccacacccggctattttttgtattttgtagagacggggtttcaccatgttggtcaggctggtctcggactcctgatctcaggtgatccacccgcctcggcctcccaaagtgttgggatta

SEQ ID NO: 13295 - DNA, 1113 bp, Artificial sequence
  DNA replication origin
gcccccgccgctcccgccgccgccatgtcgggccggtcggtccgggcggagacccgcagccgggccaaggacgacatcaagaaggtgatggcggccatcgagaaagtgcggaaatggtgaggggccggagcttagggggctggcgggggtcgcggatccaggccctgaggagcgtgggactggcgggtcaggtgggagccgaccggccggcgctgggggaggggggtgcgggagaaggcgggaggagggcgccgctggcgtcggcgtgaggtcagagggcgcgccggccgcggccaatcagcggtcctcccggctcgcgggcccgcccacctgctgcggctgctgccgcgcgccgcctgggaggggattccggcttccggcccggactggagctgcctggcgtcggtgcccgcgcccggcccagcccggggcccgccctcccctcttcctgggcagtggccccgcctgcgtttccaggcttcctcttgataatagcgagtagccctggagtggtgtcagcccgccaggctgagcgctctgcgtattcaggcgttgaagttgggtgagtttctgggttagtccatctgtcaagggagcaagcctggtgtcatccagagggatacccctccctttcccccagtaaccggcccctgcgccgcgagcttggtaggcattttctcttgctgccccggcggctgtcaggagagtcctttgcaaactatgtaccagcctccctctaatttccctgcttctgctcttgttcattccccagtccgttcatcatttgcactgtgtgattttatttttctcacttccaagtagcagagtggtctttttaaagtgcacatccttacttgggaggctgtggtgggaggattgctgggacccaggagttggaggctgcagtgagctatgatcgtgccacggcactccagcctgggctacggagagagaccccgtgtctaaaatgttcatggaagatgccgattgagcccctgtttagtatccggaactccgatacatactatatcggtgtgtatcggagtcatcacattaaactttcacagccaacttcgtcagctcttttgtatagccaattactactaataattt

SEQ ID NO: 13296 - DNA, 967 bp, Artificial sequence
  DNA replication origin
acccccctcccccagcgccggccggtcggctcccacctgacccgccagtcccacgctcctcagggcctggatccgcgacccccgccagccccctaagctccggcccctcaccatttccgcactttctcgatggccgccatcaccttcttgatgtcgtccttggcccggctgcgggtctccgcccggaccgaccggcccgacatggcggcggcgggagcggcgggggccggggcactgctcccaagacaccggggatcgcgcgcctcacgcgccgccgcccgcccgccgccgccgcagcgtcacagcggccgtcgccccctccgtgcgcgcgtgcgcgagaaagcgcgcgcacccgcccgccccttggggctcacggcctcagcgcgcctgcgcgccccgcccggggcgtccctcctgagtgccccgggagtcccctgagccccctacccgggccggggtgcgaggcgggttgggcgcacgtgcttgtggtcagggcgaggtgcgaggtgccgccggtgggcaacctggttctcttccctgagagtttggaggtcggctccctgctctggccagcgtgttaggaacctgaccctgtggaaccgcactcctgcgccatctctgtcctcccgcctctcctgcccagcacctttgccctctggctcctacgctgtgctccaaccacgcctttcttaaggatggcttccggtctttgcacacacctgttcctcacctggaatcccctcctctctttaccagatgaactgctttcccagcattcagaccacattcttgccttttctcgagtatctagtagtcccaagtatttgggaggctgaagcgggaggatcacttgaccccaggaatttgaggctgccgtcagctatgatatgatcgcacctgtgaatagccactgcactccagcctgggcaacatatggagaccccatgtctaaacgagaccccgtctc

SEQ ID NO: 13297 - DNA, 1331 bp, Artificial sequence
  DNA replication origin
gagccgtgcgggcgcccgcgtactcactagctgaggtggcagtggttccaccaacatggagctctcgcagatgtcggagctcatggggctgtcggtgttgcttgggctgctggccctgatggcgacggcggcggtagcgcgggggtggctgcgcgcgggggaggagaggagcggccggcccgcctgtaagtggggccgggtcgggtgggggcggcccgcggtgtcccggctcccggcctcctcgtggtccgacctgcggtttgggcccgcggctggtggggcccggcgactccatgggcctcagtttctcctctggtaacgtgagcttcgcttccagagacggggacccgccttgccgggttaggcgcacctcctggggcgggactggctccaacctgggccccttactgcggctttctctgtggccgaggccaggccgtccccggggtggccaggagagcaccgtaaactcttcagcctgctccgtggccgcgatctcggaaaaagcaccaattctgtgatgtgcagcagcatttactgggcatctatgaccctgtgataggctttggggtctttttctgtaaggagtccagtaaaggagaagtacatctgtattatgaacacctaaatatgtaagtgaaaaacacggtgaaataagtttcactgaggccaggcgaagtggctcacgcctgtattcccagcactttgggaggccgaggcagggagatcgcttgagcccaggagtttgggaccagcctgagcaacatagcaagaccccatctctacgcaaaattagctgggtgtggttgtgcacgcccctgtagtcccagctccatgggaggccgaggcaggagggtgtcgtgagtccaggaattcaaggctgcagtgagttgtgatagatcgcgccactgtacttcagcctgggtgacggcaagagcctgtctctgaaaagtttcatagaagaggttagtactagaaatgggaaacaccagagagtcagtgggcagccctgctctttttatttatttttcagacagagtttcgctcttcttgcccaggctggagtgcagtggcacaatcttggctcgttgcaacttccgcctgccaggttcaagcgattcttctgcctctgcctcccgagtagctgggactacaggcacacaccaccacgcctggctaatttttgtatatttagtagacggggtttcgccacgttggtcaggctggtctcgaacgcctgatctcaggtgatccactcgtcctggcctccaaaagtgctgagattacaggcgtgaaccactgtgcccggccagccctgcattttttttttt

SEQ ID NO: 13298 - DNA, 1250 bp, Artificial sequence
  DNA replication origin
gggcccaaaccgcaggtcggaccacgaggaggccgggagccgggacaccgcgggccgcccccacccgacccggccccacttacaggcgggccggccgctcctctcctcccccgcgcgcagccacccccgcgctaccgccgccgtcgccatcagggccagcagcccaagcaacaccgacagccccatgagctccgacatctgcgagagctccatgttggtggaaccactgccacctcagctagtgagtacgcgggcgcccgcacggctctgccgggccgcgcacgcacgcgggggcgcggcctggccgttggggagcctcaagcggctgggcctggccgttagagcgcctgggggcggagcctggttgttacaacgccttcagggcggggcctggccgttaaagcacctcaaggggtggggcccggctgttgtggcgctcgaggggcggggcctggagttagagcatctccacccgccgagcctagttattagagcgcctcgagaggcagagtctggagttagcgcgtctcgaggggcggggctgggttgttagagcgtctcgaggggcagaacccggaggtagagtgtctcgaggggcggggcctggaagtagaacatctcgaggggcagggctcgacccttggtgcgtttcgaggggcgggtcgcctggcggttgagattgcagggctgcggagggcggaggaaggcgggatttgcgatcactgctcacgcctcctcctgaagaactcactgataattgtttattaaaggcattattccagccatcaccacactggatcctttcaaggaagcggggcggggattattattaccatttaacggataggaaactcagcatcagcgaaagttcagatgggcttttaaggaagagtaggccaggcgcgtggagtggaacagcctccgcaaagacctgagaagctgggatgtgggaaatggctagaggggcggaaaggtctgggggacgttgagcgctggctccatccaacaagctgctcattacagggagaggtggggcaaaagctgtgtctgaggattccctggatggacctttgtgtgaaaagaccaaaatcagaaaaccggcagtggcttcaaggatccgagagggaggtgacgagggcctggatttggggctggcctggcaagtcgaaagttaaaagggagaatttttaatagaaaacttattttatttatttatttatgtatttacttttgagacggttgcccaggtt

SEQ ID NO: 13299 - DNA, 973 bp, Artificial sequence
  DNA replication origin
attaagtaggcagggtccaggcgggtgctgggaccagggggccatgccgccttacccccagcccctgacccctgccctgcccccagcctgtgccagcagcagctgcccgccacaggggtacccatcacacaccagcgttttgaccagatgcgagacatgtttgatgactacgtccgaacccgtacgctgcacaactggaagttctgggtggtatcctccctcaagcccatggctggggggctgcaggggctgtggcagggtgagaccaggctgggcctgggatggaggcctagctctccaggccgggcaggctcagagctgctcccaggtgacaggctctggctctgccccctgcttccatgccctggccatcttggccagcaaaattgcccagggatggggggctgggagcagagagggaaactgagggaggagtccttgggtaaggggagccttggccctgacctcaggaagccccgagggcagtttgggagaatctgaactctggagtgaggactacagaagacttggaatccactccctgatctggctcaggggtcaagttcttgactgagcccaggcagggagctcagggatgggggatggttcagcacacagtaagggccgtggaggggcaaggaggaggggactgagaggcagagagctgggaaggtcttggcaggacagaagtagggactgcaagccaggtgcggtggctcacgcctgtcatcccagcactttgggaggccgaggcaggtggatcacttgaggccaggagttcaagaccagactggccaacatggcaaaaccccatctctactaaaaatacaaaaattagccaagcgtggtggcatgtgcctgtaatcccaactactcgggaggctgaggcaggagaacagcttgaacctgggaggtggaggttgcagtgagccaagattgtgccactgcattccagcctgggcagcagagtgag

SEQ ID NO: 13300 - DNA, 862 bp, Artificial sequence
  DNA replication origin
aggctgggggcagggcaggggtcaggggctgggggtaaggcggcatggccccctggtcccagcacccgcctggaccctgcctacttaatggcggcattgagctcctcaatctcatcccgcagctgctgggcctcctcctgcaagcccgcacgctcctgctgtagcataaggatgtactcagctgtcttctgcagcgtggtagctttgctcacctgcagacgccaccaggggggctcaggcaggtgctagaggctgtaccctgggacccactgaggcactgggatgggaggaggcaagagtgtctggagcactcccctgcaattgagttttgggtggggggggtccagaaaggggccctgtggttttgggggtgccagcctgggcccggggctcaccttgaggctgggctgggcactgagtgtgctcacgagcccatgaagggtgtcaaaccccagcttgatgttgaagcgccgcttctgctccgcggagatgtgtgtgatacgccggttctcggtctcggggagcagagagttgggtgagcctaggaaggagcccaggagggcctgggggtagcaaaccgatcttggggtgggggatggtgcccaccttgttgctgtctggacggccccggctgaggatgggttgcgggggagagacacggacgctcagagtcccagggcctggcatggagctgaggtcccctgacagccgccgttcactgcctgtggtagggacagacagacccacagaaagaccgacccaggggaaagggtccccattgcccccttcctctcatctggccccagacccagtccccttcttcttcctcctcttcccctcatcccctagattcccccaatcc

SEQ ID NO: 13301 - DNA, 720 bp, Artificial sequence
  DNA replication origin
ctggacggccccggctgaggatgggttgcgggggagagacacggacgctcagagtcccagggcctggcatggagctgaggtcccctgacagccgccgttcactgcctgtggtagggacagacagacccacagaaagaccgacccaggggaaagggtccccattgcccccttcctctcatctggccccagacccagtccccttcttcttcctcctcttcccctcatcccctagattcccccaatccctgcaacccctctctttaccgctgggcgctgggggtgagagccgctccgctttggggacaagcaggggcctggaaggggccaatgtggccgggcctggaggtggccggggcggtgtaggggccggggtcgggggaaggaatgtgcaggggaattcagggactgtctcctgctggggtggagaagggcggagagtcgggttgaaggccgtgggcacagccccaccgcccagtgcccgagatcttaccggggaccctggggaccggaggagggtgctggatacaagtggtggctccagggcttgctccggcttagctgtgcacgggcagaaccgtgaggctactggggctggcccacccccggcatctatcaagaccccatcctgcccctcccaagagtccacaccccttttaggtacaggccccacatccctcattccttgccactctgtcccttgaactggacctgccccttcac

SEQ ID NO: 13302 - DNA, 1624 bp, Artificial sequence
  DNA replication origin
cgagtgcagtggcatgatctcggctcactgtaacctccgcctcccgtgttcaagcgatttccggcttatttttgtatttttagtagagacagggtttcaccatgttgcccaggctggtctcaaactcctgacctcagtagtccgcccgcctcggcctcccaaggtggtgggattacaggtgtgagccaccacacctggcccccaggtgcagttcagaagttgcttcctgctgcttggttataggccttttccctccatcatcagacttttcaggtgctaattctaatcggttgctgaggggtgtctctcctccatcagacagtgagctccttactgaaagggttatgttttgctcaccactgcattctctatacctaatacagctcaggcacataacagcactcagtgaatggttgtccaatgagtgagtcagtgactgaatgaatgagcaagtgtgcagatgaatgggcgtgctggtgaatggatagatgcatcttagactgcggtggaggcacacgtgggttggtggatatatgggtaggtgagtggttgggtggatgggtgggctggtggatggatacatagatgaatagtttaatggattagtgaatgggttcattggtggttaagtggctggaaatgtatagatggtggatggatggaaggattatggatgggttggtggatgaatgatggaagtatagatggttggatggattagttaatatgttaatatctggtaggctggtggagagagtggtagatgagctggttcatagattgataaataggtaggtgaatggatggaagacggatggatggagagattggtggatgaagtagtagatggacaattgatgaatggatgggtgggttggttagtggatggattggtgaagttagtggatggatgatgaaggaatggtaggttggttggtggatggatcagtggacaagttagtggatggatggatgatgaatggatgggtgagttggttggtggatggattggtggacaagttagtggatggatggatgaataagttatttgggagacaaatggacgggcaggaagattgatgctccgctgttcctgctttttgcataaatgtactcgactccctcctctcattgtaatttccctgctgcatgtatatgttcgcacacctgtgtgtgttggaaggcagggctcatttctcctatctctccccagggccccagtctagagtttggccagggcaaggcagggcaggggaggcccagatggctgccaggggcagctctctcccctgctctctgagtgtctgtctgtccccccaaccaggctcggaacagctgccctggccccttggactccagcgccttcctgagttctgatttcctccttcctgaagaccccaagccccggctcccaccccctcctgtacccccacctctgctgcattaccctccccctgccaaggtgccaggcctggagccctgccccccacctcccttccctcccatggcaccacccactgctttgctgcaggaagagcctctcttctctcccaggtttcccttccccaccgtccctcctgccccaggagtgtctccgctgcctgctcctgcagccttcccaccc

SEQ ID NO: 13303 - DNA, 921 bp, Artificial sequence
  DNA replication origin
aagccgggggcacctctgggcccagggtcccactgctgaagagggagtcaaccacggggctgaagctggggggctctgggaagtttgaaggcatgggcggctgtgggaggcgggagttggtaaagaaatctgtaattcagacacacagggcaacagcagttagggccagggctatggctgggaaacagctgagaggagagtggcctgtccccagccttggcgggtggggacatggggactggcgggcagagggtgggggtcccttccacagaagattgtgaaactgggagggtttctgtctcgattaggggaagcagcaaccgtcttgggtggaatgagcttgcgtgggagagagcaggggactgtggatgtgaacagggaccccaggaaggagccccctcccctccccagccccaggcttagctcaggaagtccccctccccaccccctggtggctccccttccctgatctgctggaggtgcagaaagggggtgcccagagcgagtgccagggtggaaaaggggtacggtgctaggggaggaggcctggcatgggaggggccccagggtggcagaagttcaagagggtgagttggagatgagggggaacgtgaggtcactgggtccgggacaagcttggtttgttggaaggtcaacaggtggagcctaggagtggggtgaagagtgtaatggggcgagaggggcctaaggctgggctccgagtggggtgggggcgagaggggcctaagggtgggctctgagtggtgtgtgggcaagagggagatatgggtgggctctgagtgggatgggggtgaggggggtgcctaaggctgggctccaagtggggtgtgggcaagaggggctaagggtgggctctgagtggggtgggggcgagaggggcctaagggtgggttctgagtg

SEQ ID NO: 13304 - DNA, 1439 bp, Artificial sequence
  DNA replication origin
gggtgagttggagatgagggggaacgtgaggtcactgggtccgggacaagcttggtttgttggaaggtcaacaggtggagcctaggagtggggtgaagagtgtaatggggcgagaggggcctaaggctgggctccgagtggggtgggggcgagaggggcctaagggtgggctctgagtggtgtgtgggcaagagggagatatgggtgggctctgagtgggatgggggtgaggggggtgcctaaggctgggctccaagtggggtgtgggcaagaggggctaagggtgggctctgagtggggtgggggcgagaggggcctaagggtgggttctgagtggggtgtgggcaagagggggatacgggtgggctccaagtggggggggggtgaagggggacctaagactgggctccaagtggggtgggggcaagaggggctaagggtgggctccaagtagggtggggatgagagggggcctaagggtgggctccgagtggggtgggggcgagaggggcctaaggctgggctccgaaaggggtgggggcgagaggggccctaagggtgggctctgagtggggtgggggcgagaggggcctaagggtgggctctgagtggggtggggcaaggggtctgggaagcctgcgagagctgggggaggcagtagcggattgtttggggtgcgggttgtgtaagtcctgggctattctggttttgggaagcagctggccacggcctgaccacatcccgggcctgggcgccgcccgcccacccgctcccttccgggcacctttctctgaccctgaccagcctgtgatccgtgccagctcctgaggcctcttagtctgggcagttccgaccccaccgtgacaactccccacagacctgggtgggccccagctcccagttttttccctcccacccccctgccaggagagctgctcaagtctgcctcccaggagccacctccaaggagaccaggagtcagttagataaggtcaccccaaacccagaacccactgcagggtcaagtgtgtgtgtgtgtgtgtgtgtgtgtgtgtgtgtgtgtgtttgtgtcttcacccccaaccccatcccccagagatagaatcgtgctatgttgcccaggctggtctcaaacttctggcctcaagccatcctcctgcctcagcctcctaaagtgctgggattataatgagcttgcgtgggagacagcaggggactgtgggtgtgaacaggaaccccaggaagcagtcccctcccctgcacagcaccaggcttagctcaggaagtcccccttcccatcccctggtggctccctttccctgatctgctggtacagaaaggaggtgcccagagagaatgccagggtgggaaaggggtgcagggcgaggggaggaagttagccaccgtgccttgctgtcacccaggttggaatgcggtgg

SEQ ID NO: 13305 - DNA, 1236 bp, Artificial sequence
  DNA replication origin
gtcagtagaagcacatgtggacaaatgtctctgttttcacaattgactttccaagtggccttcctcacttcgctgtaggtcttgcaggttattcccgatagccacacatttagggacccccggagctatgtgcgggccaggtagatatccaggctcagcccgtctcatcgaagcccctggggacagaaagagggtccctgggataaagcttagtcttagtgacctcctaattccttccccacggggtcctgggcctgtcaatcaagaggtggaggcctatggggcgggaactagggaatgaggaaccacccccacccctgttccagtcccgggagggggtgggggctgcccaggggcagaagtgtgcatggcagtgccctgggagcaggccagcctgggagggcagcggccctgtctgggcacacagcgcccggccacaggtaggagcccagccacccccacctggggtctgggcaagaccagcagggactggggctaggaggcgatgtctggcaagcccgggtggctgctggcgcatgggggaaaaagtgtgggccacacagaggaggtggctcgtgtggccctctcttatcaaacattccgtgtacccagagggcagagcgcactggtaccaccaagacggcagctctcgttgcccccaagagcctcccactggggaggtctggctggaaacccagggaggggaccagaactctatggaggcaggaggcttagtgaggggtgctcagggaggcagccagaggcagaggagctcagggaggggatgacaggtcaggtccgtggaggggacagaggctagggagggacttgggccctggtgagcagctcgggctgggaagcaacttctctcaaggcagggtggggacaggcctgggcaacgatggtaagcgggtggctggtgactcagggatgagagggccttgcggccccatgacccctgcccgggacccagggagtgggcagcagctgtgagcagggaggagccctaggccctcagcggcctggggccaggcacagcatgaggctgattctagagccagggcctcggggacctagtgacaggaactgtggaccctgggagatgggggagcagcagtgaccactcgccatctcccacctggtccccctttttttgagatggaatcttgctctgttgcccaggctggagtgcagtggcatcatcttggctcactgcaacccccacctcccgggttc

SEQ ID NO: 13306 - DNA, 1061 bp, Artificial sequence
  DNA replication origin
agggacgggaatttgaactttccacacgggtccgacgccctggccgatcgggttgcaacatgacctgggccaggggccagagcttgtgggccaaggttactccgcctccagccaatggggtcgcagctgggcggctgcggttgggggcaggcaacactcccctcacagtccccaccccagctcctgctcccccgcagggcggcaggtgccgatctgtagccagcggttctcagaaggggaggaggcgccgcggaggaagaggaatatttgcacagagaaaagatcaaggccggccgatccccctttctcccctacgggttttcggttgataatttatactggcccctcaactccggggaactttgctccagggcactgggccaggcctcgggttcgcgccctcctctgggacgcggggcgtggagcggcagcggggcgcggcctgtgcgctctcggtggcactaagcgggggtcccaggcagcgacgggcgctcagcctagtgtggcgacgtgggtaggcgaacccaggcctcccgggcaccggcgtaacctctgcgagctgcgcctcttggacatttctgggacatcctcctcccgccacccttaatgtagcagatcaagaagaggtgtctcagcaattgcggggaggtggacgtgagagtgggccagttccagtccactttggttatgaactgggacaatcaggggcgctgggagtatctcagggtccaggaatagggcgggcttgggccggggctgctggggagaaggccgaggcctgcagggggtcgggtggagtggctccagagtggagagtggggatgggcgcgggtggcctagggaccaggggcgcctggcatttttgtagggacggaggggctgggaccagagagaggggaccagaggtccaggtagaggtggggcgcaggcggtctgcgcttcggggaagagggaatgggggaggaatgggaatcagaaatgcgtgggtccgtcaggggccagcgggctgggccgctgtaggaggacctcggggctgggagaaagggggtgtccagggcgtg

SEQ ID NO: 13307 - DNA, 1213 bp, Artificial sequence
  DNA replication origin
tgcaggtgaagtaatgatcacaatttttttaatatatattttttcttaagtattttattttgtttttgaaacaggatttcactgttgcccagggtggagtgcagtagggcgcgatctcggctcactgcaacctccacctcttgggctcatgtgattcttccacctcagcctcccgagtagctgggattataagccaagcacgcatcgtcacatccggtaatttttgtatttttagtagagaaggggtttctccatgttagccaggctggtttcgaactcctggcctcaagtgacccacccaccatggcctcccaaagtgctaggattgaaggcgagagccaccgcgcccggccaccgtgttggccaccatgttaactagaggtgttagcaacctcctgtgggccaggcccttcaggggcattaccttgggcttaccacatcaggcccctgagagttgggggcttctacctatgtggaggacccagaagagctaatatggggggcgggggttggaggtgaagggcaggagttaggtgaggggagatggtgatctctggcctcacaggagggtgcccctgaaagaacaaaccccaggtcctgaggcgctttcaggctcaggtgtgataggggacccttttgttgtggagacagggtctcactctgtcatccaggctggagtgcagtggcgcgatctccgctcactgcagcctcaacctcttggtctcaagcgattctcccacttcagccttcggagtagctaggactacatgcacacgccaccatgcctggataatttttgtatgtttggtagagacagggttttgccatattgtcgaactcctgggctcaaggaatcctcccacctcagcctccccagtagctggtattacaggctttctccactatgtccggctaatttttgcatttttttggtagagatgggggtcttgccatattgctcaggctggtctcgaactcctgacctcaagccatcctcccgccttggcctcctaaagtgctaggattacaggcaagagcccctggcgtccggcctgacctttcttaatatccctttggagcaaagtaggggcggctctatcaggactccaaggaaagacgggaagggagatggggccaacccgccagagctccagagcaccgggttctcacctggcgtaaggattatgctaatacaagccccgccccgtcccag

SEQ ID NO: 13308 - DNA, 1181 bp, Artificial sequence
  DNA replication origin
cccagccaccctgcccccacctctgggctgggtttgggagctttgggttcttgtctgtgtctgactgtgtgaccttgggcgcacgactttccgtctctgggcctggctctccctccgtgacatgggaaggtttactgttcctgggccactcgtgtggagatggggacagagtaaaacggaacaccaggttgctttgggggacagtgtggcccactccaaccaagtccctctgggccttcacaagggggatggtgttacagggtcagctgagtcaggaagtcagggggaccagggatctatgagagctgagctggtccccactttgcccaagaacttatcttacactcagcaactcccctgccccatgtcctgcccaggccctcagatgcaggagaagtctcagaatacaggtctgggaatctcaggtccgccccagggaagctcagctcctcagcctagggtagcttctgggagaggaggaagattctgtaataccagaagaggtctgagctgtagtagccaggagtttccccatcttgagaagatgacccatctcacttctccctaattgccccctaaggacacagtctgctggctgagccaggccagggctcagtttagaatcagggttggggctcaggctggggttgggactcagcctggggaccacatgggagggcagctcagagccagggtccaggaagcatccgcctggtgtcttggaatcctgtgattgaaatcctctggccgatataggggtggcactggtggagatgatgtttgtcagctgaagtggagggctggcatatgagcttctgcaggctgtagagtgggatggaagagtggactggaagcgtggaagtgggagaggtcatgtctccgaggctcctgcagccacacttgcccagagtctctagtgccttcaggcaatggccctccctgggtaccctccccggggctgtctttggccctgctgccagccctgtggtggctaaatgcaagcttagacatgtgttgggtttgtcaggggctgggagaggccatcattagtgcagtcctcactctctggttagggccaaagaaaaagttttggctacagatgtggggcagaggagggaagagagaggggacgtgcaggcttaggattgctgttcagataggagaagaggaagaggaactgg

SEQ ID NO: 13309 - DNA, 1435 bp, Artificial sequence
  DNA replication origin
ctgggggccgggcaccgagcccccggggaaagtagagggggttaaaggtgagcgggcacgagccggcggcagacggggattggcaggcgcccgagcccagggcccgggccatggctgccccacaggcctctgagcggctgagcggctgccgcccacgtgctaaggagagaaggaggcaccagatcaaggggcaaaggacacctcggagcggggcgggggtgcccgcgtccacacccgctgctaaaagccgggcccgcggcgcagcgcacggagccctctgccgcccgcgcggagaaggcgccgggcgcggtccggcggtcccaagcatccccgcagcgcccccgccgcccgccgcccgcccctggccgcgccgcgcccctctgcaggtcgagcggattccaggtgagggcgtggagcccccgcgtcatcaggtgggtgcaggggcctcacccaaggggaattggatccgcctctgtgctgggcctcagtttcccctctgcccatagaggcgcgcgtctctggctcagctgggttgaaggggttcataggcttatgtggcctcctcgctcagcctcagctgccaggaggaaggaggcaaactcgtaccccagggaggactccggatcaggaatccaagaattcatcctgctagaaggtgaagtgcacacgggtcctggaagccccgtgtctcccactggctggactgggctgggcttccatcctggtctgggaggttctcccaggagctgagagggggcccagggagtcaggagggagggccttcctccctctggctctccctgccctgggcaggtgacatgccagtggagaaaccctgtccaggtgggccctgggatgaggaggaccaaaactgcccctggctgggacagaaagaagggagatggcagggtggggtatgtggattctggcccctaggcttctagccaacaggtgggggccacagaagtggtggccggcactcctgctgctctgcccaggggggaaagccagggcttcctcccagccaccctgcccccacctctgggctgggtttgggagctttgggttcttgtctgtgtctgactgtgtgaccttgggcgcacgactttccgtctctgggcctggctctccctccgtgacatgggaaggtttactgttcctgggccactcgtgtggagatggggacagagtaaaacggaacaccaggttgctttgggggacagtgtggcccactccaaccaagtccctctgggccttcacaagggggatggtgttacagggtcagctgagtcaggaagtcagggggaccagggatctatgagagctgagctggtccccactttgcccaagaacttatcttacactcagcaactcccctgccccatgtcctgcccaggccctcagatgcaggagaagtctcagaatacaggtctgg

SEQ ID NO: 13310 - DNA, 2972 bp, Artificial sequence
  DNA replication origin
ggtgtctaagcgatcctcccacctcagtatcccaaagcgctggggttagaggcatgaaccaccatgccccactggagaacatcttattcatacctccctgcctctcctgttttacatatgggtagggtcaacccaggatgcccagttaaatttgagttttagataagcattatgaataatctcttagtataagtatgccacaaatatggcatgagacatacttatactaaaaaaagccattgtgtatctgaaattcaaatttaatggggcatcctggatttgtatttgctaaatccaccaaccctatgtatggggaaactgaggccctgggagatggagtatcagtatcatgcccagttgcagagccagtcaatgtggtggtggctcaagccccacttcctttacacacacacacacacacacacacgctgactctgggtcctggcgctggccatgaacaggtgtctgtccaaggtagcagactgaagcctactagtaggaggtcacgtgacaagaaactcatgcaagacaggaaacagtgggcagagaaggccaagctgacccaccaggacgtatgaggcaggtggaagaagcaggaggtgtcttcatctgcttccttctcaagatgcacccttccaccaccaccgcccaccctcaggcagagtgaattccaaatggggtgtggggctgggcgcagtggctcacacctgtaatcccagcactttgggaggccgaggcaggcagatcacttgaggccaggagtttgagaccagcctggccaacatggcaaaaccccatctttactaaaagtacaaaaaaactggccgggcgtggtggcatgcacctgtagtcccaactatttgagaggctgaggcaggagaatcacttgaacccaggaggcggaggttgcggtgagctgagattgcaccattgcactccagcctgggtgacagagcgagaccttgtctcaaaacaaataaatggtgtgtgggcagaatctgatcaactcagggtctcttctgggctcgggctcagcctcatcctccggcatgcccccggccttccccctgcgctctacctcctgccatcaccaggggactctgaggggcattattggcaggatcccttctgcctctgctgccccccgctagccgtagaaggaaggaagcccgtggggctgggaggaagctgcctcattgctgggtagggtggctgtgaaagccctttcttctttccatcccacactgcccgctcctggccgagcggtggccagggggatccttccttctaccccacacggccccttgaagctggcaggcaagctgaggtcctgaatgcccccttcccaggtggtgcctactccacaggacctctgaggacttggaggcatccatcctggactttgaaactgataccaccgctggcctatcccgctctctcactgggctgctacgccaagggtgtttaaggatgtttgtggagtaaatgtaagagtctgggccaggcccagtggcttgcacctgtaatcccagcactttgggaggtcgaggtgggaggattgcttaagaccaggagatagagaccaacgtgggcaacatagtgagaacccattgcttaaaaaaaaagagttgagaggacacagcactaagagcaagagaggggaagtcagtgggccccggaaggcaggaagggcctcagggaggggtgaggaatgggggctcagggaggggagtggggtttagggaggggatgtgatgtcaagggcagggagggtgggggcttgaggggggactcagagggagcatgggatgaagctggtcaaagagggaatgaatggggctcagtgagccagatgagagagagacaggagatagacagtgagagagagagagagacagagacagagggagagacagagagggagaggagaggaagagagagggggggaaaggagggggagagacagagtgagagacagagagaaggaaagagagaagagaaagggagagagaagggggagagggagtgagagagggaaagagagaaaggcaaggggggagaatgagagagagagagaggagagagagggagagagagaaagaggagggggtagagacagagagaaagtgagagagagagaggagagagagagggagagagacagagtgagagagagaggagagagagggaaaggggggagaatgagagagaaagagagaggggggagaaagagaggaggggggagagagagaaagtcagaaagtgagagagagaggagagagagggagagagacagagtgagagacagagagaggagagagatggaaagagagggaggagaatgagagagagaggggggagagagggagagagaaaaagagaagagaaaggagagagagaggaggggatagagagaaagtaaaggagagagagaggagggtgggagagagagaggagagccagggtcagagggaaagagagaagacagagggagagagacggggcagggagagacaagggacagagagacagtgtgagagagagagagaaagaaagaggagggggagaatgagagagagagaggagagaggggggagagtgaaaaaggaggggaatagagagagaaagagaaagtgagagagatagaggagagagacagagtgagagacagagagagaggagagagagagggaaagagaggaagggggagaatgagagagatgagagaagggggagagagaagagggggtagagagaaagtgaggggagagggagagaggagcctggaggagagaagagagagggagaggaaagggagggggagagagagaaagagagaaagcggggagagaagagagtaagagtgagggatgagagtgagagagagtgctggggggactcagggactaggaggaggttcaaagccgggctggggctctgggaggagcccgaggcggtcccagcgtctttct

SEQ ID NO: 13311 - DNA, 1325 bp, Artificial sequence
  DNA replication origin
ggcggagcggtgcgtgcggccggagccggagcggatcctggagccggagcggagcggagcggagcggagccggggcggagcgggccgagcgggccgagccagcagccgagctgggggcgcgggcgggcggcatgtaccgggcccgggcggcgcgggcggggccggagcccggcagcccggggcgctttgggatcctcagcaccgggcagctccgggacctgcttcaggatgagcccaagctggaccggatcgtgcggctcagcaggaaggtagcgcggggggctcgagcggggggcgcgggggacgggcagcggcctgcgggacctgccgctcgagggaagggccgcgcgggccgggccgcggggccgcccgtgggcgcggagcctggcacgtacgagtgggccccgcggagccacccccgggggagggggcgcttggagctggcctggggcgggtggggcgccggggacccgaggggggcgcctgtgcacccccaggatggccgcgaggcgtgtcctacagcggatgctccggggaggtgtgttccggggggctgtgttgtggggggccctggctcgcacacccacgttctgtaagggccagaaagaggaggcgccttccactgggagaactaggggcctgtctgacacctggaggggccgttgggggttcacgcattctgggggcgcaagagggggctttgtgcctggcgttggggaggggtgctggaagctgccgtgtgtattgcataggccaccgtaagagaaagttgtatatttcacgggagataggcccgggctggttgtctgtggggggcagaaagggcaagtgtgtgttgaaagcaggcaggcgaggaggggcttgtgcatcccacaagggacagatggaggggagtgcgttctccaggggcagggaggggaggttgggccctgctagagacaaggaaaaagccttctccagggccggggctgctgtaagcccggagcagggaggaaaagggggtgtgtattccttggggtgtgaggattccactggaggcagaggaaggggtgggaagggaagagagggtgacccgagggggtgctgtgaggggacggggtgcagacacccctctggagaggatgagcagggggtgggagtgttttcggtgcaaacacctgaggaggaaacagacaaaggcctggagtgagagggaagctgtccatgcatggaaaatggggcagaggagggaggggcactcctccgggacctgagcagacatattaattgaaaaattaaaaattaactaacatttgtagaggcctttatagttttcctcacttaag

SEQ ID NO: 13312 - DNA, 1935 bp, Artificial sequence
  DNA replication origin
tattaattgaaaaattaaaaattaactaacatttgtagaggcctttatagttttcctcacttaagtctctcaacaaccccataaggtggatgttttttaactcgatttgtaaaagaggaaactgaggccagagagggagctcagggcagagccagttctggtcccggcctgtcatcgtcccttcacctgttgggttcaccaccctgaaggggtgcctgacaggtgcctttggcctggccctcaggcacggtcgcccagtagggtggacggggcagtagggtggacagggcagatcccctgagcgggcctcttagctcctctctgcccgcagttccagggcctgcagctggagcgtgaggcctgcctggcctccaactacgcgctggccaaggagaacctggccctgcggccccgcctggagatgggccgggctgccctggccatcaaataccaggagcttcgtgaggtggccgagaactgcgcggacaagctgcagcgactgggtgagggcacgtctgggagaaccccctggggctggtgggggcagttggccatccggtgggttggccttgggaagtgccaggctctgatggatgggagttgggcggacctgctcctggcttgctgggcagtagagttgaggaagtgagaggaagtggggagggttgggtgggagaaaggggacccaatacgcagggtccccctgagatgctgagggggacaaagcctcccctgtctcttttgtactaggacgaggagcagaaacttggtaggggccggatccacaaagcggtcacatgggcacggtacagatgaggaaactgaggctctagaccaggggaaagggaaatatagaatcacatggggtcagcgggagagtgcaagcccggggccctggcctgtctgtcactctgtccctctgtggccctcagaggaaagcatgcatcgctggagtccccactgcgcgctgggctggctgcaggctgagctagaagaggcggagcaggaggcagaggtgaggggaggggtggctggggctgggggccaggagggagacccattctctgccaccccctggctcattcttacacctcaggctggggagcccctcctctgggaagtccaccctgaatgcctggcgcatgccagagcctagcattgctgtccaccagcactggacagccagcagggctcactttcctacctgtgaatttttttcgggctcccctgtgactgggctagggcagcgtggatctggggctacagaggagctggggcagactttgtgctgggttgggagtgcagcgatcagtgagctgaaggtggtgggctcccgaaggacatgttaagtctatacttcacatatgtccctgcctctgctcctgcctcatctctgatccagcaggtctggtgatggcatccttattttagaagttagggctgggcacagtggctcacgcctgtaatcccagcactttgggagaccgaggcgggcggatcgcctgaggtcaggagttcgagaccagcctgaccaacatggtgaaaccccgtctctacaaaatacaaaaaaaaattagccgggcgtggtggtgcatgtctgtcatctcagctacttgggaggctgaggcaggagaattgcttgaacccgggaggtggaggttgcagtgagccgagattgcgccactgcactccagcctggaccacagtgagactctgtctcaggaaaaaaaaaaaaaagtgggaggacatttgtccacagttcacttagcaagtaatcggaggcaggcccaggctggaacgcaggtcccctgtcccccagctgaggggtgatcaccatggggagggcctcagggtgggaaggagtgaggaccagtccccagtctgtggtcgtgcctctcccaagccttcccttccctcccggcccaggagcagatg

SEQ ID NO: 13313 - DNA, 867 bp, Artificial sequence
  DNA replication origin
ggcaggcccctccccctggcctcaggcaggccctggccctggaggctgagctggggaggagggtcccctggaagaggcccgagagggggctgggggtgggtgggcagggctttatgcctctggcgctgaagacaccctgccttttttgtttccgtgccccggggcctctagggtgatggaccagccccgttaaagaacttgactcaactacaggggcctgggaagatgcctgggtcccctaggggccttgccaaggggacctgtcgcaccccaccactccactgggctcgcacaacgccaaggccgccaggagtgttttacatcatgtcctgagcctacctttcccccaaattctggggcccacagcctaggagccaggtgatcaggcctcggctgtggggccagggacaccatggccctggggctactacgtgtccacacatgctccagaccctggggcaaggtaggccaggggcttctgacctgtgcaggtgagagtgggccatacccaggaaagaccattctgtatttttctgtccctgtctccttagaatggaagctttttgagggcaggtccttgtctttgtacgttctgtccccagccccgcctcttaggggccgtcaataaatgtgatgatgaggatgacgatgctgcccgactcctctctgctgttgcagcctccacagctcagctcctgtgcttccacttcctacttttgagatgctctcccctcctttctgcccatgcaaagcccagctgtccgggtccaacaccgccgctgcctcttccatgaagccttctctgattaccaacccgttgagagcctttcctaaatcttaacttcccggcatttccagtcagaagcg

SEQ ID NO: 13314 - DNA, 958 bp, Artificial sequence
  DNA replication origin
catggcagcctgagcctccctggcagtgatcagcgactgagactcagagctgggctgtccctcagggccacctctcccctaacctgaaaagcagcaccatgtggccagctggtccccacccctcagggctctgcttgtggggacagctggagaggacagggcaggtcagctggaggcgaggttagggtccccagggaagagcagaacctgggcccaccgagttactgaaggcaaggaagggtggcctgtgtcaccctggcggccctgcctgggtctgctcctcgctgtgcacactgcatcacgccccgctggctgcctccctctgcctcttcccgtacagacgcacactcacagagatcatgcacacgacacggggcggggacggagggcccatggcagagaagggagcatgggggccgggagggagggtgctctgagccagaggcgggggttgggagggcagcccagccaggtggcagcagccagggcctccttggagtggcccacctggagtggagtggcagtttgggtggcttctaggcgaagatgcccccaacagtggaggcgatgacgatgcccaggatcacacagcagatgatgatcatgattttcttctgcatgggaagcgggcaggagaggcctcagacagtgttggcggcaggtggggtgggactatggcaaaggctgaggactggacagtcgggggggatccaagcaggggaaggtgacggcctgggagggggctgtcatggggagctcctgagagaagggagagaggtgggatggggagggatgtgggatggttgggggtccctaatgggtgctggggcatggccttgggcagggctgggctactgacccggcgcgccttgctctggtacttgacggccttcttggtgtcagacacggccctctccacatagtctaccgcgtgttccacattgtactcgatcctgtc

SEQ ID NO: 13315 - DNA, 1304 bp, Artificial sequence
  DNA replication origin
gaaggcctgaaccgctcctccgctgacctgaggatccggaagacacaggtgcggccacggagtctaggatgggcgggcacctgagtctctgggtcggtccccgcagggcctgacccctgcacctccatctcgggcccccagcactccacgctgtccagaaagtttgtggaggtcatgtcggagtacaacgccacgcagtccgactaccgcgagcgctgcaaaggccgcatccagaggcagctggagatcagtgagctgggggtggggcctggggcggggcctggagcctggaggggcggggcccgagtctgctgctgagtgcgtggctcaaggctgctgcttagttaggggcccgaggcgggtggcccgaggcagctgctgagtttggggctggaggggcgggggcctgaggcggctgctgtgttaagggccgggggggcggggcctgaggctgccgctgagctcggggctggggggagcccgggcctgggacggagggggcggggcccaatgctgctgctgaactccccgaagagggctgggctcagtgtgaccccactcgcttgcagccggcaggaccacgaccagtgaggagctggaggacatgctggagagtgggaaccccgccatctttgcctctggggtgagtgtaggccccatccctcctgccatgaccccctcaccatgttccctacgtccatgacccctagtgctgggtctggacagtatttggacacagaccccttgtaaggcaggttttagggaaggaagagtcccagagaggggaaaacaccaggctgaggtcacataaatgtcagcggcaaaggtggactcaagacccctgtctcctgatgcctcccagttggactcactttcgccggcggccagcggctcctcctcttatccgtgggcccttttcctctcctggaggacatttggccatttctgtgttcacgtgaagccgggcaggggtgctccctgaaggatgtggcacacaggtgttcgaggcaggcttggggctgtgagttccaggagagaggggaggagcagtcacattcaatgtgggggaagggacgggagaaaggcagttccaggcttgggtccacggggcagtcaacttcggctctgcaaaatgctggtgataaggactgtcactgagcactcgctctgtggccagcacaggtggaaagtgtcactagccccacgttacaggtaggagattggcttgcagagaaattaggtaacagctagcatgtggcagagccaggtagcaaggcggggaaggctgcggcttgggaggaagc

SEQ ID NO: 13316 - DNA, 1695 bp, Artificial sequence
  DNA replication origin
ggagaaagaagagggaggaggaggaggaagagggagggagggagggctgggagcggtgcacagccgctgtccccagcaccatctctgttcagcccagcccagcccagcccgccccagtccagcccagtccagcccagtccagctcagccagtgctggcctcttcctttctggggattctgggctgaaaattctgactcctggggcttcaggcctcctacaaatgtggagctggagtcaggagacctgtagccctgcttctcgtcccgagaaactgaattctaggctttcccatccccacttcacagatgggaaccctaggtccagagggaaagcagcctgtgggaacagtggccccaccaagactgactgtctcaccccaccccgggtgggctcctgcctgccagccgtccacctgtctgctagaaagccctccctgggcagggccacccagcaatgggtacagcctccctgggctctgaatgccttgtgtggggagggtgggggtgtctggagcggaagcctcagaccattcaaagcaaagcctggcttcaccatctaatcagggggcgaggaggtagtaacagagacagacatcagagcaaaaagatctgggttcaaacgcttcacaaccccagctccactggctgtcccccagtgtcagccaggcctgagtctgactatcttcagggatgaggcaaagcccttttctaccacccctccctctagcaggcaagccgtgtttcttttgtgcctcagtttccccttcagctagggggatgaaggctgacatgccagaggctattatcctatgtaggggcccatggttcccctgaccacttggttcccacacacaccctcaggtaacctaccaggcgcctaaacatcagcacattacaccacacagccatccgtcaccaggaaaacactcattctgactcaacggagctcaggaaacttgagggcaaccacaggggccgcgggggaagtgtttagagcccatatgcgacttgagggaccatcttcttcctttgaaacctcatggggtttacaccaggggctgggcgctcggccaggaataacaggtctggaggcaaagtggaggccgtggtgccagagcaagtgggggacatgaaggcaggggagcccaggtcccggctccaggatgcccaggaggcaaccatgacataatggggcagacaggctccaactcagggagcctctgggtggagaagacaagccgtggggtcaaatgcccaaaggacacttgacattttccataggaggggaccttagggttctagttcctagcccagggagcggggtggggggtgctcccagggatcagcaggcagggctgccagccaggtggccagccaggggaccagatgaccagatgagactcaatctagtcttgagccttgatccaccccccctccccgacacacccagagaggcttcatttccgtcgctgtcctccactcccggtcaccatcctcctgggctcctcatccctaagggcagaggccaggggaaggggacccacgcaggctgcaggggtctctgggctgggagaaggtgggctctgactcagaacgtttgtgcatcctcctactccccccaaaccccgccccaggagccacaccccaggggtttcccagatacaggtagaaaaatagatccaagtcgcaaggaac

SEQ ID NO: 13317 - DNA, 1071 bp, Artificial sequence
  DNA replication origin
gcaggagaattgcttgaactcgggaggtggaggttgcagtgagccaagatcgtgctactgcactccagactgggcaacagagtgagactccgtctcaaaaaaaaaaaaaaaaaataggccgggcacggtggctcacgcctataagcccagcactttgggaggccgaggcgggagaatcaagaggtcaagagtttgagaccagcctgctcaacatggtgaaaccctgtctctactaaaaaatacaaaaaattagccgggcgtggtggtgggcacctgtaatcccagctacttgggaggatgaggcaggagactcgcttgaacccaggaggcagagctgagatagcgccactgcactccagcctgggcgacaagagtgaaactccatctcataaataaataatcaaacaaacaaacaaacataaaaagatagaggagttccttcatcctgcaggaaaaaggggtgggtcacgcagcatcagagctgtgaactgagaaatcctagggaaagaagaggccagtgcctgagtccctactggatgatgggagcaagggggaagggtggaggctcccagactggaactctccaggaggtttttggctggggaacagaagggagagcaggaggtcccaaggtaatgaaatgaaggagggagttacaaccttcagcaaattctggggaagtgaagggatctgaggatgaggaccggattctgggacagggatgctgagctgctaagtcgggaagaggctggaagccaggcacggtggctcacgcctgtaatcgcagagctttgggaggagggaggatcgcttgaggacaggagttcaagaccagcctgagtaacatagcaagaccctgtctctacaaaatatttgaaaattattcaggagtagtggcgagcaactctagtcccagccacccaggagactgaggcgggaggattgcctgagctcaggagctcaaggctgcagtgagctatgattgcaccacagcactccagcctgggcgacagagcgagaccctgtctccaaaaataataaataaaaaacgagacagggctggggcagagg

SEQ ID NO: 13318 - DNA, 1021 bp, Artificial sequence
  DNA replication origin
gccactttaagaatcacatctgtaatcccagcacttagagaggccgaggcaggaggatcatttgagcccaggagtttgagaccagcctgggcaacaacagccagaccctgtctcaataaaaaagaaaaaagaaagaatctgtacatgtgatgagactgttcctgggagacactgggtcttccacagaatcaggaggcagaaaaaaatagttgacaaccagtggggcacagtggctcatgcctgtaatcccagcactttgggagtccgaggcgggtggatcacctgaggtcaggagttcgagaccagcctggccaatacggtgaaaccctgtctctactaaaaatacaaaaatagctgggcgtggtggtgcgtgccggtaatcccagctactctgaagactaaggcaggagaatcgcttgaacctgggaggtggaggttgcagtgagccaagatcgtgccactgcactccagcctgggtgacagagcgagactccatctcaaaaaaaaaaattgacaactgttactgtcagcagggcctgttggaggttagggagcagagggagcaatgactggaagcaggagaatctgtggggctggtgggaatctgtggacaatccgtgggaaggcttggtgggcagcaggtgcgggtgaggcagggaggtggcagagagagcttgtggagatgttctggataccagagccctggcctgatcctgtaccgtccccaccttctctggatgactggggccaacctaacctgttccgaagaaaataaatactcggacataatcctttgttgtgagattaatttgttgttttgttcacggctgcgtctaggaaggtgcttggcgtgcagtgagaggctctaatggatctgggcttgttgaagcaaggcaggaaggagccagtgttctcaaagtgttgggtgagtagtaggggaggcgcagccggcagcagacctgcagggattaccattcccacatgggaaaggttgctgtgtgaggattaaacacaataacgt

SEQ ID NO: 13319 - DNA, 923 bp, Artificial sequence
  DNA replication origin
aatctgggaggcagaggttgcagtgagccgagaccaagccattgcactccagcctggcaacaagagcaaaattccatctcaaaaagaaaaaggagaaagagagaaggatgggagagagagaggagagagaaggggggggcaagagagaagagagtgaaagtgagagagagaggaaggaaaggaaaagaaagagagaaaaagaaagatgggggagggagagaaagagaaagaaagaagagaaagagaggaagggagaaaggaaaggagaaagggaaggaggaaaagagagagaaagaggaaaggaagaaagagaaagagaaagaacgaaagaaggggaaagaaagaaagggaggaaagacaaagaaaaaagaaaaaaaaggaaggaaggaaaggaaagaaagaaagggagggaaagagggagggaggaagaggaagagatagagggagggagggtagaagggagggaaagagagggaaagaaagagagggagggaggggatgaggatgaaaggatgggactggaaaaggggtggggctcagcaaggggaagggctccaagagggaagggggcttagagattggagggggctcagtgaaggggccgggcttagtgagaggaaaggatgggagaaggaggtcgccttagacaatgaaggggcttagggaaaggagatggagggaaccgagaggaggtttctctgggtctgtctgggatgggatttgcaggcatgggcagaggaccaaggggttgcatctgcctccacccccagcagtccctggccaggagagccggggagccatggaggcaggggcagggttattcatttaccagcagcttcaagagagcagcctggacgccatccctcctggctacactgtgaggcccaggtctcgcctgcctccttagcccaccccagcaaccc

SEQ ID NO: 13320 - DNA, 1263 bp, Artificial sequence
  DNA replication origin
gcccaatctaggaagcaggcatgagcactttccgcacgccatggctggggatgggaggggaaggtggcagagatgtgcccctgggtctgtgctgggagcccggaccccgcacaatacccgacacattcggaatctcccgtgcgccttgtgaaagagcgcattccgtactgccatttcctattggaaaaacgaaaacaaaaagacctattgtttggataaaacacgccaccaaaagtaaaaccgggccaaatcttctcacctgggggagagatgagaaagggtccccatctccttcctgggaccctcaagggagggaaagagggaggacttagaaggggtatctcagaggggcttgaggccgggtctcactggctcactcctagaggacgaggtgggaggctcgcttgagcccaggagttcgagaccaacctgggctacatagcaagaccctatctctaccaaaaaaaaaaaaaattaactgggtatgatggcatacacctgtggtcccagctactcaggaggctgaagcaggaggatggcttgagcccaggaggtaaaggctaccgtgagctatgattgtgccactgcactccagctggggcaacagagtgagaccctgtctcaaaaacaacaacgacaaaacacacacacacacacacacacacacacacacacacacaccccagaggagtggttaaggtgaacagtgtggagaggcactggtgccttggagaaaacacaggagattcaggcgggaaaaggggcctgaacccaggcacagggtgacttggtgggggcgagagattcaaatgactggatggaacataaagggagacaggaagtgtcagtaaagcccaggactccagcaagcaaaggccaagtcatggagagtccgtatgtggaattacaaactttgaaccttactctgggtgtagggagtcatgaaaggggaagtacctggtcagatgcttttaacctctccagcagcccctgtggaactgggattcaaggagaaagataaaggaggggaaccacctaacaggatatgccgccatcttggagtgaaatgatggtggccagaaattaggcaggggcagggagtgggggcagaacctgacaggggctgttaaagtgggcaggacccgggagccatttggatgtgcagggtgagagaggcgagaatctagaaaagaaggctggaatctgggagtttcaacttaggtcactgattggatagtggtatcatttaccaaaataggagac

SEQ ID NO: 13321 - DNA, 1538 bp, Artificial sequence
  DNA replication origin
gcccatgtggcgcgtgtcggccttcatcggcagcaacatcatcacgtcgcagaacatctgggagggcctgtggatgaactgcgtggtgcagagcaccggccagatgcagtgcaaggtgtacgactcgctgctggcactgccacaggaccttcaggcggcccgcgccctcatcgtggtggccatcctgctggccgccttcgggctgctagtggcgctggtgggcgcccagtgcaccaactgcgtgcaggacgacacggccaaggccaagatcaccatcgtggcaggcgtgctgttccttctcgccgccctgctcaccctcgtgccggtgtcctggtcggccaacaccattatccgggacttctacaaccccgtggtgcccgaggcgcagaagcgcgagatgggcgcgggcctgtacgtgggctgggcggccgcggcgctgcagctgctggggggcgcgctgctctgctgctcgtgtcccccacgcgagaagaagtacacggccaccaaggtcgtctactccgcgccgcgctccaccggcccgggagccagcctgggcacaggctacgaccgcaaggactacgtctaagggacagacgcagggagaccccaccaccaccaccaccaccaacaccaccaccaccaccgcgagctggagcgcgcaccaggccatccagcgtgcagccttgcctcggaggccagcccacccccagaagccaggaagcccccgcgctggactggggcagcttccccagcagccacggctttgcgggccgggcagtcgacttcggggcccagggaccaacctgcatggactgtgaaacctcacccttctggagcacggggcctgggtgaccgccaatacttgaccaccccgtcgagccccatcgggccgctgcccccatgctcgcgctgggcagggaccggcagccctggaaggggcacttgatatttttcaataaaagcctttcgttttgcactcgctggagcctccttgttcccagcgcctccacctccctgcagagctccccctcggggcggccttggctggatctcgctctcccggatggagcttagagggaagatggggttgtaagctgagcttggtgatggcggggtggtcacttgcccactccctggggattcggaagacagcctgtgaggccaaagccagcgcccaatctaggaagcaggcatgagcactttccgcacgccatggctggggatgggaggggaaggtggcagagatgtgcccctgggtctgtgctgggagcccggaccccgcacaatacccgacacattcggaatctcccgtgcgccttgtgaaagagcgcattccgtactgccatttcctattggaaaaacgaaaacaaaaagacctattgtttggataaaacacgccaccaaaagtaaaaccgggccaaatcttctcacctgggggagagatgagaaagggtccccatctccttcctgggaccctcaagggagggaaagagggaggacttagaaggggtatctcagaggggcttgaggccgggtct

SEQ ID NO: 13322 - DNA, 1939 bp, Artificial sequence
  DNA replication origin
aggatggccaccacgatgagggcgcgggccgcctgaaggtcctgtggcagtgccagcagcgagtcgtacaccttgcactgcatctggccggtgctctgcaccacgcagttcatccacaggccctcccagatgttctgcgacgtgatgatgttgctgccgatgaaggccgacacgcgccacatgggcaacgcgcagcacacgatggtgcccagccagcccagcacggccagcgcggtgcccgtgatctccaggcccatggacatggctgccgcggcaaggcccgctccaccgggtggctccgggtgcggggagacgaggggccggggccgctgggcctggcgggagctgcggcgccccgacggacggacggacggacggactgactcaccgacggcgcgcgctaacggctcggctccatacgctctcgccgcggctgcgcctgcacctgcctgtggctttgtgggcgggcggcggcgactgggctggccctgggctggggccggtgcgtcttagctaagtgcccagcgctccggtgggggcggtaggggcggagccgcgctctccagggcctaaggacagtgacgtggcccctgcctcccaccttcaccgagcgtcctgggaggaaggacttggccctgcgcggcccacaacgccggggtaggggggttgccaaggaagggcgggacctgacccagcccccgcccctcggtccttgtccctctctgctcgggaatgaattctccggggcaaaaccgaggacgggatgcgtcaggggcttggggtgcaaatcccaaagaatttgacacggcttctctctcctcaccactttgggcgcttttggcacgtgccgcgtggggatgggggcgctgccaattaccccggaacggcggggcggggaggaccagggtgggcgtggccgcggctgtttgcaggagccgcgcacctgctgctctgcccctcccgtacacacgtcgcacaggctcagcctgagtccgggcggtggggttgtccagcccaggaattgctgggcccagaagccagggactgcctgcgcaaaggtacccaaaagatgcccttaagcctaactaagctcaaattcctctccagctctccctccagttcccatcgctggccgtgagcctgcatgcctttagctaagctgctctcccctcccagaagtccccctcctcccattgagtcccctcccctctccgagccctgtcctccctccctttgagcctgagtcagggctgaggcccaccttaatgaaatggtggtgaaagaggttcgatctccgcaaaagtgggaaatcgggcaggaccgagcaccgtggtggctgactcctgtaatcctcgcactttgggaggctgagaagggaggattgcttgagaccaggagttcgacaccagcctgggcaaaatagtgagaccccgtctctacaaaaaattaaaaaactagccaggtgtggtggcgtgtgcctatagtcccaactactccggaggctcaggcaggaaattacttgagcccaggagttcgaggctgcagtgagctatgatcgcaccactgcactccagcctgggcatcagagcagaccctgtttaaaaaaaaaaaaaaaaaaaaaaaaaaaggttgggaagtcagaaatgctacactcaaagccctggctgtcacacctggacgatcgttcccccttcttcaccaagctcagagcccttcagatttggccttggaggttcagcctgggctgttcctaaccccatcccctctcttcccctcagagcagcccttgcataccacatgcccctgcctcagagtccctgcacttactgtcccctgtacatggaacatgcctgcagacatccacatagcttactcctaactgccttcagctttttgctctcagtgagtctttccctgaccaccctatttaaaactgcag

SEQ ID NO: 13323 - DNA, 872 bp, Artificial sequence
  DNA replication origin
tgaggagcgtctctgcccggccgccatcccatctaggaagtgaggagcgcctcttcccggccgccatcacatctgggaagtgaggagcgtctctgcccggccgcctatcgtctgagatgtggggagcacctctgccccgccgccccgtccgggatgtgaggagcgtctctgcccggacgccccgtctgaaaagtgaggagaccctctgcctggcaaccgccccgtctgagaagtgaggagcccctccgcccggcagccgccccgtctgagaagtgaggagcccctccgcccagcagccaccccatctgggaagtgaggagcgtctctgcccggcagccacctcgtccgggagggaggtggggggggtcagccccccgcccggccagccgccccgtccggcaggtgaggggcgcctctgcccggccgcgcctactgggaagtgaggagcccctctgcccggccaccaccccgtctgggaggtgtacccaacagctcattgagaacgggccatgatgacaatggcggttttgtagaatagaaaggggggaaaggtggggaaaagattgagaaatcggatggttgctgtgtccgtgtagaaagaggtagacatgggagacttttcattttgttatgtactaagaaaaattcttctgccttgggatcttgttgatctgtgaccttacccccaaccctgtgctctctgaaacatgtgctgtatccactcagagttgaatggattaagggcggtgcaagatgtgctttgttaaacagatgcttgaaggcagcatgctcgttaagagtcatcaccactccctaatctcaagtacccagggacacaaacactgcggaaggccgcagggtcctctgcctag

SEQ ID NO: 13324 - DNA, 1162 bp, Artificial sequence
  DNA replication origin
gagtggatacagcacatgtttcagagagcacagggttgggggtaaggtcacagatcaacaagatcccaaggcagaagaatttttcttagtacataacaaaatgaaaagtctcccatgtctacctctttctacacggacacagcaaccatccgatttctcaatcttttccccacctttcccccctttctattctacaaaaccgccattgtcatcatggcccgttctcaatgagctgttgggtacacctcccagacggggtggtggccgggcagaggggctcctcacttcccagtaggcgcggccgggcagaggcgcccctcacctgccggacggggcggctggccgggcggggggctgaccccccccacctccctcccggacgaggtggctgccgggcagagacgctcctcacttcccagatggggtggctgctgggcggaggggctcctcacttctcagacggggcggctgccgggcggaggggctcctcacttctcagacggggcggttgccaggcagagggtctcctcacttttcagacggggcgtccgggcagagacgctcctcacatcccggacggggcggcggggcagaggtgctccccacatctcagacgataggcggccgggcagagacgctcctcacttcccagatgtgatggcggccgggaagaggcgctcctcacttcctagatgggatggcggccgggcagagacgctcctcactttccagactgggcagccaggcagaggggctcctcacatcccagacgatgggcggccaggcggagatgctcctcacttcccagacggggtggcggccgggcagaggctgcaatctcggcactttgggaggccaaggcaggctgctgggaggtggaggttgtagcgagccgagatcacgccactgcactccagcctgggcaccattgagcactgagtgaacgagactccgtctgcaatcccggcacctcgggaggccgaggctggcggatcactcgcggttaggagctggagaccagcccggccaacacagcgaatccccgtctccaccaaaaaaatacgaaaaccagtcaggcgtggcggcgcgcgcctgcaatcgcaggcactcggcaagctgaggcaggagaatcaggcagggaggttgcagtgagccgagatgg

SEQ ID NO: 13325 - DNA, 964 bp, Artificial sequence
  DNA replication origin
ctgggaaggtcaaaaggcaagagggtaacccacccttgggggagcagctatggccccaggagtaggggaggatccccagtggaggcaggtgtcactgcagccctgggctaatgggctctggaaggtggggaggggggtgggggcgagaaagaaggggaggaggaggagaggcgggagctgttctgagcccctggggtgatgtgattggcattgcggccccttcctcctcccctccccatcaccctctcagccccaaccaccccaccagggcctgggaggatggcagaaaccccagccacatgttcataatggaatagagagccagccaggccaagacaagctggcagaccccagacatgccctgcccccaccctgagccccttcccctctcttagccgcctcgccaagccaggccctcccaccccagggagcgagagggcagggaagtgacaggacagaagggtaggggactttaagagggaggggcagtggagggagggggtgcgggggaactgggaggggaagggtctccaggagaagaggagcttcagataggggagggggctcttggagaggaatggggctcagggaagaaaggggagcttacagaggggagtctgggagtggagggggcctggggcatagtcctgcaggggaaggggctcctggtgggcagaggggcttaagatataaaccagatgtggccaggcgcggtggctaatgcctgtaatcccagaactttgggaggccaaggtgggcggatcacttgaggtcaggagttcgagaccagcctggccaaaatggtgaaaacccatctctgttaaaaatacaaaaattagccagggcatggtggtgcatgcctgtagtcccagctactcaggaggctgaggcaggagaatcacttgaacctgggaggcagaggttgaactaagccaagattatgccactgcaccccaacctgggc

SEQ ID NO: 13326 - DNA, 964 bp, Artificial sequence
  DNA replication origin
ctccaccaaaaccagtcaggcgtggcggcgcgagtctgcaatcacaggcactcggcaggctgagtcaggagagtcaggcagggaggttgcagtgagccgagatggcagcagtacagtccagcttcggctcagcatgagagggagaccgtggaaagagagggagagggagaccgtggggagagggagagggagagggagagggagagggagaggagggagaggagggagaggagggagaggagggagaggagggagagggagagggagagggagagggagagagcgtccccaatcttttaagtcgaatttcttgccttgaagggacaaccatccccagcagagatggcccaggactgtggctcctgcccctcccccacctcacctacccctctcccccaggtgggctggtgtgtctgaccaccaggaccaactcgtccaaccttcaatacaaggaggctctggaggccaccctggacaggctggagcaggctgggatgtgggaaggcctggtggcctggcctgtggaccgcctgtggaccgctgggagctggctacctccgagctggaggtggtatccggcatctctgccaaggatggcttcatctccggcattgtctacctgtaccgaaagtggaaggcgacccaggttgaggaagtgagatccagcccccagcccccagctggcccctgactccatgtggccttagctgggcccatctgctgggcctcctctgcctcccctgtaaaatgggacctccgaaccaaccctgcccctcagaaatgccctgcctattaaatgagctcccagaaaacagtggcatctgttcctgtgggttccagaatcgagacgtagcagggtgtggtggctcacacctgtaatcccaacaatttggaaggccaaggcaggaggatctcttgagaccacgagttcaaaaccagcctgggcaacatagtgagaccccta

SEQ ID NO: 13327 - DNA, 1260 bp, Artificial sequence
  DNA replication origin
gcagaggggctcctcacttcccagtaggggtggccgggcagaggcgcccctcacctcccggacggggcggctggccgggcggggggctgacccccccacctccctcccggactgggcggctggccgggcagaggggctcctcacttcccagtaggggcggccgggcagaggcgcccctcacctactggacggggcagctggccgggcggggggctgacccccccacctccctcctggacggggcggctggccgggcggggggctgatgcccccacctccctcccggacggggcggctggcctggcggggggctgacccccctacctccctcccggatgggcggctggccgggcagggggctgacccccccacctccctcccggatggggcggctggtggggcggggggctgacccccccacctccctcccggatggggtggctgccgggcggagacgctcctcacttcccagacggggcggctgccgggcggaggggctcctcacttcccagacggggcggctgccaggcggaggggctcctcacttctcagacggggcggccgggcagagatgctcctcacctcccagacggggttgcggccgggcagaggtgctcctcacatcccagacggggcggcggggcagaggcgctccccacatctcagacaatgggcggccgggcagagacgctcctcacttcctagatgtgatggcggccgggcagaggtgctcctcacttcctaggtcggatggcggccgggcggagacgctcctcactttccagactgggcagccaggcagaggggctcctcacatcccagatgatgggcggccaggcagagatgctcctcacttcccagacggggtggcggccgggcagaggctgcaatctcggcactttgggaggccaaggcaggcggctgggaggtggaggttgtagcgagccgagatcacgctactgcactccagcctgggcaccattgagcactgagtgaacgagactccatctgcaatcccggcacctcaggaggccgaggctggtggatcacgtgcggttaggggctggagaccggcctggccaacacagcgaaaccccgtctccaccaaaaccagtcaggcgtggcggcgcgagtctgcaatcacaggcactcggcaggctgagtcaggagagtcaggcagggaggttgcagtgagccgagatggcagcagtacagtccagcttcggctcagcatgagagggagaccgtggaaagagaggg

SEQ ID NO: 13328 - DNA, 942 bp, Artificial sequence
  DNA replication origin
ggccagctgccccgtccagtaggtgaggggcgcctctgcccggccgcccctactgggaagtgaggagcccctctgcccggccagccgcccagtccgggagggaggtgggggggtcagccccccgcccggccagccgccccgtccgggaggtgaggggcgcctctgcccggccacccctactgggaagtgaggagcccctctgcccggccagccgccccatccgggagggaggtgggggggtcagccccctgcccggccagcccccccatccgggaagtgaggggcgcctctgcccggccgcccctactgggaggtggggagcccctctgcctggccagccgccccgtccgggagggaggtggggggggtcagccccccgcccggccagcccccccatccgggaagtgaggggcgcctctgcccggccgcccctactgggaactgaggagcccctctgcccggccaccaccccgtctgggaggtgtgcccaacagctcattgagaacgagccaggatgacaatggcggctttgtggaatagaaaggcaggaaaggtggggaaaagattgagaaatcggatggttgccgtgtctgtgtagaaagaagtagacatgggagacttttcattttgttctgtactaagaaaaattcttctgccttgggatcctgttgatctatgaccttacccccaaccctgtgctctctgaaacatgtgctgtgtccactcagggttgaatggattaagggcagtgcaagatgtgctttgttaaacagatgcttgaaggcagcatgctcgttaagagtcatcaccactccctaatctcaagtacccagggacacaaacactgcggaaggccgcagggtcctctgcctaggaaaaccagagacctttgttcacttgtttagctgctgaccttccctccactattgtcctatgaccctg

SEQ ID NO: 13329 - DNA, 1069 bp, Artificial sequence
  DNA replication origin
gaccctgtctcataaaacaaaacaaaaataaaacaaaataagtaaatataaatacaaagtaaaaatgaaagctaatcctaggtccctctcctgcccataagaattcagagactccccagtgcctacaaacctcatgctttcaggaagcataaaggacttcaggaggcaggagggcagttggagggggatggtggaggtgctgctacctgacggtggagggggaggccggggccagaccaccgagaagcccctaaacccgcacagcaggaaaacatctccgcagtccctgctctaccaaggctggaggagggccacaagccttgagctcattggctggcggggggggggggggcgggcagactgccagcgccttcctttgactggctattttctctcagcggaaaaccaatcattgcgggcaggcggtgagggtgtggccagggtcgcaacacaggccccgccccgagtcctgttgcccacacgcccgaggcgcgctggattggcggtgagttctgactccggcctccttcgagaccgtttcgctccggatgtcgcccacctccgaccctctctcagtcggagggcggaaaagaggaagataggtccttcctccagccgcggggcacccccttctcccaccttgcccttcccccagccctgcagccccagagtgtaaatatccaagcccgccctctctgcgctcagtgtccccatctgggataggggccgggataggggtcgcgctggcaggaggcctggcagcctcctctgaagggggaggagggaagggggaaaggaggggatgggcgattgaggtggacctcgagacagggcaacggtgtccccacaggagcatggcccaggaggagggtgggagcctgcccgaggtgcgggcgcgggtcagggccgcgcatggcatccccgacctggcccaaaagctccatttctatgaccgctgggctccggactacgaccaggtaaactcatttggggccttgcctccactagaccagcctccatttttctacctgtaaagtggggaatcagccttgcacccgggggcggctgt

SEQ ID NO: 13330 - DNA, 1514 bp, Artificial sequence
  DNA replication origin
tcgttggccagatgggacccctcagatgtccctcctagagcaggacagccttgctgcttagacttggaggaagggtctggaagttcacccacatccaccctgagctgtaagggaggccctcactgagctgggaacccgagtggagaagagccacgctcacaccaccaccctctggcttgggagtaggtgagaggtaactgcaaacactcaagaaaccatcccttcccctctcagcagaatcactcacctgaaggctgagtcttggggattggaagcatcacagcctgagctggcacagcagcatcagccacccatgcagcaggaccctgtgtccttactcacaggttaggggagtgctgagatactggataggtttcccctttccccagggagacagatggctcttcaacagatagcgggtgagtgggtgtggttggttctgtggatgaatggatgggtgggtgggtgggtggatggatggatggatggatggatggatagatggatgcatgaatgggtggatgaatgggtagatgaatgggtgagtggatggttaggcagatgggtggctgaatggatgggtggttgggaggatggatggatggatgggtgaatggatcagtggatggatagatggatggatggatgaatggatgaatggatggatagatgggtggatggatgggtggatgagtgggtggatagatggatggatgcatgaatgggttgatgaatggggagattaatgggtaagtggatgggtaggcagatgggtgggtgaatggatgggtgggtgggtgggtggatgtatggataggcaaatggaccagtggatggatagatgaatgggtggatggatagacggatggatggatggatgcatgaatgggtggatgaatgggtagatgaatgggtgagtggatgggtaggcagatgggtgggtgaatggatgggtggttgggaggatggatggatggatggatatatgggtaaattgatcagtgggtgggtagatggatggataggtgggtgtgtggatggatggatggatggatggatggatggatggatggatggatgcacgaatgggtggatgaatgcatagatgaatgggtaattaaatgggtaggtagatgggtgggtcaatggatgggtggttgggtggatggatggatggataaatggatcagtggatggatggatggatgaatgcataggttgttgggtgatgatggatggatggatggatggatggatggatggatggatggatgggtggatgggtggagggatggatgggtggatgtgtgagtagatgggcaggtgaatgggtgagtgggtgaatggattggtgggtgggtggatggatggttctgtggatggctttgtgagtgggtggataggtggatggatgaatggccaagtgcatgaatgaatgggctccttgaagcctggctcacaactgtttctcaaagctttctaaatctctgaaatgtgaggccctggcacccccc

SEQ ID NO: 13331 - DNA, 1151 bp, Artificial sequence
  DNA replication origin
gcctcctagccctgtgccctggtgtggtgaccgaattggctgtatcctctgcagagcatggcccctgtccagtagactcaggacattttctgcttctcatgggggcagtggcccaatgccaggctttccttggtcccatctgggccaggaccttcccctggtttcatctcccttccttgaaagacccatctgcagcagcgtggaaggatccaggccccctctgccagcctttcattcacccacgcagaggcaggcaggctgtgcagcccccaccccacaatttgataagcctgagccagggagggcagggctggccagtgtgacagctcatgagtggccggtatcctctcttcctctccggtacctggtggccccagtcctgctgccctgcctggcagcagaggggatgggctggtgtctgctgtcctgagagcctttcctgggctgtctgtactgggtcaaggctctgccttggggtcaggtttagtttgaggtcacggtgaggatcagggcttggcactggagtcagagctcagcctatggcgggctcaggaaccagcctgtttccaggttggagctcagtctgagtggagagttggggtttggtttggtgtggagctcaaggctctgtctggggcagggattgggtttggtcaagggttgggatgaaggctagtttggagccagggtcagggctcagtctggggtaggggtcaggacttgatctaagattggagtcaggtcagggctcagcctggagccagggctggacttcagtgtgggacaggtgatgggttctgagaggagttggagttgggattcagtccagggtagaggttagccttgagtctggggtcagggtcaggtttattctggggtcacaggggccacggctggtgctctgtctggggttgcagatgagcttggctggcttgggtgttggtatcactctgggtttgagttcaaggctcagatggtgtcagactaggacatcaatgtgtattgggacaggctgcttgtgtggagctgacaggggcaggtgtgtgttgaaggtgatctttgtccctcctgtatttgcacccccagcccccagcccctacaaccggctgggactgggcttggtgggtggacagacggcttcagtcgcgttc

SEQ ID NO: 13332 - DNA, 982 bp, Artificial sequence
  DNA replication origin
tttgggaggccgaggcaggcagatcacctgatgtcaggagttcgagaccagcctggccaacatggtgaagtcccgtctctattaaaaattcaaaaagtagccgggcatgatggtgcacgcctgtaatcccagctactagggaagctgaggcaggaggatcgcttgaacctcaggggtggagtttgcagtgagccaagatcgtgccactgcactccaggctgggcaacagagcgagactccacctcaaaaataaataaataaataaataaataaataaataaataaataaaagaaattaatggatcaaacgtcaacgttgaagtagggtagaccatgagcaaagacaaattcaagaaggaattcctccatctggacccagtaaaggctcactgagcgtttactctgtgtcaggctctgggccaaatgtgggggccacaaagaggagaaagacagggccttgagagttcacggaggggacagtgcccagagatccgtaggccctgcaaacccaaggacaccaggcagtgagcgccaggactgggaaggacctggaagatctcggcctttgtcggtggagaggagacgggaggaaggaggatgctgggagcgccagggggtcaagacagcagggagggcactggaggagggggtctgcaaggaagtgggagaaggagagaagggaggggactcccccatccaactccaggatcaaggaccccagcctgctttcctccaagccaggttttggtggagacacagaagcagggccactggccattttcaccttttaaaaaccacagccattcgaagccaggcgctggagccaaatttctgggagagacagagtccctgtgggcgcttcccctgacgtcaatcggggtttctcttgtgtgtctgcggctttgacaggaggaggccagtttagggggctgagctaagagaacgagaagaggaccgaaagccaagtgccgctcccattctt

SEQ ID NO: 13333 - DNA, 825 bp, Artificial sequence
  DNA replication origin
agttgggggcgcctgagggggagggggagttgggagacgggacttaacaagagggtggggctcaatgaggcgggacagtgaggaggaggagtaaaggggcttaggggtggggaaggcaactcaatggagaaaacgggggttcatgcatggcagagggcccaggctttccctccctggtcatacttctcctgccactcagctctcttcacgccacccactctaagacatgccctctgacctcccacctgcctggggctgaccactctgccttgtctctttccatccagggccttggagaactccagcacagaatggccccaggcctggacactctctgaggacatctctgcaaaggccccactggcccaggccagtgggatgtgggctcctggccctgtccaggctctcatgccatggggcagggtggcaggggcccctccctgggtttgctctggggtggcagagagccactgtggttcagttcagggtggtgagcagctctctctggcagcccaaggaggccttcctggaggaggaagcctgaccctctagctgggcttgaatggggaagaggctaggtagaggcctggcagtggggcaggggtggggactgtctgtgagcagctgtgtggcacgtatggcaggaagaaggactggaggggtagacaggcactgccatccatagcctggaaagtgtcaccaacagggcaggatttcatccgagaaataacagggaggccgggcacggtagctctggcctgtaattcccacgccttcagaggctgggaggatggcttgatcccaggatcttgagaccagcctggg

SEQ ID NO: 13334 - DNA, 822 bp, Artificial sequence
  DNA replication origin
ggtccggagcccctgctggagagggacatgggtcctcagccctgagcatcaatgaggtttgggtgaagggagagacagaggcccagccagaccctgcacattccagccctggttcattccggatccaagcactgagacctctccccacctgggcgcccagccaagcccccctatgatggtgccagatccggaggacagcccgaccgggccggagcttgctctctgatgagtccttgaaagtccaccagcccgagctcctcttccgccttgaagggggcctgcatatgtagggctgcattcccggcatgccatggctgggggagcaactggaggtctccccagaaagtgcatgactccaggtcagatcctgggaaaaggccacagccccaggacctggagcagagggactgagggccaagctggcactgggggagaaggaggggagttaggaggaggggagttgggggagggggagttgggggcgcctgagggggagggggagttgggagacgggacttaacaagagggtggggctcaatgaggcgggacagtgaggaggaggagtaaaggggcttaggggtggggaaggcaactcaatggagaaaacgggggttcatgcatggcagagggcccaggctttccctccctggtcatacttctcctgccactcagctctcttcacgccacccactctaagacatgccctctgacctcccacctgcctggggctgaccactctgccttgtctctttccatccagggccttggagaactccagcacagaatggccccaggcctggacactctctgaggacatctctg

SEQ ID NO: 13335 - DNA, 1280 bp, Artificial sequence
  DNA replication origin
gcaggctgacactgcagtgagctatgattgcaacactgcactccagccagggtgacagagcaaaactctgtctaaaaataataataataaccaaccatttaagatgcccttatgtggtagattaagtggtggagtgtattgtttatcctctgttgatagatgaggaagctggtgcttggcagaaacagtgagtgacttcctcagggtctccaggctgctgagaggtgggggctggaaatgctcccaggtggtctgagacagaagccctgctgggaagtcctccctcaggagacaggagcctgtggacataccttgcgccctgttgcaccctctgtgaacgtgaggaagtgctgctcttttcatcttagagatgagaaagggaggcctggagaggaggcagtgacttttggaggcaaccctgagtcgatggcacagctgaagcactgacttctgcttttagctcttccctcctcctggaatttcctgatttctttgagatctgaagtaaggggtacaaggctcctgggcctccatgagccaggtggccctgatggtgagccatccacagatctgcaggcattgattgcaggtgccaagccagtcggcacagacctccgccatctgctatcattgccatgcaagaaaagagtcccagctcataggcagacatgagccacaaggcaggcaggacctgcagcctggccacacccatcatccagggtcacctctctgtccagacccatgcctggttattaagcatttagtgatggcaggagacccacctggaggctgggtgggtgatggtggcagtgatgatggtggagttggtgaagatagtggaagtgaggatgaaggtaaggacaggtgtgaaggtgaaggtggaagtaaggatggaagtgaaggtggaggtgaggatagagatgaggatgaaagtgaggataaaggtgagagtggaggtaagaacggagatgaggatggaggtgaacacagaggtgaggatggaggtgatggtggaagaaatgataaagatggtgaagacactggctgtggcaatggtgggatggggatgccattgtgggtcatgagaagagctcttgactgacatccctccatgaatctcgaagctcacccagccacagagtggatcccttcatttcagtcccagcagcctcctccaaccatttcagtcccagcagcctcccccaagcagtcaggatccctgaagagcacctggctgtccacaagacaataggcaggaaggggatccagtggccccccag

SEQ ID NO: 13336 - DNA, 841 bp, Artificial sequence
  DNA replication origin
ctggagtgcagtggtgcaatcatagctcattgcatcctccaactcctgggctcaagtgattctcctgcctcagcctcctgagtagctgggattacaggcgtgcgccaccatgccctgctaattttttatatttttagtggagatggggtttcaccatgttggccaggctggtctcgaactcctgaccccaaggtgatccacccgtctcagcctcccaaagtgttgggattataggggtgagccaccacacccggcccaaattccatacttttgagacatttcttaaagattaaacacattcttaggcaggacagccatgtcccaaaccacagggtctgggggcagctgagggcacctgggaagcaaagagaggcgtgggttattgacgtctgatgggggcaacccagtgtttcccacagatcctcctggctgaggtggcctggtgggcaggccgggggcctgtgaggaggcgactgctttaaggcctggactgcatggggtgctggactgctgggggaacaggtggggaggaagaatttcttgggtgcaatagcgggcatgaggatgtgggagtcaagttcagctccctggcttctggcccaggcaaccgaagcggttcctgggaggacacgttggcaggagaggtgatgggggctattcagggcctgtacctgcaaggcgagaagtccagcgtgctggtgcaagagcaagcatccaccaggggtagaggccgagaagttggggcagtgcaggtggcattgcgtgtgtgaggtcgccaggggaggggggacattctgagactgagtcagggtgacccaggggcgaaataaggatgagagca

SEQ ID NO: 13337 - DNA, 784 bp, Artificial sequence
  DNA replication origin
taagctctggccaggcgtggtggctcacacctgtaatcccagcactttgggaggccaaggtgggtgcatcacttgaactcaggaattcgaggccagcctggccaacatggtgaaacccatctctactaaaaatacaaaaattagctggacatggtggcaggcaactgtaatcccagctactcgggaggctgaggcaggagaatcgtttgaacccgggaggcagaggttgcagtgagccaaggttgtgccaccacactccagcctgggcaacagagtgagacactgtctcaaaaaaaagaaaggaagtaagctccaagctgagacctaaagtatgagaagggaccagtggggaaagaattgcagggaagagcatccaggcagagggaacagcatatgcaaacacacagattccaggggaaaagaattgggggacagtgaaattgggggatgtgaggcagcaccaggtcatgatgaacctcagagccatttggggggtgtcgattttggtgcaagtgcaacaggaagcccttggggaaaggggcggtttaagcaggagaatgagatggggcctgatttacattttccgcaggttattctggctggagggggtagagaggaggcagggaggcggggaggaggctgtgctggcctccagggccaagctggtggtgacttgacacaggggtggcagcgagaacagagggaagtggatttgggatttattttggaggtagaattgacgagtcttggcggtggccggggtgtgggtggtgagggcgggacg

SEQ ID NO: 13338 - DNA, 1058 bp, Artificial sequence
  DNA replication origin
gaggggacaattacgaaaggcccggctcacaagcctcccaggcccgggctgctggactgcgagcttttttccttgacacacacacgcacacacatgcacacaagcacacactcacacacacacactttcccccatctctttcccgctttccctctgcgactgttctttcgctgctggccctgttcccgccagaaagagcgaggggggcctctgccaggacagccctcgggagaggaagcagaagggagggcctggcggccaggccaaaaatcccagccccagccaaggcccgagtggccaggcccccgcccctccggctgggccccgggcccagtgtgaggatacgggccagctgtcccgcgcctcagcccccaccccggccctccagactccccaacacccccaggtctggctagagacaggttctgcccaaagctggggaggggaggcattgggcaggtctgggggtttggggggtgcgatgtctacagaggccggggggctgcaggttgaatggcctggaaggtaggcccgggttggtattgctctgggagggatctggggggaaggtaggggaccctggacagggctgcattctgcaggggccaaggtctctgcctagcgcctgaagctggggaggaggtgttgggtgggtctggggtggatgcctgcagatgccagggggttagaggcaggggaatggcttgggagttaaggccatgttggtgctgtccccaggggcatctggagcacatggaggatcccgacacacagggttctattctgcatgggtcaaggtcacagccctatacccagccccatgcaggccgcagggtctggtaaaaatcaggctggatccccaggtgccctgtgggggaacagggaggtgggagccccccgcagactgacaggcagcccagcttcccattatcactgggtcacctcccatccccacgctgagcacagctagcgcccacaccagtctgggagcttctcgactgctgttctcccggcccctctgggaaggctgacattccgctggtggccaggagggggcg

SEQ ID NO: 13339 - DNA, 1869 bp, Artificial sequence
  DNA replication origin
ttcctccagctcactgattcaaatcctagagctctttagggaccctcttagtctctccacatctctctgatgagtaggatccatgcagaggaaatgtcaacccacctgcaatcctgcattcaggaccaactgtcacttccatactctactaaccacccttctagcccctctgaggttcccataggttaggggaacaatgctttttcttccacaggagctgctgcaggcttagtgcctggtgggccaggctttggcccgggagtagttggtgtcccaggagctggcgttccaggtgttggtgtcccaggagctgggattccagttgtcccaggtgctgggatcccaggtgctgcggttccaggtgagctgggctgtgtgtgtgtgtgtgtgtgtgtgtgtgtgtgtgtgtgtattagagagaaatattgagactattgccaaaatttttgcattctccctaacaccataaccatctgcccatacccttgaccacgtctcatcccctcatcttctcttccttgggctataccaatctccttattagcttctaatcagtatcatattttccaattgaccttctggctatcagtgttctctggggggcaggaaccgtgtctttttcaactccatgttcctagcccttagctgagtaggtgttcagtttatggtggataaaacggtaagtgggtggatagatggataagtggatgaatgggtgggtggatgaatgaatggatggatagatgggtgggtggatggatggatgggtggatgggtgggtggatggatggatgggtggatgggtgggtggatggatggatggatggatgaataagtggatggatgaatgggtggatagatgggtaggtgagtggatgtgtgggtggatgggtgtgggatggataggtgagtggatggatgggggcatggatggatgggaggatggatggaagaatggatgaatgggtagatggatgagggatggatggatgggaggctgaatgaaagaacgggtggatgaatgggtagatgggtggatgaatgagcacatggttggaggggcagatgaatagacgggtgggtggaatggtgggcaagcaaatgcaaaatggatggttggctagatggttagatgaatggatagataggcagatgggataagttggcagatagatgagtggacagagagttaggtggttgggtgggtggattgatatccaaggatagacaaatggacagccgggagcagtggctcacgcctataatctcagcactttgggaggccaaggtgggcggatcacctgaggtgaggagttcgagaccagcctggccaatatggtgaaatcccatctccactaaaaatagaaaaaaattagccaggcatggtggtgggtgcctgtaatcctagctacttgggaggctgaggcaggagaagtgcttgaaccggggaggcggagattgcagtgagctgagatcgcgctattgcactccagcctgggtgacaagattgagactccatctcaaaaaaaaaaaaaaagacaaatggacaggtatagaggtgggtcattaggtagatggatgatgggggtggctgggtatacagatgggcaggtgggtggacatcagtgcataaatggatgtgtagccaactctatgttggcatgaaaggagatggcccaacacacagatgggtagacagagggatacatactacacagctctcctccaatctctcctgagcatttgtgtcccttttggtctctccaggggttgtgtcaccagaagcagctgctaaggcagctgcaaaggcagccaaatacggtgagtgctatgctgacagctctgccccaccctgtcctggcctttact

SEQ ID NO: 13340 - DNA, 916 bp, Artificial sequence
  DNA replication origin
cagaaatggaacactcattttccctcctctccccgcaggagcagcagtgcctggggtccttggagggctcggggctctcggtggagtaggcatcccaggcggtgtggtgggtgagttgaaaccccaggaggggcagggtggggagggaatctaaccagtacagagtgcctccctgaactcggtctgtgttcccaggagccggacccgccgccgccgctgccgcagccaaagctgctgccaaagccgcccagtttggtgagcactgggtggaggtgggagctgccgccaggcccccaggcccccagggtgtgggaggagcttctgaccaggcactgtagactcagagtccctgccccagacacctcctggctccactgtgccatcgaaggccaggggagacctcaggctccacctgtgtccccagaggacacctccgccctccacaggccgaggcttcagtcccacctttctgaccagcggagtctaatgctcagctgtctccacaggcctagtgggagccgctgggctcggaggactcggagtcggagggcttggagttccaggtgttgggggccttggaggtgagagttgttctgaaatcagtgagtgtgtgtggtgtgtgtatgcgagacagagatggagacagagacagagacagagactttcgttcccacccctggcacgtctttgctcaagatgtcctcttggccaggtgcggtggctcacgcctgcaatcccagcactctagtaggccaaggtgggcggatcactagaggtgaggagtttgagaccagcctgggtgacatggcgaaacctcatctctaccaaaaatacaaaaataagccgggcgtggtggtgggcacctgtatttccagctacttgagaggctgaggccagaggatcgcttgagcccagg

SEQ ID NO: 13341 - DNA, 1437 bp, Artificial sequence
  DNA replication origin
gattaaatcatacgaaggaagctaagacacagtttcctttaaaggtttttcatttattagtcatttctgaagcagttaattctcttttcttattaaaaaaaaaggtgtgtttcatccagagttatattagagtgattaaaatgttttttctactggggatacagctccccggatcagaaaaaaaaattatctttttttttcaatgaaccacaacaataaaaccaaaagagaatatcaacaatcaaaaataatccccaaatatccaggacaaaaaataaaatatttattgatctatcacagcgagacacaaaaagatgggcggggcaggaatgggaactgctctgaagttcagtggaccgagggagggatggggggtatacagtactgcatgtggggacaccccgggtggggaggagatgcctggcaccccagtctgcacagccccgcacgccctgggggagtgtaggatgggggtggaggcagggcacaggcggccatgacaggtcaaccaggttgatggtgggtgcacccagccagctagtggtgccgggcggtcaactggggacatggatggacggaccgatggatgaatggacggatgggcggatggattctacaagggcaaggtggctattcccagtgtggggtggttttccaacccaaaagcgccccagatgtggggaacagcgatcggtggggaggagacggccaagtggacccaggagaggagggatgctagagcgaatccagctttgaggcttcaggtgcttgggtaccaactggatggcagccaacggtgggtcctggtgggcagggggagctgggactgcccaggaagtgtctgcaccatctttagaggagccccaggtagggggttccccgaggggccacccttccctcctccctccccccaggaagataagagcaccagcgtgtagcaccaagttcccctggagatggaggctgtgtggagggggagctcctaggtgggaagggatggggtggggggccaggaccacatggcccttgcctctgaagtagggggcctcctggtcggggcacttggccgctcccctcttgtttccttgccctgtggatctgcaaggccgcccggcctgcccgttccctcctggggtggggagtcggaggggcatgggatggggttacaaagggtttacattctccaccaagcagtagcaccaacgttgatgaggtcgtgagtcaggggtcctaggaagctcattttctcttccggccacaagctttccccaggcaggccccacctggacgggaggaggtgcacatcactgtgagtccggcccctctcagtttcggctctaatccccgcctgctctgacccactcgaatggaggctccaagaagccaagagaagccaagtcatggccccaggccaaactcagacctgatccatgccat

SEQ ID NO: 13342 - DNA, 948 bp, Artificial sequence
  DNA replication origin
ctcctgcctcagcctctggaatagctgggattataggcatgcaccaccatacctggctaattttgtatttttaatagagacggggtttctccatgttggtcaggctggtctcgaattctggacctcaggtgatccacccaccttggcctcccaaagtgctgggattacaggcgtgagccaccgcgcccagacttttttttttttttttaattagccaggcatggtggctcatgcctgtagttagttacttgggaggctgaggtgggaggatacttgacctcaggaggttgaggctgcagtgagctatgattgcaccattgcactctagcctgggtgacagagaccctgtcaaaaaagatagggagggaaaaaaaggggaaggaaagagaggggaatgagagccttgtaacttggctgtagggcatataccaggcaggaccctggctggaaacagaaagtgccacttagtggggctaactggggagagtttgataaaggggatgtttgcaatgcactggggaggggggattaaaggagatcagtaaggactggcacagttggaggggtggcagcagttaccagcccagggtaagggggcatagagggggtccctggaggagaggcctgcctgagaggagctgtgcaagaggggtccccagttctgggggactcatggggaagagggcccagaagggctattctgatctgactcccctgctcttcttattcttccattgcctcccgttaaccaatcccgtctggatgcagcgggcagggccatgttgatgctgtgcccacagtgcagggcagagaagtgcatagtggcctggaggggctgtgagcctgagccagcttggttgagtgatgttatccagttttgactaaattaaccctcacagaatggactcatagttgaaaacaattcctgcaaagaaagcacagattggg

SEQ ID NO: 13343 - DNA, 1442 bp, Artificial sequence
  DNA replication origin
ccctccaggtgcaacaaagtagcgtcaacctcatgcactcgacggggggcggggcccggcggggctggggctgggggcggccgggcccgcgagctcgcccaccgccgccggcccggggaggcgggggcggagggcgcgggccgggccgggccgggccgggggcgcctctcggacaccggcggggaaaccggctcggcgccgcggcggcttggggagcgagcggaggggcggaccgaggcggggcctgtgagctgcggcacgggggcggggcgcgggcggccggcggcgggaacggccctgcgcggccccgcccccaccagaaaaccccgcccccacgcccaaggccacgcctctagaggccacgccccgctgcggcccggcctgggggcgccgcgagctggcgcggcgcgccccgcccctccccgccccttccgcccttcattcattcttctttctcccagcgacaggcctcggctgggagctgcgaggcccagctgtctcggagggccgctagctctgctggggcaggccaggaggatgtaggagcctagagaaggggcctccgcttccctgcgcgaggcccccacagacccaaaccagctgcagccgggaactcggatcagagctggagaggccctgtggacccccaggacactggtggtcgccttggggaggggagggaggcgggccgggttttgtccctctctctgaggcctgcattgaggccaggctgggcccggggaaggtgacggtccgcgtctcaggcctcgcgaatgagcagcaccagagaaaggagcgagcccctgccaggcggtgacaggtgtactcttctcagtgccgattacctggagctggggctgccctgcccagggtcctggagggagcacgggtttgggctgagtcaagcgtccaaaggaattgggtggtccagtccagcactgatggtggaacgccctgcctagatgtggacaattctagaatgctggacatgggcaggaagcaaccctgtcccccctaggtctaccttccacgtcatccctctgcccaggaagcagtgaccggagtggagccacgtgcccacgtgaacccagtgaacaagaggcagcgctagcccagctccaactctagtcatcatgtttgtggggagaggtctaggcacgtctgcaaagtggggggcactcacccctgggtgcaaaacaattacgtggggtgggaagaaaatactagattttttttttctttttttagattcggtctcgctctgttgcctaggctggagtgcagtggcgggatctcggctcaccgcagtctccacctcccaggttcaagcaattctcccaccttagcctcccgagtagctgatattacaggcgtgcaccaccatgaccgactaatttttgtatttttagtagagatgaggtttcaccatgttgaccaggctg

SEQ ID NO: 13344 - DNA, 1763 bp, Artificial sequence
  DNA replication origin
catggcaaaacccgtctctactaaaaatacaaaaattagctgggcgtggtggtgcacgcctgtaatcccagctactccagaggctgacacaggagaactgcgtgagcccaggaggaagaggttgcaatgagccaagatcgcaccactgtactccagcctgggtgacagagcgagactccgtctcaaaaagaaaaaaaaatagataaataaaatgacaacaggaaggcctgtagggattttctagtcaaaacacctcatgtcataaatggtaaattaaggccacgaagtcacaataggggacggcaccaggaggcatatcccggcctcccccattccttgaccagcctgtcctctctggcaggccttgtttagggcaacacaggccctgggcaccccaccctacctgaagcagtctgcgtgccagtccgcgttcagggcctggaggtactggccatcatagatcctctggccgcagcttgcacacacgggcaactcgcttcctgcagggtgggaagggagttgggaagcattctcaggaagtgtgatctggtgcaggcccagcttgccctgcccaccccacatatacctacacctgcaccaatcctcgcacactgcacatgtgcagcgcccaggcagggcagtcgctgtgccaaataggagaagaaagggcgctggcctgagtcttgctgagatactgactaggttgccaagcttctctggccctgtttccctatgtatcagcttaggaggaggatcaggtccatcctcccgctatagcattggatctggcaaggtaaatgaggagaaaggaagcagtggctttagggataaggcagtgggtgacattcctatcacagcctcctttcttccctctcctgcccaggaagaagtactaagagggcccttcaaaggcagggactggacagggctggattagtgcatcctgggctgaagccagctgggaggtcaagggcaggaagcctggaggtgccggccctaacagatccttggcaatgaatgccctggcttggcaaggggagggggctgcagacctgggtactcccagacacctgtcccagggaggcctggcacctcctctagccagccacaggcatgcttagtcatccttggggcctggcacccttggagctggtgggccctggaaaatgccccagacctgcccctctccactgtacagaaggggagactgagccccagagatggcatggcttgcccagtcacatagctaggtcccaaggccacaacagcctgaccctctgtgaagacgcaggtaccttaggtaggcaggggctacaggaaggtgggcccctaccccaatcaggttttcatgggcctgggaagagttggtggcagggggaggtgtggagtcaggccctgccttggggccaggtggatctaagtgacaggtcagcgaaggagatccaaggaggggcccccagaccctgtcctaggctgggggagtccttgaaccctaactgcagtgcagtactgcgccttgggccccagtgagggagaaggggctaaagaggaggttaggatgagtcatgctcccagccaagactgagggcaggcaccgggtttggggcacggacagggagagtggatgaggctcccgcagtacacggcctccggcttcctggacgcctatctccgctctacccatctggcccccaatcaccgacaccgggggggcaactacccagtttccaaatgtacagaaggggaaactgaggaccaggaag

SEQ ID NO: 13345 - DNA, 1301 bp, Artificial sequence
  DNA replication origin
tagctgggactacaggcgcccaccaccacacccggctaatttttttttgtttgtttgtatttttagtacagacgaggtttcgctgtgtgagccaggatggtctcgatctcctgacctcgtgatccgcccacctcagcctcccaaagtgctgggattacaggcgtgagccaccgtgcccggcaatattaaagcgattttaaggccaaggctggtaactcacgcctgtaatcccagcactttgggaggctgaggcaggaggactgcttgaggccaggagtttgagatcaacctaggcaacatagtgagactccatctctacaaaaaaattagccaggcgtggtggtgcgtacctgtagtcccagctactcaggaggctgagatgggaggatcatttgaacccaggatgtcgaagctgcagtgagctgtgatcacgccactgcactctggcctgggcaacagagcgagacactgtctcaaatttttaaaaagcgattttacaaatgaggtgcagagttcagtcacttgccaaaagtctcacagcgcgtgaggagtagaatcaggactcgaaccgaggcagcctggcttcagagcctacagtgtaaccacagcttagtcccacacctcccagaccaacagggtccctgccttctagtgggcaagacactcagtgaacaaatgtagtgtcaggtattgggggacagcactctcaggaagtgatgtttaagggacagaattgaagggagcagtgtttagaggatgtcgggggtagggccggtgcatgtgcaaaggccttggggtgggaatgtgcttggcacaactgaggaccacaaagccagcgtgcgggagtgcagtcagtggccaggggtgcatagagccttgtgggccccgtggaaggtgccgttggctgtacagctttttttttttttttttttttttttttttgagacagagtctcgcttttgttgcccaggctggagtgcagtggcgtgatctcagctcactgcaacctccgcctcccgggttcaagcgattctcctgcctcagcttcctggtagctgggactacaggcgcccaccaccacacctggctaatttttgtgtttttaatagagacggggtttcaccatgttagccaggctggcctcaaactcctgacctcaagcgatctgtctacctcagcctcccaaagtgctggggttacaggcatgagccactgcgcacaggcagctgtgcatctttgaatgtcataacctgagcatctgagagctgctcctgtcccctggcccctgctcttgaggaagt

SEQ ID NO: 13346 - DNA, 1260 bp, Artificial sequence
  DNA replication origin
gaaaccctgtctctactgaaaatacaaaaaattagctgggcgttgtggcgagcgtttgtagttccagctactcaggaggctgaggcaggagaatggcgtgaatccaggaggcgaaacttgcagtgagccgagatcgtgccactgcactccagcctgggtgacagagcgagactccgtctcaaaaagaaaagaaaacaaagcaaacacaaacatcgcatgttctcacttatttgtgggatctaaaagtcaaaataagtgaactcatggacttaagagactaggaggggccgggcgcggtggctcacgcctgtaatcccagcactttgggaggccgaggcgggaggatcatgaggtcaggagatcgagaccatcctggctaacaaggtgaaaccccgtctctactaaaaatacaaaaaattagccgggcgcggtggcgggcgcctgtagtcccagctactcgggaggctgaggcaggagaatggcgtgaacccgggaagcggagcttgcagtgagccgagattgcgccactgcagtccgcaatccggcctgggcgacagagcgagactccgtctcaaaaaaaaaaaaaaaaaagagactagaaggatggttaccggaggctggtagtagaggcttgtggggggaggtggggatagttaatgggtacaaaaaaaagtagagccggccgggtgcggtggctcaagcctgtaatcccagcactttgggcggctgaggtgggtggatcacgaggtcaggagtttgagatcagcctggccaacatagtgaaaccctgtctctactaaaaataccaaaattagccgggcatggtggcgcgcgcctgtagtcccagctactcgggagactgaggcaggagaatcgcttgtacccggaaggtggaggttgtggtgagccgagatggcgccactgcactcctgcctgggcaacaagatccaaactctgtctcaaaaaaaaaaaaaaaaaaaaaaagtagaatgggctggtggtggctcacgtctacaatcccggcactttgggagggggaggcgggtggatcacctgaggtcaggagtttgagaccagcctggccaacatggcgaaaccccatctctactaaaaacacacaaaaaattagcctggtgtgatggcacgcacctgtagtcccagctactcacgaggctgaggcaggagaatcatttgaactcgggaggtggagactgcagtgacctgagatggcgccactgcactccagcctgggcaacaaga

SEQ ID NO: 13347 - DNA, 1450 bp, Artificial sequence
  DNA replication origin
aagaaaaaaagagatagaagaaggaaggaaaggaaggagaaagaaataaaaagagaagaggaaggaaggagagagggaaggaaggaaaaggagggagggaaggaaggagggagggagggaaggaagggagggaatgagggaaggaggggagggaaggaggcagggagggaaggaaggaagggagagggagggaagggagggagggaatgagggaaggagaggagggaaggaggcagggagggaaggaaggaaggaggcagggagggaaggaaggagggaggcagagggagagagggaaggaaggagggagggaaagaggaagggagggagggagggaaagagggagggaaggaaggagggagggagggagaaagggaaaggagggaaggaaggaaggagggagggagggagaaagggaaaggagggaaggaaggagggagggagggagggagaaagggaaaggagggaaggaaggagggagggagggaaggaagtagggagagagggaaggaaagagggaggaagaaagggaaaggagggaaggaaggagggagagggaaggaaggaaggagggagggagggagaaagggaaagagggagggaaggaaggaggggggaaaggaaggagggagggagaaagggaagagataaagaccagggccagctcttaaccaaagggaaaagggcgaagcaagtctgtagggctcaagaagggaagcctacaacacctagttattgttacctggagacaaatgtgcaacgatctgatcccagctggggtgaacaaagagaaaatagaccagcaacccaacgcgttattggtggcctttggaaagacctgacccccagtcaccagtttagatcccttcccaggggaagtgaaactcctcctttttggttatggggcgagtccccttcattgctccactgccgccttctcatctattccagaaaacatcctgggtatgggctcgctctgtcaccgcaggctggagtgcagtggcgcgatcatagctcctggtgcaccaacacgcccagctaatttttataatttttttgtagagaccgggtcttgccatgttggccaggctggtcttgaactcctgggctcgatcctcctgcctcagcctcccaaagtgctggaattacaggtgtgagccactctgccgggcccccactttatttattgtccctagggtaagagcatgtcaaccttgatgctatcacacaaattatagactgagacgcatatagcattcttgcctgttctggagggctgcctctcattatcttgctggaacatgcatcctcttttcctatgacgggcaagccctgggtctggacaaaacagtgcagagatctacccctctcccagctgtgcaagaccagacttattggctgggtgccgtagctcacgcctgtaatcccaacactttgggaaactgaggca

SEQ ID NO: 13348 - DNA, 1082 bp, Artificial sequence
  DNA replication origin
ccgaggctcccaggccagggcagccactgttttggctctcggccacttacttcaccagtctctggcaatgatgggaccaccctgggatgtcccaaggctacacaggctggacaggggaaggcgagggcaagagagtggccagaagcccagaaacaaactgacccctgaagtgccacagagcctggtgccagggtgagagtggggctgcgggagggggcgccaggcatccaggcctcttcccaccccacccagtggggccaggagctcctgggggatgggggacagcctgaggactgaggcacccctgggaaaggcttacctgagagtccagggttcctcaccacggccgccccatcctgagcccgcacacctgcccaagctgatgccaacaccactgacactggcgggcgggcagggcgggcttcctgccagccactgaatcatccgtacatccgccgcactgccggacaggctcagctatgaagagggcggtggggggaagggaggggagacgggggaaggaggcgggagagagagagagaagagaaacaaagtgagagggagaaagagaagaaagagagataggaccgggcgaggtggctcacacctgtaatccaaaaactttgggaggccgaggcgggtggatcacgtaaggtcaagagtttaagaccagcctggccaacatggtgaaaccccgtctctattaaaaatacaaaattagctgggcatggtggcatgtgtctgtaattccagctactcgggaggctgaggcaggagaatcgtttgaacctcagaagcagaggttgcagtgagccgagatcgcaccactgcactccagcctgggtgacagagggagactccgtctcaaaaaacagaaagaaaaagagagagacacagcagagagacacaagagaacaggaaaatatggacacacactaaacacacacataaacacaaaaagtcacacagagaggaagagagatacactccaatagacagggagcaagataatgaaactgaggtgctcctgcagatggcagatatggagacacacatacgctaaaaagacacacacaggcaga

SEQ ID NO: 13349 - DNA, 1041 bp, Artificial sequence
  DNA replication origin
tgccacagaccacggttctgcagaggccaaaatagcactaaagggaagtgggcagttttcatatgaacaacgattgccaagagctggcttcggggaagttctcggggctgggctggaggagctacagtgtctgaatcccgcctggaaggacgctcgagaccaccctgccggttctcccagccttctccgagctgagctgtggttggggacactggggttggggagggggcagcctggcttgaagccctggatggctttatccactggactctgctctggggtctgttggttttttcatttagtttttaattatatttttttatttttattttttaaagagatgggagtctcactatgttgctcaggctggtctccagctcctgacttcaaatgatcctcccgccttggcctccccaaatgctgggattacaggttgagccaccgtgcccggctggtcctgttgctttttccaaataactctgggcttcaaatgagcctagctgggagggagagagggaggcgggcgggtgcaggaggggcctgagcagccctggtcccagggacagagttgagggccaggtagggggctgggcagggaggcagtgggggttcttcacctgacctggggcaagacctgggccctggcctgtaatcccaccgttttcccctgacctgtgtagggggttacagtcccatttcacggatgaggaaaccgaggctcccaggccagggcagccactgttttggctctcggccacttacttcaccagtctctggcaatgatgggaccaccctgggatgtcccaaggctacacaggctggacaggggaaggcgagggcaagagagtggccagaagcccagaaacaaactgacccctgaagtgccacagagcctggtgccagggtgagagtggggctgcgggagggggcgccaggcatccaggcctcttcccaccccacccagtggggccaggagctcctgggggatgggggacagcctgaggactgaggcacccctgggaaaggcttacctgagagtcc

SEQ ID NO: 13350 - DNA, 1817 bp, Artificial sequence
  DNA replication origin
ccgggcccgcagccccgctttcggccaggccgccgccccccgcatctctccgtcctttgttgcccgcgcgaccccctccctcggcccctccagcagcccctaccttcgtccttccagcatcaggctaagcggcgggaggcccggagagccccggcctcctcctctcgggcccgggcgcgctggggggcgaggatgctgcggcccctccctgcgcggcgctgcccaccggctgcaccccctcctggcgccggggatccccgcgataggtgctcagggcccgggcctcgcgccacgtctctgggaaggcgggaggcgcgcaccgaggccgcccagcagccgcctgcgcgccccgcggccgagccgagctgagcgcccgcggagccagcggagccagcggagccagcggcccggctccgggagggaacaaaaggggccggcgcaggggcgggcgcgggagggcggggcctggggcgggcgggaggggggggcgggtcaggcgcgcgtgggcggcctcgcggttttcaggcctcagtgcctcgcggaaagcaggcgggcgggcggaaaacgcggagcaacctcttccccctctccccgctccatctccttcccttcccaggccgcagctgtcctttgtggggcgtccagggttcgcccacatccacctccgcgctgggcacctggtggtgcttacatcgcgtttggtgaaacgcatcctccagccatgctatgcttgcaaagatgtctctggtcattgggaaggacggcagcttgggaaggtgagatgctgttggcgctggacagaaaggatgaggagggggacagtgcagctggggcgaaaacttcaggtctgtgttggggccagcgtgggtggggaactgtggcacagggtctcatggttatcaaggatctcatagcctgggcagtgtctcacgcctgtaatcccagcacttcaggaagccaaggcgtgcagatcgcctgaggccaagagtccgagaacaacctgggcaacgtaaccttcgtctctacaaaaaatacaaaaattagctgggcgcgcgcctgcggtcccagctactggggaggctggggtgggaggatcgctggagcccaggaggtcgaggctgcagtgagtcatgatcaagccacggcccttcagcctgggtgacagagcgagactccgtcccaaaagaaaaaaaaaaaaggatctcatggtgatcagcttccaagatacaaatgaaccctccccaggacaggatgcatgtactgctatttcagaggagttgaggcagctgccaggtcccctcctgcgtggagaggcagatgccaagtgacagctcaggaactaaacagtgaccaagccccagcccctgtccatgcccaggctgcggttggcttctgtggcttggtttccctctgtccccccttgataagctcgcctggatgcctttgacctagctggccgttctaccagtcctgccctgccccctttctctgtttgacaaatcatattcccccttcaaagcacagcttaaatgtccctgcttttcccttgagtgcaggaatgtgggtgttgggggaggttgtggtctgtatggtgagaccactgttctgcgggagagaagtgccacatacgatcttgttcctatcccctaagggacccagtgcaatgcttggcagagggtagacatccagtaatatttgttgaatgaatgaatgaacttactaagttaacattaccacccctcaactgtcttggtatccataatctttgagaagtgagtgaacctttttttagagaaggggtctcactctgtcaccca

SEQ ID NO: 13351 - DNA, 935 bp, Artificial sequence
  DNA replication origin
gcccctgcgccggccccttttgttccctcccggagccgggccgctggctccgctggctccgctggctccgcgggcgctcagctcggctcggccgcggggcgcgcaggcggctgctgggcggcctcggtgcgcgcctcccgccttcccagagacgtggcgcgaggcccgggccctgagcacctatcgcggggatccccggcgccaggagggggtgcagccggtgggcagcgccgcgcagggaggggccgcagcatcctcgccccccagcgcgcccgggcccgagaggaggaggccggggctctccgggcctcccgccgcttagcctgatgctggaaggacgaaggtaggggctgctggaggggccgagggagggggtcgcgcgggcaacaaaggacggagagatgcggggggcggcggcctggccgaaagcggggctgcgggcccggaggcattgtcggggcgtgggcgggggcgggagggttcgaggccggccggtgggcgtgggcgggagctggctggggtgtgccccaacttccccgttgcttgtaggagaggagggggcactgcttggggtgccagggttgggggctattcccgggctgcgggtccccctgttgaaggcatcaccagcctcatcggggtccctaccctcggacgggggtttggcccttctgttggagggtcgcccgtacccccttccaagggcagagcaagacggctggacgcgccgcagggctctctgggctcacagagcctggggagcacagcctggtgggcgcggccatgcagcccccatctccaaacctggggtctgggagaacagggactgcccccctctcctccctgctacaccctctggggtcgcctggccgatggcctttgcaaaacttggttgaagtgcttggctgaggtggggtaggaggagattgaggcgg

SEQ ID NO: 13352 - DNA, 1324 bp, Artificial sequence
  DNA replication origin
attcccgggctgcgggtccccctgttgaaggcatcaccagcctcatcggggtccctaccctcggacgggggtttggcccttctgttggagggtcgcccgtacccccttccaagggcagagcaagacggctggacgcgccgcagggctctctgggctcacagagcctggggagcacagcctggtgggcgcggccatgcagcccccatctccaaacctggggtctgggagaacagggactgcccccctctcctccctgctacaccctctggggtcgcctggccgatggcctttgcaaaacttggttgaagtgcttggctgaggtggggtaggaggagattgaggcgggcggcttctctcagggggtgtccccccaagctggcgctggtggctggtgaggcagcagattttctgccctcctcccggggaggggcggcggccgcggaggatgcttggctgaaccttcagggcccgcccgtttggacctttcaggcagagcttgggccgagcgggtgcccactgggcactgccacgcaggccccagccccaccctgggaaggacgggcagagggagcaccttggggggaaatcacccacccagcagtgtgtcccccaacgtctgagacccctcctctcacttctgggtgagaagtgggggtctgggatgagggggtctgccgtcactcttgcgcgatgcctgagggaggtgggtggggtggcctagggctgtgggcagaggaggaggagggtgcggggagcaccacgtgtgtgcttcagaagcctcttccctttcggttgtaaatgtaaacaataagcccttcattcagctgctgttacctggcctggcacttctaggggctggctggtccacaggacagcagcctcggtgtccccaaaaagtgcagccccgggggttgatgagtgcattagtggggaagctgggggcatagagggggtcccctggaggatggggcagaccaggaagcttcatagagcatcttgcagaagtttgctgccaggttgcctgaagggggtttcgtgcaggagaaatagcgtgaataagggcttggagtcagaaaaggaggctattgggttagagaaacagcttaggatttaaggaacttagacctgcgttgagcacaggatgcattcttgtctgcagtgccttgcgggggaatgatgggattctggcttcaggacaggtggaggcggtggagatggagaggggctccaaaggcagaagaggcaggtggaggcgcctgggaggagcctcctccacacacacctgtgtgcacctgcaaactccagccctcagcaccgtgcaggc

SEQ ID NO: 13353 - DNA, 1006 bp, Artificial sequence
  DNA replication origin
acctgcacaaaagctgaagttctcacaagaaccaatgagcagggaatctgagggtcacaaatgcagcttccctcccctgtgtatggaagtggaggtagagcaggtggtgtcaagagggcagaactggctgggtgcagtggctcacgcctgtaataccagcactttgggagcctgaggcaggtggatcacctgaggtcaggagttcaaaaccagcctggccaacatggtgaaaccccgtctctactaaaaatactaaaattagccggacatggtggcacatgcctgtaatcccaactacttgggaggctgaggcagaattgcttgaacccaggaggcagaggttacagtgagccaagatcgcgccattgcactcaagtctgggcaacaagagtgaaactccatttcaaaaaaaaaaaaaaaaaagagggcaggatcaactgtcagggtggcagggccaggaggggaggccaagagggaactgggggaccacacgtgggcaggcctgccaggtggggagcagggacaactggggctgtggggagatggcctttctatcaccaagggaggcaggaccagggaggaggctgcagtgaggcagagaacagcaggtgccgggtcagggctaaccagcaagggtgctgaagaaggacaaacagcctggaaggggcacgagcctcctctccctgaaacgtgtgtgagtggggccaggaagccactctgtacggcagcaacaacacttataggacatctactctgtcacagggcacacagttctcctaacaaccctaaaagccagataccataaggatcccaattttacagatgaggatgtcgaggcagagagagatgcaatgtgcaaggtcacatagctagggagtggcagagctgggatttgaacccgggctgttaagctccagcatctgaactcttcaccgccaaggtagacagcagatgccggaaagcgattactgctccttggagtaaattccccctgctgggactttgg

SEQ ID NO: 13354 - DNA, 1324 bp, Artificial sequence
  DNA replication origin
ctctccagggccctcgggggtcccagcagctggggtgctcatgcccacacttcctgaggtgtaacccgcagtccccacaatcaggccccagaggtaggctcagcacagcccctgcccacatgccacaagccctagggcaccaggcacaacagcacctctcggaggagcaagggacccgtaaccgggagcctgggcaggcagcacctgcggggcagagggtctgggatcccgcaaaggaaactgaccacactctgccaggtccacccaacacccaaggatctggtggggctggaaggcagcaggggatctagagagtatgagagacaggcagggtctcctggacgtgccccagcaatcaggctgaggggatgaggggccacagagagactccaagccaggggtcccccacaatcagacaagcacaccagcaagaccgctctgggagctgaggatgatggtgaactggcagcaggggcggtgggggggggttggggtgcagggagagaagccagctgggggctgctgagatggaagcagatccctaaaatgtgaccgggtgcggtgactcatgtctgtaatcccagcactttgggaggccaagacaggaggatcacctgaggtcaggagttcaagaccagcctgggcaacatggcgaaaccccatctctactaaaaatagaaaaattagctgggcgtggtggcgcatgcctgtaatcccagccacttgggagactgaggcaggagaatcacttgaacccaggaggcagagattgcagtgagctgagatggtgccattgcactccagcctgggcgacaaagtgagactccgtctcaaaaacaaacaaacaacaaacaaaatgaggcctgatctgggacagagaggggacactgggagggaggtggggggaggtaggggctgcagcagagaactcaaagcaaccacagggcacaaacctgagggcaacccaacgacaggtgggcaggaatgggaccagcctttgcgggggaggccaggctgcacaacccaccagctgagagacagagagctgctgtgcctccccaggaacaggaaaatgcaaacccagggtgccccatccaatgggcaagtcaaaaggcctggcaatgccaagtattggagagggggcagagcagtgggtgggtgggcacggatggcacagtgcctgggctggacagggaacgtaagtgtacagtggagggatggatggtcccctagagggtcctccctggcaattggcctgcctgccctggagccacccacaggatgaactccattgtaagagcagggaggggtggtttggtggtgg

SEQ ID NO: 13355 - DNA, 1382 bp, Artificial sequence
  DNA replication origin
tcccttcactgcaccccggctgctgcctttgcagggcagaactagactcccaggctggggaaggaggtggccagcctggagcaaaaccgagttggctgagacagccaaactccaggagagagaaagggagaattctgctgcttttgttcctgttccaagatcttgagaaaaaaaaaaaaaaaaaaaagcctctgggaagagtgacaggtggaagagccagggaaggacggtccccccagtcctgttggcccttcgggctccctcacccacccatgcaactgtccatctgttctccgaggggctggaggcggccacatccatcagaggctgggaccctgggcagtgggcagctcgagatgtgtgtggcagaggccggggcctggcagtggtttgtggggaggggagcacgctggagtctgctctgggaacggggttgtggctgcctcccaaaacatgagctcagcctccggcagaggatctggccaagggacagggcctggactggtgcccttgctgcccacccagtggagaggggagggcctgtatcctcagagctgtgccacacagggagcagcatttgagggggacctttgagagggtctctcacgctaggaggtggtgcagggctacaagggagaggtggtcagagcaggtgggcaggagggcggtttgggatccacctgggggcaaagtcctgggtggagcagcgtggcgagggacagcctggccgggtgtgaccgagcacacctggaggctggtgcagacagggtggtcagggacggcctggctccagtggtgacattggagcaaggattcaagtgatgagcaggagtcgccccagctgccgttcagggaaaaacatccaggcagagggaacagaggctgcaaaggccctgagggcctggcatggtggctcacgcctgtaatcccagcactttgagaggccgacgcaggtggatcacttgaagtcaggagtttgagaccagcctggccaacatggtgaatcctcgtctctactaaaaatacaaaaattagctgggcgtggtggcacacatctgtaatcccaggtacttgggaggctgaggcaggagaatcgcttgaacccgggaggttgaggttgcagtgagcttagatcacgccattgcacttcagcctgggcaacagaacgagactccatctcaaaacaacaaaaaaaagttggggggctgggctgcagtgacctggatcctgggtgaggactgatgggactgatgagcacaggggccaaccatgtgccattgttttcattttaaagatgagaccattggctgggtatggtggctcatgcctgtaatcccagctctttgggaggccgaggagggcagatcacttgaggtcaggag

SEQ ID NO: 13356 - DNA, 1439 bp, Artificial sequence
  DNA replication origin
ttcactgagctcaatgtccctgtaccccgtgagtgttccagaccttggcaccaacctgaagtgcccgaggtggggcccccacccccacagaggatggtgcctttctctttcctttccatacatttctaggagccttcccagccccaggagagcaggtaggattgtccccattttaagtgacttgtctgagatgttgggcaaattcgtcccttcaagggcaacttctcggctctccactgaccacatcctaaactttttaatggcatcaggacggggaagccaagcccgctcttctgtggctggtgggggtgggggcagggctgcctcctaatgtccctgacgtggtccaggatcgatctgacggggcgggggtccggctgccagcacctgtctgcctgcctggtggcctggccacgggcttctccatggggagctggctctgttctttccagggtaagccatccgggccgctcttgccctgggttccccggccgcctctgctgagcagagactctgttctcctggtttgggaggagggggcacagaagtggggtttggagttccatttggttcaggaagaatgcccagcagagcctgggattcaggacggtgtgggctgctggagggaggaacccttctttagggctggatgctgcagaggctgggcctggggtgaccacaggagagaggtgagtttcagacggacccctccctggtcggggtgggctgggggatgtagactcggtcctccctggagcaggcatggactgaggggtggaaacaggttggggtggacccaatgcggggactgccggagggaaagtggcctcttcaaggaatgctgtggagaccccattccttccttcgtaacctctgcctttgagcaccttcgggagagaaaaggaggctcaggagagaaagccatttgagatttttggggcactgatgcatgttcctttggggccaccaggaagcgggagtcaggtgtgtggcccgtctgcatttcagcccagggggtccaggggatgagaggggagttggtgtgagtccacctcctggggctcatgttctgggggtgtgcagacatgcaccccagttagcctgggagtcaggttgtgcaaaccaagggggaacagagccccatggggttgggagggagagagacacagtgggccccttgagatggctgcagatgaggggatgtggagttgctatggacgggcatgaggacttccttaggtgatcctaagggtaaagtgctgtactcaaggcagaaggatggagctttgcctgaaacagcctgcttgatgcctgtggtattggtaaaatgcctttttttcttttcttttatttcttttgagagggtctcactctgtcacccaggctggactgcagtggtgcgatcatggctcactgcagcctccaactcctctctcagc

SEQ ID NO: 13357 - DNA, 1112 bp, Artificial sequence
  DNA replication origin
ccaggcgcaggtccttttcgccccgcttcacagagccgctgtctgagaggttggatcccgactcgttgccagtcttcacggagctgttgaggacgctctcccgcagggggatgacgcggctggtcagcgggggcgtggccgtgcccgaatgcaatgacaggttctgggcagtcagcgactccacggagtgggcatcactccccgagccctcggccgtgggctgccgggtcagcttggagggccgcgtgaagataccctggagggccgggcactcgaagtagcgcacgccgcccaccgcgccatcattcttgcccaccgggtcgtccagcaccacgccagcccactggcccggtgcgaactgcgtctctcccagatactgcaccacgcctggcttcacgccgttcacccacacccgctcgcccaccacaaagtcccccaggaagtcatcccccacttccgccgccttggggcccggcttctcgggggcagcagctgcggccggggaggaggagggtccagatgactgtttgtgcagtggggagcctgcagagaaggagagggaaagggaaagaggtggctgttagggctggcccctgggtggccccaggagcacagagtctagggttgggaggtggctgatttgtatttttgggtagagatggggtttcaccatctcggccaggctggtctcgaactcctgacctcaagaaatccgcccgccttggcttcccaaattgctgggattacaggcgtgaggcaccacacccaacccctgtttatttactttttgagacagggtcttgctctgtcacccagactagagtgcattggcgatatggtggctcactgcagtcttgacttcctgggctccagcaatcctctacctcagcctcccgagtagctgaaaccacagacacctgccactacactgggctaatttttgtatttttttgtagagacatggtcttgccatggaaaccgaggcaggaatggttggctgtgtggtcttgggcaggtcctcctcaggtctccccctactcttccagccctccagagcgtccccaggaaagtacgccctcagaagcaatgtttccaggccgggcacggtggct

SEQ ID NO: 13358 - DNA, 1189 bp, Artificial sequence
  DNA replication origin
gtcgcccaggctggagtgcagtagtgtgatcttggctcactgcaagctccgccccccaggttcacgccattctcctgcctcagcctcccaagtagctgggactacaggagcccaccaccacgcccagctaatgttttttgtatttttagtagagatggggtttcaccatgttagccaggatggtctcaatctcctgaccttgtgatccgcccgccttggcctcccaaagtgctgagattacaggcaggagccactgcacccggcccatttcagattatttttttgagcagattctagggttgaatttcaggaaagtgactccttgccccaagccttggggctgctgctatctcgtgtctggttttttctctgatgtttgtctcccgtgggagagttcccttctgggcctctgtccccatctggggtctggcttgcccctccttggatgccaggatcaataggccaagttcatggctgtgctttgatggagcacagacaagacagcaggtttgcaagataacaggtcttaggctcttgtgggttgaggcgggaggcaggtactgagggcaggtgggcctaagggtcctgcctctgcctctcttgttcctactgggtcccctccttcacacctaggcccactgtgcatgcccggcaggtgccagcagggaagttggggtgactggggttccaggccctgctccttgcctgtctcccaccacaccaccaacctggaccccataccccggagcatgctgaccctgtcctggccttccttgggggcccagtatgttgcagaagccgaggagaagctgcagcgagcccggctgctcgtggagagcgtgcggaaagagaaggtggacctgtccaaccagctggaggaggagaggaggtacgtgctggcccaccctcgccctggccctgagtccccttaaggaggatgaggaagagggcaggcttgggaatagcggacccaggttccagtcctgcccctgtcactgcctctggctgtgtcaccctggactggtgacattaactcttgggcctcagtcttcctatctgtaaagtgaggtgttggtcctgtcttctgcaggcagttgggagaactcttcatataactggagtaaagcacccagcacggtgccgggcacagagggacaccacatttttaaaaatttttttgaaacagggt

SEQ ID NO: 13359 - DNA, 961 bp, Artificial sequence
  DNA replication origin
accactgcactccagcctgggtgacacagtgagaccctgtctcaaaaaagaaaaataaaggaggctgggcgcggtggctcacgcctgtaatcccagcactttgggaggctgaggcaggtggatcacctgagatcaggagtttgagatcagcctggccaacatggtaaaaccccatctctactaaaaatacaaaaattagcagggcttggtggccatgcctgtaatcccagctactcgggaggctgagggaggagaattgcttgaacctgggaggtggagattgcagtgagccgagatcgcaccattgtactccagcctgggcaacaagagcaagactctgaaaaaaagaaagaaaaagggagggagggagggaaggaaggaaggaaggaaggaaggaaggaaagaagggagggagggagggagggaagaaggaaggaaggaatgaatggagggagggagggagggaaaaaaggggaaatggattcccaggacaggagctgtgagctccactcacaggtctcagtccagggttggggaggggcgcactgtgagtgtgaactggctcatggtggaggggtggggcattcagccttcttcctggtgcacggctccccagggacacctggtgtgataaccagcctcccttccaccacccccagcctattcctcttctcaatattctgctggagagtgcaggaacagtgaactctatgcaatgaacaaatgcggtgttccaaggccaggcacaacggttcatgcctgcactttgggaggccgaggcgggtgaatagcctgaggtcaggagttcgagactagcctggccaatgtgccaaaaccccatctctacaaaaaatacaaaaattaaccaggcgtggtgggggacgcctgtggtcccagctacccaggagcctgaggtgggaggagcacttgaaccctggaggtcaaggctgcagtgagctgt

SEQ ID NO: 13360 - DNA, 991 bp, Artificial sequence
  DNA replication origin
tccccatcccatcctcctgtgatgagcactcaggacaagcctgagcctggtgaacgtcacgatatggagggcgtggggtccaggaggacaggcccttgcctgggaaagctgtcctgaagccccccaccaccctcctgcccagacattgggctcagccactgtagaggtgatggaaggagagcagggcccagccctgggcaagggggtggttcacaggctggagggagggcctcagcgccaccgaccccctatatccgggagtaggcccttggccctcagggttccgggataaagagcatcactctggccacacacccagactgtggctgtgggggtcactgagtcctgccggccttcaagtcctggcctatctggctagcaggggttggtggctgcaccctctgtggtccctgtggctcaacagaagataagcccctggggttggcacggactggggagtcttgaatacccccaggggcttccctagagccttgtaggagtgcgcagtgctgagctcagactggtgcccatggggcacagattggtcaagtttacttgggaagtggcggcctctgccccagggtagcctcttgtctcatcatctccctgcactgtgtccacgggagaacttgggaagccttggtgtgtgggtagaagcctcttgatttcaggatggaggttctgttgggaggtggtttggagggtcagagcaggcaggactgggcagtgctgaaggatggagtttgtgcaggagcgaggaggctggcgggccttggggcaggtacagctctgggtgccatggtgggggtgactatggagaggaggaacctcataagacagttgggtgggggcagtgtaagaagaagggtgctgggtgcggtggctcatgcctataatcccactgctttgggaggccaagttgggaggatggcttgaggtcaggagttcgagaccagcctggacctcataacaagaccgcatctctacaaaa

SEQ ID NO: 13361 - DNA, 1328 bp, Artificial sequence
  DNA replication origin
gggattacaggcatgagccactgagcccagccaaaagcgtcttattaatgcagagctagccaagcagtaggactggagttattactcaaataaatctccccaagaactcagaggctagggtttttatggataatttggtgggcaagggcccagggaatgggtactgctgattggttggagatgaaatcacaggggtgtggcaaacggtccttatgcactgagtcggtctctgagtgggggccacaggatgggctgagtcatgagtcacacaggtccaggtgagtcagtcggttgcccgaatgcgaaagtctgaaaaacatctccaaagaccaatctcagtttccacaatagagatgctatctataggaggaagtggggaactcacaaatcttgtgatctctcgccacatgactcctgagcagtcagattataaaaacgatgcgtaggttttagcagcgtccaggcccctcccataatcctaatctcacggcctttcgttagttttacaaaggtggttttggtctcttgtataaaaagcaggttaggtttaaggagtaactattatcatccttgtttcaaagttgaactataaactaaattcctcccccggttagcttggcctatgccccggaatgagtgaagacagccagcgcgtgaggctggaagcaagatggagtcagccacgctaaacttctgtcactgtcctaatctttgcaaaggcagtttggccaggaggctgtggggagaccttgtgggttttgccaggacctgggagattctcgatctatgtttggctgtccttctaagccagaagctccctggggttggggcctgcctggggtgagtccctccctccctgccatgcccagtctagccaaggtctagttcagggatcagggcaccacgtgggggaaggactgtgttccttgtgctgaattaggatttatggctttggggccggatgggaggcgtgcgcactgattcagtaggagcgctgctgtggtgtgtgtgtggttggtgggagcggggcgggcggggggcgggggggctggttggggggacaggggtaaaagcctatcagagggaggtcccatcagacaagatgggaccaagagtccagttggctctgctgcgactttcggcctgtcactgccttcctgcacatctcaggggtgggagggggacaaaggctgtaagagtaagaggtacctggcccaagccttaggactagaacccgggccaggcgggagtgaccagccgggacactcagggcctccgcgcgttccagctgggtgaccttgaccctccaacttcagccccctgcgccc

SEQ ID NO: 13362 - DNA, 702 bp, Artificial sequence
  DNA replication origin
gagggagggggtgacagctcccagctcccggcccctcccgggcaggtggggggcggccgtccctcccctccccccgggcccgaattataatcccagtcacgtgcctccccgggcacccaaaagccggccccagctcctgtaacaccttgagagggggaggggcggggacccccccccccggaggcggaggggatcgggggcgggggtgggggagaaggggagaagggcctcggtgcccgccccccgcaaaagtttctcctaccttggaggatccccaagcgctcctgccagcggcgccccggccccggcccgcggccaggactcagcctcctgccgctgcctccttaattaatccgggagaatgggggaaggagaggcagagggaggcgaggacggcggcgcggcgagggcggggagggaggcgcggggagggggcgcggggggggaatcggccggccggggggctggcgctcggcggcccccacccccggcgcgggctgcggcggagggcggggcggcgcggggagaggagcggagagcgggagcgcggggaggctctttgttctgtaatcccagtaagattgccagccattcgccccggccctaatcccagccccgcgcaacaccaccctccattggctgccatttacatacgggattagcccgccccgcgccccgcgcccctgcgcaccccccttgcta

SEQ ID NO: 13363 - DNA, 1742 bp, Artificial sequence
  DNA replication origin
ggggatcctccaaggtaggagaaacttttgcggggggcgggcaccgaggcccttctccccttctcccccacccccgcccccgatcccctccgcctccgggggggggggtccccgcccctccccctctcaaggtgttacaggagctggggccggcttttgggtgcccggggaggcacgtgactgggattataattcgggcccggggggaggggagggacggccgccccccacctgcccgggaggggccgggagctgggagctgtcaccccctccctccttgccaccggctcttctggaggtggggggcgtcccgggccggcgcccgcaggctgctgcagttggcgaatgaggtcagtcgcgctgcccgcggtggcgggcgccggggtgggagcagagggggctgggaaggccgcggtccccgcctttcccccctccaccttctcccggtctgggccagcccctggcccgcgcccccaactcccaggcggagtccagtccagccaggattgccccagcagggtggttcctgtagtggaccccccgccccggccccggggagggggctggcctgtgtggtggtggccgctgaatcccgggtggaggggactcagaaggtggcagtggggggaccacaaagggttcagaggagtaagttggggatactcggtctgtgggtggtctctgagttcctgcagatgggtggagaggacagaggaggggccacagggtgctgaacacccacccgccccatcctaagtaccctgggcatgatgggcttgacacctctcctgggctcctcacccctggccagcagccagggagtgagaccctgcctcgcctggcgtgggcccagggaagggggccgctgtgccgctgagagttcgttccaccctcctggcagtgctggagggggctggagctctggcgtctggcctagtgaccctacctcccaggaccaaggtcctgcggtgggagtctcctgtgtccccatcccagctgaagcgagggtgctgggacataggggtctcgctgcagggcctgtgaggggagcactgactcttggatggagaatgtgccaaggggtaccccgggatggccctgggcctggcgggtgggagtggagggcaggcccccgcagtttttggagaagtgggcatttgctggggtttctcttagaagaggagaggggtgtctagaagccaccctggcgcgccgctgccatggtcggcctctgtgtgtctggctgccccgtggccaggactgttgactccttggcactggcccggggccttgggacttggaaggtgccccaagcagctcatttatttcagcagtgtcattccagaggggaagggcaccagcatcgattatttattctaagcaggaggaggtggctggaggctggtggctgctggcagggaggggctaggtataaggtagttaggtggccgtcatgaaccgccctatttggggcccaggagggtgtgagatagactctgacctcttctgagcaggcatctgcggaccaagggacaggcttggccccaaggtgacagggtatcggaacccccatcctgcctctggggtgtgggaggctcaagtccacacctcgttcttccacagcctgttctgagggtgacctagaaattggcagttctaactcagagggtcccacaggaccccacagaggaaactaggaaggaagggttgaaactccgcagccactcagagcctgcactctt

SEQ ID NO: 13364 - DNA, 897 bp, Artificial sequence
  DNA replication origin
agcagtgtcattccagaggggaagggcaccagcatcgattatttattctaagcaggaggaggtggctggaggctggtggctgctggcagggaggggctaggtataaggtagttaggtggccgtcatgaaccgccctatttggggcccaggagggtgtgagatagactctgacctcttctgagcaggcatctgcggaccaagggacaggcttggccccaaggtgacagggtatcggaacccccatcctgcctctggggtgtgggaggctcaagtccacacctcgttcttccacagcctgttctgagggtgacctagaaattggcagttctaactcagagggtcccacaggaccccacagaggaaactaggaaggaagggttgaaactccgcagccactcagagcctgcactcttaaaatgttcgagaacttaaggccgatggttgtaaaactgggtcttgaagacagctttgtagggggcacgctaaacctacttaaaaggactgttctctcgatgttgggagaagggtcatttatttgcagtatgctaatcacaaataatttttatctgttcattgaaggcagcctcccaggagcccggctagccttctgatgaggtggtagtcgtcagcacttggtgtttggcaatagtctgagtggcagctgtaatctagggtcttggaggtagctgtttttgcagcctgcttgactccagaggccaggccatccacggtttggtgacagcttggttgttggacctggggtcttgtggatggtgggtgatggcttgggacattcacgtcctaagcatgaccttggaaccatagactgcagctcccagatgattctcattcagggtctagtctctgaccactcactgcttcctcagccgactcata

SEQ ID NO: 13365 - DNA, 849 bp, Artificial sequence
  DNA replication origin
acgccactccagcctagatgacagagcaggactctgtctccaaaaaaaaaaaaaaaaaaaaaagattcatgtactcatgtactttactggaagtaaattatgcttcagtgaaagataaaaataagtggcatggaagaagcccaggacggcgggtgaggcagtcagggtggggcttcctggaggaggtgacacctgagctgccgggaccctcccaggggagttggcgtttgcaggtgaggaggggagacaggcactgtgcccaggccctgctcttctacaagggaggcgccttccctgccccaccgcagcacccacctcccctagaaataaatgctgaataaataaagacctgtttgaaggagtgccaaattactggctgcccaggaaacccaaccgccagcctgggccgcccacgtgtcctggtcgggcctgagcggggccagaggctgtgggagtgggtgggtgggtggggaacaaatccagctctgcatggctggagtgtgcagggcagggcaggaagtggtgggcagagaccagcgtggccattggggtgaggccaaggatctcggaaggtcagcctcgctgcagggtgtggggcaggggtgagacgtgggcagtgagggggatcccaggaagctacggcggaggaactgtcgggtcatgcttggagttggggagccaggagttgccaagtctctgcgacagcccaggccagagacagccaggcatgaagcagacagcagcaggggatggaggacggggcagagctttgggaccaggagctggcgacggggggtcccaagggaggcacctggaatgaccaccaggtttctgatcccaggagtttga

SEQ ID NO: 13366 - DNA, 1097 bp, Artificial sequence
  DNA replication origin
ccagcagcggggaagggcatttcttaaaaagggcacagcaggtgcaaaggcctgagcgagagtgcaaggcccacccaggggcctgcagactggagtgtggggctctggagggaagacaggttcagcttgatctgtgatgtgactcctgatgggacagtgagcctttggagggtgaggtcatgccctgcgcgtctctgtgtcccagcacgactgtggctggggccagccaccttctctgtgaaggttttcactgcattcagactgtgctgggactggccccaggaggacttggactagcgtgtgtgtgagtgagtgtgcatgtgtgcacacatgtgtctgtatgtgtggacatgcatgtgagtttgcatgcatgtgtgtgcatatgtgtgtatgcatgtgtgagtgtgcatgcatatgtgagtgcattgtgtgcacaagtacgtgtatgtgtgtatgcatgtgagtggctatgcgtgcgtatgtgtatggggtgtctgcatgtgggtgtgcatgcgtgtgtgggtgtctgcatatgtgtgtatgcatgtgagtgggtatgcgtgtgtatgtgggtgtgcatgtgtgtgggggtgggggtgtgcatgggggtgtgcatgtatgtgcatgtgtgtgtgggtgcatgtgtgtgtgcatatatgtgtgtgatatatgtgggtgtgtgtgcatgtgggtgtcaatgtgtgtgcatgtgtgtatgcatttgagtgtgggtgtgcatgtgtgttcatgtgggtgtgcacgtatgtgtgtgtgtgtgtgttcatgtgggtgtgcgtgtgtgggtgtgcatgtatgtgtgggtgtgtgcgtttggggggtgtacatgtgtgggtgtgcatgtgtgtgggtgggtgtgggtgtgcatgtatgtgggtgtgcgtgtgggtgtgcatgtatgtgtgcgtgtgggtgtgtgtgtgagtgtgcatgcatgtgtgtgttgacttgctagtgctcacacttacctctggggcagagatgtgcttgttaggtgccccctccctctctccactccattccagcaaaggtcactgagtgtcctctctagtcttaggaacgacactcgacagtggaca

SEQ ID NO: 13367 - DNA, 850 bp, Artificial sequence
  DNA replication origin
gaccagcctggccaacatgatgaaaccccgtctctactaaaaatacaaaaattagctgggtgtggtggtgcatgcctgtaatcccagctacttgggaggctgaggcaggagaatcgcttgaacccgggaggtgggttgcagtgagccgctgcactccagcctgggtaacagaacgagaatccatctcaaaaaaaaaaaaaaaaaaaaaaaggtgtagggaggaagggagagagaccgagaggggggagagaaagtaagaagaagaggaagtggagagggagcaaaaataggggattgagaaaaagatgggagaggctgggcgtggtggctcacgcctgtaatcccagcactttgggattaccgaggcaggtggatcacttgaggtcaggagtttgagaccagcctggccaacatggtgaaaccccgtctctactaaaaatataaaaattatccaggtgtggtggcaggtgcctgtaatcccagctactcaggaggctgaggcaggagaattgcttgaacccaggagggggaggttgtaatgagccgagatcatgccattgcactccagcctgggcaacagagtgaaacttcatctcaaaacaacaacaacaacaacaacaacaacaacaacaacaaagacaggagagaggagaaagagacagactgagaagacgcaggaacaaagatgggggctcgggggcacagaggaggggaggcaggctggggactgaggactgggcactgggatatctgttgtcacctccatgctacagcccccaccctgagccagaaagaggcccatcctctcatagcctccttgaattctgcccaaagtggacaaggggggcca

SEQ ID NO: 13368 - DNA, 1013 bp, Artificial sequence
  DNA replication origin
ctcccgagtagctgggacccagggagtcctcgcaggcgtcctcttagtccaaggccaaggacatcattcacagatggctgagcagagacccaaggtccaagggggtctcagccaggacaccatctgtccagtcccactcccatgcccagacatggctccttccaacctaagagggcccaggcatcctgacctgccctgggaggctgtcccctgcatgagtgacctctgtcccaccccctagacttggagatcccagcagcaatgttaccacaacagtcggagaagtcttgggcaccggtggccttgggctctggcatgggccgactcaggcccaggtcgctgggggcaagggggcaggaaggtgcttcctgcttgagctctcggatggcgtggttggggagcgccgtgctgtacaggaagctggccatggaggaggaggtggcggttgggggcaggtcctggggtggcaccttgggggcctggccatgcaggccacagtcccgtgaccccttgggaatcagggagacaccgttcagctccaccagggccttcgagtcccgcccgccatcctcaagtggcctgagtaaaggagaggacacatggacagctttgtacatctgtttcacacattgcagctcttcccccgaaaaccccgcatccctgccctctgcagaacataacagccccatgaggagggcaggacaggagctgctcttccacttcacaagtggggatgcaggctcggaggtgggaatggtgtgcccagggccacagagctaggccaccggaggacctgggccctgcccctctgctccaatccactgttcagatcccgccaggtgcggttgattgcctcctgtctcctgctgcacccctccccttcctgcctctgcattgcctggggcacttagcagagatgggttcaaccttaagccctcaggctgccttcttggctctcctgacaactggtactgcctcagaccagcctcaacaacctaatctcccctggatcc

SEQ ID NO: 13369 - DNA, 824 bp, Artificial sequence
  DNA replication origin
caggcaggtgtgagccaggcggaggttgggggaggggaaccagggaggagccggctctgcctgccttgggagggttctgcccaggccagtgttctggcctgtcccacgctctggactttccaaaatgccaagccttttccaaatgtcagttcctgagtcacatccaaagagtgttgggtgtggagtggtcaagatcttgttccccataaagccggagctccctctggggagctgcgtgggggagaaggcagctgcccagtactggggaccccacgggtggtggggacggggtctggcagcccaaggcattccactggtcgtgggtgagcaaaccctgctcccagctctaccagccaccaaatctgggtgaattgggccagtgacagtgtgggtggtacaaaggaggaagaaacagaaaaattagaattgggggaaacattaggcttcaggaagtctcgaggacatgtcctctgggatgatgctgggaccaggtgaggggccgaggagggtgcatggtggcactgcatgaaggcagccccttcccaaggggcaacagcagggttcgggggttggccctctgtccactgaatctccccagtgctgaaaagacaagccccaataaaccagatgaaccagacggagacaaattcacaggcactcaaaggaccaattgctcaagggctggggctgggggtggctgctgatgtgggaggtgggggggaagtggggagagatgctttgccagctgttgagatttcgaaggtttcatttgacaacgagctaagtgtgacatctcagtgggatctggatgccaaagccgccaa

SEQ ID NO: 13370 - DNA, 2113 bp, Artificial sequence
  DNA replication origin
agcgatcctccagcatcagcctgccaagtagctgggactacaggcccaagcccggctaattttttgtatttttatagagatggcttcttactgtgttgcccaggctggtcttgaactcctgggctcaagcatttcccaacaactgtagccttccaaagtgctgggatgacaggcatgagccactgcacctggccaaaacccctgttcttatgcagcttcctttctagacagtacacatagagatgagtgtggatgtagtgtcaggtgatgaccagtggatgacagacacagcaggggagggaatgagggatggaggaggctgtgttaggctgccaaagtgctatttgagcaaacacctgaaaggagggagggagggagggagggaaggaaagatgggtggatggatggatggatggatggatggatggatggatggatggatggatgaatggatggatgggcagatggatatacagccgggtgggtgggtgggtggatggatggatggatggatggatggatggatggatggatgaaaggatggatggatgaatgggcagatggatggatggatggatggatggatggatggatggatggatggatggatggacggacaaccgggtggatgggtggatggatggatggatggatggatggatggatggatggatggatagacggatggatggatggatggatagacggactgatggatggatgtttatggatttctaggagaaagggatctgagcagacagaagagcaggtacaaaggcattgaaccgagtgtatgctcctggcctgtaggggaagcaccaagggggcggcaggggtagggggagcacacagaggcatgaagggggcagatgaggccagaggtgatgaagtcacatacgtaggactttggctgtcaccaaatgagatgggagccactggacattttttatttttattttttgagacagggtctcactctgttgcccaggctggagtgcagtggcatgatcttggctcactgcagcttcgaactcctaggctcaagtgattctcccacctcagcctcccgagtagctgggaccacaggcgtgcaccaccacacctagctttttgtattttactttctgcagagatggggtcttgctgtgttgtccaggctggtcttgaactcctgggctcaagccatctgtccacctcagcctcccggagtgctggaattacaggcatgagtcaccgcacccagcccagccaatttcctaacagaaaagtgatatgattttgacatttctgcaggatccctctggccgctacatggccagagtggagtggggacggtgggaggtgatggggaccgcagctcccgggtcctgtgtgtccagcagcctgtctaacactcagccttgctgtttggttgtctttccagcggaagccctgggcctggaccacatggtccccgtgccctaccggaagattgcctgtgacccggaggctgtggagatcgtgggcatcccggacaagatccccttcaagcgcccctgcacttatggagtccccaagctgaagcggatcctggaggagcgccatagtatccacttcatcattaagaggtgcgggtggggctgggcgcagtggctcatgcctgtaatcccagcactttgggaggccaaggcaggcagatcgcttgaggccaggagttcgagaccagcctggtcaacatggcaaaaccccgtctctattaacaatacaaaaattagccaggtgtggtggtgggtgcctgtaatcccagctacttgggacgctgaggcaggagaatctcttgaacccgggaggcagaggttgcaatgagccaagatcatgccactgcactccagcctgggtgacaaagtgagactctgtctcaaaaaagagaggtgcgggtgggcgtaggggtctggccttctgctccgggcttggcttgggctccgggttttggggcatgtgggctaagcaggggcctggggaggcaatgatggggcaggggcagaatgaatgggttctctaacttaacacagagaataagacgagtctgagagagaattctgttatagctccttgtgtagctgtgtggcctatt

SEQ ID NO: 13371 - DNA, 1660 bp, Artificial sequence
  DNA replication origin
attagccaggtgtggtggcgcgcaactgtaattccagctacttggaaggcagaggcaggagaattgcttggacccaggaggcagaggttgcagtgagccgagactgtaccattgcactccagcctgggcaacaagaatgaaactccatctcaaaaaaaaaggggggtggggtgggggcaggacaagttttcttttttcagaggcaagttctttctgtgtccccaggctggaatgcagtggcacgatcatatcttcctgcagcctcaaactcctgggctcaagtaatcctcctgcctcagcctccagagtagctgggactacaggtgtgagccaccacacccagctaattttttgatttttttgtagagatggggtcttgggttatgttgcccaggctggctgcaaattcctgggctcaagccatcctcctgccccagcctcccagagtgctgggattagaggcgtgagccaccatgcccagcctgggatgattttggatagagctctggatacctgacaagcagagtgatggggtcccagctgtgtctcagaaagaccactttaggggcaggtgggaagttgaaggaagggacaagactgaaggcagaaagacaagtcacaagagcgtggcaggcgtccaaggcctggcacccagtccctgcttattgggtgacacatatttactgagccctgcccttctggctggggaggccaagcagctgagtgtcctaattggggaggcagctgccagggagtacaaaacagagtagggctggtgcggtggctcaggcctgtaatcccagtgctttgggaggccaaggtgggaggatcgcttgaggccaggagttcaagaccagcctagacaacatagtggaaccctttctctaaaaaatgttaattagctgggtatggtggtgtgtgcgtggtcccagctactctggaggctgaggcaggaggattgtttgagaccaagagtttgacactgcagtgagccgtgattgcaccactgctcttgagcatgggcaacagagcaagaccctgcctctgaaaaaacaaagcgggggggcctcacctagtgcagaaagtaggaagagtccttgaagctgaggcttgaagagcaagtgaggctttggggggacaaagagaggagggctgaggtaggtgggtgtttaagacgagagcgatgtgggcaaaaacggagctggacagggactgggtacgttccaggaataagaaggtgtcaccagagcagacacagggtggctggaggtgacatgtcagggcaggtgtggacttagtcagggttcccgaggacgctaagcaggtgtctcctacacatggtgccgggctgaagtggtgggcagaggcagacatccagcctgggttacacctgcccagccatgcactctgggacagagctgcgtactttttctcaccgacccacgtggaaggcctcataagccgggccaaggcaatttccagaaggcaaatgagacccacagcaggaagtacctgggggagagccaggcctaggtctgcattttggaagggtgcccctgcccgctgagagatgtcggagaaggaagggaggaatacatcagaagaccacctgggaggctccaacagaagatagcagtagaggccaggcgtagtggctcat

SEQ ID NO: 13372 - DNA, 1270 bp, Artificial sequence
  DNA replication origin
aacctcttgcttcaaacgctttggcttggagcaggggaagggggtgggagaggggtccccacttctgccctttctttaagacatagggtctcgctgtgttgcccaggctggagtgcagcggctcaatcctctgcttttagggaagcgggaggatacgagggtttgctgcaccgacccacttaattgcacgccatctgcacagtgagcctgaaagagaacagattgggagcttcgcgggcctttgcgcggatgaaggaggatcgggttccccggcccgccctacccccgggctctgcgccctctccatgcacgggatggcagtgcccgcgggcacagtctcagccccgccgctcccggccggggcaggagccacttccggctctggccgcggatctgagcggtggagcgggggcggcgggtctagacgaccgacaggcgccagcgggcggtggcgggcgggagggggcgccaggtgggccgggcccgggggacggaacggtgggacagaaggctggggacccgaccccctgcgaggcgcctggaacgccgcacctagatgcttgcactgggtgcaaggaaagcaaaacagattttaaatccagagtcacaggatcgggggtgggggatgggttacaggacgtgagggttgaaggcaaggtggcagctgcaaggactcttcagatcatcttgacttcataggcagtttctgcttggaggtggtggccagttgaggaggtcactcctgcccccatcctggagtggaaaaagtgggcccggcccagggcaggggctgagggtggagtggaggcgcctggtggcactgggagccactaggaggtgggagggaggaaggtgaggctggcagctgactgggtggggggtttgcaccagcggagagggggtggctgtgccaggcacgtggtttctagcgtctttccaggaggaagtgtggtctggaaggctgggatggggccttcctcccagctctgggcatggatgggactgaccctgaggactggcagaagccctggactaaagttttgaccatttcctcagctgattcagaactcagtccctccaagccacaggcctcattctgggccctgggtggacggttagagccagatcctgggaccaccctgacccctgactctccagaacccctcgtccacccgactggctgaccctctagttattttctccacctggcccaaaccactgccatctctctctctctctctttttttgagacggagtctcgctctgttgc

SEQ ID NO: 13373 - DNA, 840 bp, Artificial sequence
  DNA replication origin
ctctctcaccctcctcctcctcctccttttttttttcttttttttctttttttttttttttttttttttttttgttcctcgaaggcgcgttgcgcctgcgcatccgcagcgccgcccagcgggagttgtagtttcggatgcgttccccgtcaacgcggcggcggcggtcgtggactacaactcccaggaagcaccgcgccggctagccccgaacccgaggacgaggcaagcgcggcgcccggccctctccagcaagggctgtcaatggaggcgagggtggtgggagcgagaacatggctgcacctggggcctgcgcggccgcccgggtgggggaggggagccggggtgcagaaacggaaatctggacgggtggtggctccggcgtcgtccccaccgagcgccagccgccgtccaagtccgccacttgctcttgcaccccacattccttgcaaattgcgaggcagggaagctgcaaaagccggggagccccgggctgggccgtcgccctccttgctctgcaaaaggggagtccttccgccttgcaccaccctccaggacacaaagaactcctctctagtgttttccaagctggcctccaaagagaccgttgcccccaagttcggacaggcgagaggggaggagaccttgtgttttaattcctcccccagaccctccgcctctatctctccctcaggatttggaaggaaacttgcaagggagtgggagcagaaatcctgactcgtagctcctgttttgttctgtcaaccgcgatgcgatttaactcaaactcctccccctaccactattttttgcttctcaacttgaattagccggtgggtt

SEQ ID NO: 13374 - DNA, 1977 bp, Artificial sequence
  DNA replication origin
caccgcctcgccgggtctcgagccccgccggccttggcagtggccgaaacgaggcgatgggggtggggcggcacggacgcggtcgcgggggacgacagtggcacgcgcgcgcctcagtgcgcgtgggggaggggcgcgcgcgccgaccggcgtgcggtgggggggcgcctcgcgcgtgcgatcccgcgcgcgagcgagcgagcggccctgcgggctgcgcatgccccgccgcgctgattggccggctaggcggtgcgggggcgcgcgcggtgccaggcccgagccgtcgtggggtcgcgctcgcctggtgtatctggggctcctgcgccggggcagcagacgcgcgggattggccaaccggcgcgggggcggggccgcgcgttgcctggtaactgcggcgggcgggggagcgggagcgctgtcccccgccccgccccgctcccaggtggagtccgcagtgggctttgtcccgggccggcccggcgcgcctgccccgcggggcctgttctttgggggaaataaacacaatgaccggaaggaaaacttcagctttaggccatgaaaattaagccgtctgggttcagccagcacccagacgacgggagtgcagaggaagaaggaaaatgaaatggaaaaagctgtctccttcccgctccccgacttctccactttttcttaatccagcttttgctttttcgtgtagcgaattttgtcctccctaggttatggatttgcgctgatttgcggctggggatgttcacaggtggggtgctgttggagtagtgtccactcttggcgatgcgcagctcttgctgactactgacctcctttttttaaaaaaaattatttgtggagatgcgttctcactttgttgcccaggctggtcttgaactcctaggctcaagcgatcctcccaccttggccccccatagtgctgggattacaggtgtgagccatcgctttcggcttaattttcttttttttttttagaaacagggtctctctgtgttgccctggctgaagcgcagagtggcacaatcatagcacattgcagcctccaacacctgggctccagcgatcctcctgcctcagcctcctcagtggctgggactacaggcgcatgccatcatgccctgctaatttttttttttttgagatggagtctcactctgtggcccaggctgaagtgcactggtgtgatctcggctcactgcaacctctgcctcccgggttcaagccgttctcctgcctcagcctcctgagtagctgggattacaggcgtgcccaccacgcccggctaatttttgtatttttagtagagatggcgtttcaccatgttggccaggctggtctccaactcttgaatcaagctgaaagcaatcggcccgcctcggcctgccaccaaagtgctgggattacaggcgtgagccaccgccctgggtcacgcctggctaatttaaaatttttttttagagatggggtcttcttgtgttgcctaggctggtcgggaactcctggactctggtgatcctcccgtttaggcctcccaaagtggtgggagtacaggcttgagccaccacgctgggcctcatctcttttaaattcaactttgccgcagacaatggcttgatcagccaacagtgcagaggagaagtctccagtccttcagggaacaaaaggggaagttagtttgcaaatgagaacgtgcaggtagagtgccctgcggaggcggggtcttctccccaggctgaggcctgtggtgtgggatgaccgattttatttcctgctacaggatttttctgtggctgctaccttggctttcgtttctcctcctccttgagatcttggtcttttggctggaatgacatttttcagcctatggaaatctttcttgctcatatgcagccacttccttaaggtcttctcttttttttttttttttgctgctgttgttgagagggtttcgttctatccccc

SEQ ID NO: 13375 - DNA, 1484 bp, Artificial sequence
  DNA replication origin
agagtagcggggcgggaccagagggcggaatcagagggagaggcggggactggaggcggggtcagaggaggagccagcgctagggggcggagcgatccctaagaggcggagtcagagggagaggcacaagcgggaggcgaggccagagcgcggagcaggagttggagaccgcggcggggcgaggccagagagcgctgtgggcggggccagtgtgcggggcggggcgtctgactcggccccgctctctgcccgcagaggaggagcggcagacgcagcgctctaaaccgcagccggcggtgcccccgcggccgagcgccgacctcatcctgaaccgctgcagcgagagcaccaagcggaagctggcgtctgccgtctgaggctggagcgcagtccccagctagcgtctcggcccttgccgccccgtgcctgtatatacgtgttctatagagcctggcgtctggacgccgagggcagccccgacccctgtccagcgcggctcccgccaccctcaataaatgttgcttggagtggaccgaggctctgcaggaatgcagggagggccgggctccgccccagggttatttctaagttgaggacaggaggttgtgagttctgctggggggaagttgcaagagccgaggtctggttgcatgttgccctggtcttggccaagaacaggtttgcacaaggccaagttcaagaggaactcccggtttcctgctgaccgtttggtcagaaaccacctgcttggactctggcggaagagtgctgaagatgggtgcacacagtgcagcagggcagccctgtctcatgacaggagacaggctgccgtccagggtgtaggagtgacctcatagctgggataaaaaatatattataacttaggttcgggcgcggtggctcacgcctgtaacccagcactttgggagaccgaggtgggaggatccgttgagctcaggagttcgagaccagcctggccaacatggtgaaaccccatctctaccaaaaatataaaaattagctgggcgtggtggcatgcatccataatcccagctactggggaggctgaggcatgagaatcgcttgaaccggggaggcagatgttgcagtgagccgagacggcgccactggactccagcctggacaacatggtgaaaccccatctgtaccaaaaatataaaaattagctgggcgtggtggcatgcatccacaatcccagctactggggaggctgaggcatgagaatcgcttgaaccggggaggcagatgttgcagtgagccgagacggcgccactgcactccagcctggactacagagcgagactctagctcaaaaaaaaaaaaaaaaaaaagtaacttaggtgcagggtgtcctctgttattcactgagaccgtgccccggttatgaggttgtaccagaaagcaagtattcactatgcacactattcaccgctcaccctagcattgaagccagcctgtagcct

SEQ ID NO: 13376 - DNA, 1034 bp, Artificial sequence
  DNA replication origin
cttgctgcccaggctcgagtgcaatggctcgatctcagctcactgcaagctccgcctccagggttcaaaccattctcctgcctcagcctcccgagtagctgcgattacaggcgcccgacacacgcccggctaatttttgcatttttagtagacacggggtttcaccatgttggccagactggtctcgaactcctgatctcaggtgatccgcccgcctcggcctcccaaagtgccgggattacaggcgtgagccacggcgcccggcctgaataaatcttttaaaacataaaaatctgggtgagcccctggccggccggcacagatgccggggtggggccgcgaatcggttgggacgcactctatccggcctaggggcacccgggccagcacccggccgccgcgcgtgcgcagtgggcggggggccccgcgctcctacctgcaagtggccagtgccaagtgctgggccgccgctcctgccgtgcatgttggggagccagtacatgcaggtgggctccacacggagaggggcgcagaccccgtgatagggctttacctggtacatcggcatggcgcaaccaaagcaagagagggtggcgcgtgccagacaccaacggtcggaaaccgccagacaccaacggtcagaaaccgccagacaccaacgctcggaaaccgccagacaccaacgctcggaatacacgccagaccacgacggagggcgaccacctcccttctgaccctgctgcgggcgttcggaaaaaaaaaacgcagtccggtgtgctctgattggtccaggctctttgacgtcacggactcgacctttgacagagccactaggcgaaaaggagagacgggaagtattttttccgccccgcccggaaagggtggagcacaacgtcgaaagcagccaatgggagcccaggaggcggggcgcctgtgggagccgtggagggcactttcccagtccccgaggcggatccggtgttgcatccttggagagagctgagagctggaggtgagctgggctcgcggtcgcc

SEQ ID NO: 13377 - DNA, 942 bp, Artificial sequence
  DNA replication origin
gaaagagagagagaaagaaagagaaagaaagaagagatgaaagaaagaaagaaagaaagaaagagaaagaaagaagagatgaaagaaagaaagaaagaaagaaagaaagaaagaaagaaagaaagaaagaaaagagaaagaaagaaaagagaaagaaagaaagaaagaggaggggaggggagggagaggggaagggaaagggagggggaggggaagggggaggggagggagaggggaagggggagtggagggcgagggaaaggggaggggaaggagaggggaaggggaggggaaggagaggagaaggggaggggaaggagaggagaaggggaggggaaggagaggagaaggggaggggaaggagaggagaaggggaggggaaggagaggggaaggggaggggaaggagaggggaaggggaggggaagggaaggggaagggaaggggaagggaaggggaagggaagggacccaggctaacagactccagataccagcagcagcccttgagccatgttgcctaattgtccccaaggagaaaacttcccaggtcttcggaggcagcaaaagctttcctggcacagagctagaaaagaagattctcatggtgtctcatgtggcaggaactacaggagctggggtgggtaatccatttaggccacttgacaaacacctatttttaggtcaactctgagaatagaaagatgaaaaaggagtggcctctgccatcctggagctaagcaactggtataagggaagtgacagcccccatggaatcggaccatttcaacttcatgcgatgaatgacaggtcagggcttctgggcatgaccataggaatgaccacagctaacattgaccatgggcctaatttgtgtgctgtttgctttttttttttttttgagacagagtctcactcaagtcaccaggctggatggagtgcag

SEQ ID NO: 13378 - DNA, 1298 bp, Artificial sequence
  DNA replication origin
ccctccgcgccctgccggcaccgacagccggcccggagacccgggagctcggcgccgggcgcggggggcggcggcggccgggccgggccggacaaaagggaggaggcccgccaagttgcaagggggagccgcggggcgagggaggcagcgccggcggagcagcagccgaggggccgagcggcggagcagcggcgcgcggcgcccggcgcggggagcagctggtgttcgctgtaacaaacaacttgccactcaaacgccggtccccgctgcgcatgcgcggcccgcgcgcggcctgccgggacttgtagtccgcctgggggggggctcccccggtgctgttgctgctgttgctgccgcgggggctgggcggccggagctaccggcagcccggtgcacgggaaatgcaggagcgcgggcaccctcaggactaaggggaaggccgaggggaggcacggggcgggtggagccagcctgagcctaggcgcgccctctggcacccagtcaggctcggtactaggtgcttggagtgtaaagcgagcaaaccagacgactccggtgctggagaaggcccgagtctgggagcgccaagatgtagggcaatcggtcatgagagtgcagagaagccaaaccgaaaagcttgctggggacccggagggaggggattgacaggtcaaagggggtgacccgggggaggggacactcaggctgggttttgaaggatgaatgggagttcgtagcaagagagtgagggcgcgcggatggaggacagaggccttccaggctgcaggaacagcgtgtcctagggcacagaagcgtgaaagcccccacggtgctgtgtttggctttgttgcagcggaaaatgtgagggaggagagaaaagagataaggcaggcatagtcaccaggagtcaggtcgggagggtcatgtgtgcagagctaatgaggtggccatttatcccactggagagggggtgatggggactgcgaagggtgaattcggggaaaatgtaaagtgcgtctgaggcacttccaaccccagggcccacgcgccgggaccacagaggttcctccttcatggctgtctggttttgaaatgttctgggttaaagtgattggtgcttccacctttggcagagtaatctggggacgcgatgggtgagatctatctgccagggcaggctgagaactctctttcaggggaaaattgcagttgtgctccctcaccttccctcagccctcctctgttaggtaggaacatactaggttttgtcatttccacaaaagggtgaaaagcctgta

SEQ ID NO: 13379 - DNA, 1455 bp, Artificial sequence
  DNA replication origin
ggaaaacaacttcgggccccgggagcgcccccgccccgcccccgccgccgcttcgctcgcgtctgacaaagccggagccgcagggtcctggctcccggacccctcgcaaccttccaccccccggtgcgccaccccccacctctgtcgtcccccccatctcccaccccctcccccatcgcagccccctccccgaaatccggggggctggggcggctgcagtgacggatccgtgaatggatgaaggaacgaacgaatgaatgaatgaaaaacaggtgtggggacgaggccgtggaaaaaacaaacgcccccatccccccatccctcggttgggccggccccgtcgccacggcggggggagggattccgctgagcgcggttacccagagcagaaaatcataaaatcattagtgggtgtttatctcaaggtgcctacgaggcttgctgcggacggcctggaattgcgggggggaaacggggggtgggcgagggccagggaggggctgcagaggacgtgattctttctccttggggtcctggaaagggggtgggggggtgttttgcccaaccgtagaaggggaggagcaggcatgtttatgcatctgccttgaggctgggcttggatgctgcagggggaaaaatagttgaaggccttggaaggtaaaagagggaatcacacacacacacacacacacacacacacacactctctctctctctctctctctctctctctcacttggattttccctatgccaggtaagggtttgacattgtgagccccggtgggtgcttgcattagggttttgttgttgttgtttaaggagcctgagccgaggggagtgtgagtgccagctagctgctgtaacttaagtctcatttgcccaccattgtgactgttaaaaaggaatgataaagttgttactggttggtttttcgcggtttggggcggtggtggctctccctcactgcaaaatgaatgaatacttttcgggtcaaggttagcgtgaaaatgacagcccccttaggctgccccctttggcactgagctctagggacacagggaaataattccagcctgttatctgcctgtgaaaagttcttgcttggaaatctcactttgatgtgtgtgtctgagccgggtgctcagtccggctattgtttgcgagatggagccagacctgccggtggcatcttgtttactttcttctccggctgctcagtaggggatggagatttgaaatagtcgccaagcctctgccacggagcctgtgctccccgttgattgcaaagggtaatgattaaacaggtcatttgaaaacaaaagccaacagctcggattctgaaccgcgcccccacccctcacacaaagccccctctggctgttgacaccttcagatcctgcttctgcctgccctctgccccccactccctagccgggcttgacgttccaaagct

SEQ ID NO: 13380 - DNA, 857 bp, Artificial sequence
  DNA replication origin
cctgtctgcctggcacaccaccctcctgtccagcccccagtgcccctacccaccccaccccaggccaggagcagcccctggcacccaagacaggtgcagagtcaatcagcaaatactacaaggctcgcccagaactgggagctggggtagcagtgacaaagcctccttggtctctgcccactcagcagcccaggccagggtggagttggtaaacttcagcagtgatctaatggccagacacctccctaagtaggcactgacggttggaggggaggtgtgggtcgtgttgaggaggggacgtagtggagcatggttcgtgaaggtgtcaaccctaagacctgaaggctggggagtggaatgagggtcccgggggaggatatggcacactaaggaacgaggaggggcccagcagtggtcacatgggggctggacagaaacagcccaaatcatggagctggaagccatcctggggcccttggtattatcgtggagacagtgggagccatgggaggtgcttgacccaaggagtgaggtcatcacatttgtgctttgagaagtgcctttgcctctactgtgcagcgtggatggacagggtctcaggagacccaggaagaggcttggaagatgacagcagggatgaaaaaggctggatttgaggtccccaaggggtcaatcgaagagggcttggtgaagggcaggctgggggcatggtgaatcgagtggcacacagcaggtagacaccaggaagagtctgggtggggctcagggggatgggtcactgctggaggtgaaaggtcttcccagttctggtcctgtctcgtgcaaagtgtgacctctggcagatcccatcccttctc

SEQ ID NO: 13381 - DNA, 866 bp, Artificial sequence
  DNA replication origin
gagaccatcctggctaacacagtgaaaccctgtctctactaaaaatacaaaaaatttagccaggtgtggtggcaggcgcctgtagtcccagctacttgggaggctgaggcaggagaatggcatgaacctgggaggcagagcttgcagtgagccgagatcacgccactgcgctccagcctgggcaacagagcgagactccatctcagaaaaaaaaaaaaaaaattagccaggcatggtggtgtgcacctgtagttgcagcaacttgggaagctgagttgggaggctcacttgagcccagaagtctgaggctgctgcagtgagctatgattgcaccattgcactccagcctgggcaacagagcaagaccttatctcaaaaaaaaaagatgggcgaatgatcagagactttctgagagggtgccctccccagttggtctgtgtcttaggaaatctggggtgtgtgttggggtgctgagcgtggcagaggggcaggggtggaagaggtctgggggagggagggttaagctcacccagcaatgggtagatgggccccggtggcaggaaagggggatttctgagctgcatgtctttgctgagggtgagtttgggcaggggtcatctaaggatggggccagccgaggggcccccaggaacacccagccccacaggccagcagtacacggtagggttggagtggtggtggccgcaggagatgagtgtgaccgggaaccagggccactccgagagttaccatgtgacaggacaacaactccagcccatgccccagcgtgtccccaaagtcctttaatagcaaggcctccagagaatgttgcgtcccaattcatagtgtcagggcaggactgcagg

SEQ ID NO: 13382 - DNA, 1817 bp, Artificial sequence
  DNA replication origin
ggcccatctgcacgcgaggtgtctgcagtgacgtcaggtgactctactcttagcatccattctcaagacctccccggccagccttaccctccatgggaaatactggtcctccaggcgaccgattcccaggcaccctcggatgttcttgccccatacaaacagctctcctttgtctgcaaagggaggaaaacaggggttggttgggactgtgtgaagaacaagtctccaaggagaggatgggtcatgagaacaggctttctagaaccagatacctacagagcccactgttcagcttttaccaggcgttcatgctttctttgaaggcaaaagtaagggtctgagatgctgtccccatatcgaaaacacatccacggccaggacttctgctgcatccacccacgtgggagatgagcactcaaatgaagatggggcagggggcagtgcacggggctgggggtgatgcatggagctggggtctgggggtggtgcacggggctgggggtggtgcatggagctggggtctgggggtggtggacagggctgggggtggtgcatggagctggggtctgggggtggtggacagggctgggggtagtgcatggagttggggtctgggggtggtggacaggtctgggggtggtgcatggagctggggtctgggggtggtgcacggggctggaggtcactgatgcacacggcccactctgctcaccccttgtgccccgcccacaatcgtgtgccaccaaactctgccttccacaaatcctggcgacaccctgggcttcctgatttgacagtgaaaagtaagacaatttgtcattcctggattgattgtccatatcttgggagcattcagccacagggcatctaatgaccaagtgcctgcttgtgctgggtctaggtctgtgttccaggagctggggactggccagagacggaacagacagatgattttaatatatgtttacaaactgtaaaaactgtcatgaagaaaaagtacaagatgctgtttaagaggtcaacccaggagatggcctctcctagcccggccttcaggtgggactctgtctgcaccagctggggcactcctgggcccatgtcaccatcagctgttgggcaaaaggcttgggtcatgggaggcagaggaagtgacatggaaaagccaggactacaagacctggggctgatgaagtacggaataattacaagctgtcttaggcccctgatctaagcatgccccttgttctccacactcagaccttagatagtttttgtgtgtgtgtgtttgtttgcttttgagacagggtctcactctgctgcccaggctgcgacgcagtggcacaaacatagctcactgcagccttgaactctcaaactcaagcagtccttccacctcagcctccagagtagctgggactacaggcgcacaccaccacacccagctaatttctgtattttttgtagaaaagggatctcactatgttgcctaggctagtctcgaactcctgggctttgagggatcctctcatcttggcctcccaaagtgctgggattacaagcatgagccactgcacccagctagcccttaggtgtttaatagaacaattcggcctggctccccaaaatgctagcagaccacaggataaaccaaccaactctaattcccagatggctatctgcaaatgccaggcacacaggcaggaagacagctaggctctgtctaccaacaggcagtaactcacccttagaaggaggcctgttaagtctcggggagaaatccagaaaggaatttcatttcgctgtgacctgaaatggct

SEQ ID NO: 13383 - DNA, 1655 bp, Artificial sequence
  DNA replication origin
cctatcgccgcaacagcgtccgttttctgcagcagcgacgccgccaggcgcggccgggaccgcagagccccgggagcccgctcggtgagtgcagcgggagagggcaggaagggcaagccctaggggcggagtcagcgggagaggcggggccagaggcagggccagagtagcggggcgggaccagagggcggaatcagagggagaggcggggactggaggcgggggcagaggaggagccagcgctagggggcggagcgatccctaagaggcggagtcagagggagaggcacaagcgggaggcgaggccagagcgcggagcaggagttggagaacgcggcggggcgaggccagagagcgctgtgggcggggccagtgtgcggggcggggcgtctgactcggccccgctctctgcccgcagaggaggagcggcagacgcagcgctctaaaccgcagccggcggtgcccccgcggccgagcgccgacctcatcctgaaccgctgcagcgagagcaccaagcggaagctggcgtctgccgtctgaggctggagcgcagtccccagctagcgtctcggcccttgccgccccgtgcctgtacatacgtgttctatagagcctggcgtctggacgccgagggcagccccgacccctgtccagcgcggctcccgccaccctcaataaatgttgcttggagtggaccgaggctctgcaggaatgcagggagggccgggctccgccccagggttatttctaagttgaggacaggaggttgtgagttctgctggggggaagttgcaagagccgaggtctggttgcatgttgccctggtcttggccaagaacaggtttgcacaaggccaagttcaagaggaacttccggattcctgctgaccgtttggtcagaaaccacctgcttggactctggcggaagagtgctgaagatgggtgcacacagtgcagcagggcagccctgtctcatgacaggagacaggctgccgtccagggtgtaggagtgacctcatagctgggataaaaaatatattataacttaggttcgggcgcggtggctcacgcctgtaacccagcactttgggagaccgaggtgggaggatccgttgagctcaggagttcgagaccagcctggccaacatggtgaaaccccatctctaccaaaaatataaaaattagctgggcgtggtggcatgcatccataatcccagctactggggaggctgaggcatgagaatcgcttgaaccggggaggcagatgttgcagtgagccgagacggcgccactggactccagcctggacaacatggtgaaaccccatctgtaccaaaaatataaaaattagctgggcgtggtggcatgcatccacaatcccagctactggggaggctgaggcatgagaatcgcttgaaccggggaggcagatgttgcagtgagccgagacggcgccactgcactccagcctggactacagagcgagactctatctcaaaaaaaaaaaaaaaaaaaaaaagtaacttaggtgcagggtgtcctctgttattcactgagaccgtgccccggttatgaggttgtaccagaaagcaagtattcactatgcacactattcaccgctcaccctagcattgaagccagcctgtagcctgaaag

SEQ ID NO: 13384 - DNA, 1522 bp, Artificial sequence
  DNA replication origin
gccgccgcgcctcggaaaacaacttcgggccccgggagcgcccccgccccgcccccgccgccgcttcgctcgcgtctgacaaagccggagccgcagggtcctggctcccggacccctcgcaaccttccaccccccggtgcgccaccccccacctctgtcgtcccccccatctcccaccccctcccccatcgcagccccctccccgaaatccggggggctggggcggctgcagtgacggatccgtgaatggatgaaggaacgaacgaatgaatgaatgaaaaacaggtgtggggacgaggccgtggaaaaaacaaacgcccccatccccccatccctcggttgggccggccccgtcgccacggcggggggagggattccgctgagcgcggttacccagagcagaaaatcataaaatcattagtgggtgtttatctcaaggtgcctacgaggcttgctgcggacggcctggaattgcgggggggaaacggggggtgggcgagggccagggaggggctgcagaggacgtgattctttctccttggggtcctggaaagggggtgggggggtgttttgcccaaccgtagaaggggaggagcaggcatgtttatgcatctgccttgaggctgggcttggatgctgcagggggaaaaatagttgaaggccttggaaggtaaaagagggaatcacacacacacacacacacacacacacacacacacactctctctctctctctctctctctctctctctctctctctcacttggattttccctatgccaggtaagggtttgacattgtgagccccggtgggtgcttgcattagggttttgttgttgttgtttaaggagcctgagccgaggggagtgtgagtgccagctagctgctgtaacttaagtctcatttgcccaccattgtgactgttaaaaaggaatgataaagttgttactggttggtttttcgcggtttggggcggtggtggctctccctcactgcaaaatgaatgaatacttttcgggtcaaggttagcgtgaaaatgacagcccccttaggctgccccctttggcactgagctctagggacacagggaaataattccagcctgttatctgcctgtgaaaagttcttgcttggaaatctcactttgatgtgtgtgtctgagccgggtgctcagtccggctattgtttgcgagatggagccagacctgccggtggcatcttgtttactttcttctccggctgctcagtaggggatggagatttgaaatagtcgccaagcctctgccacggagcctgtgctccccgttgattgcaaagggtaatgattaaacaggtcatttgaaaacaaaagccaacagctcggattctgaaccgcgcccccacccctcacacaaagccccctctggctgttgacaccttcagatcctgcttctgcctgccctctgccccccactccctagccgggcttgacgttccaaagcttggaggtaacagaacagccttgtttttcctagccttggcc

SEQ ID NO: 13385 - DNA, 1356 bp, Artificial sequence
  DNA replication origin
gcccccgccccctccgcgccctgccggcaccgacagccggcccggagacccgggagctcggcgccgggcgcggggggcggcggcggccgggccgggccggacaaaagggaggaggcccgccaagttgcaagggggagccgcggggcgagggaggcagcgccggcggagcagcagccgaggggccgagcggcggagcagcggcgcgcggcgcccggcgcggggagcagctggtgttcgctgtaacaaacaacttgccactcaaacgccggtccccgctgcgcatgcgcggcccgcgcgcggcctgccgggacttgtagtccgcctgggggggctcccccggtgctgctgctgctgttgctgctgttgctgccgcgggggctgggcggccggagctaccggcagcccggtgcacgggaaatgcaggagcgcgggcaccctcaggactaaggggaaggccgaggggaggcacggggcgggtggagccagcctgagcctaggcgcgccctctggcacccagtcaggctcggtactaggtgcttggagtgtaaagcgagcaaaccagacgactccggtgctggagaaggcccgagtctgggagcgccaagatgtagggcaatcggtcatgagagtgcggagaagccaaaccgaaaagcttgctggggacccggagggaggggattgacaggtcaaagggggtgacccgggggaggggacactcaggctgggttttgaaggatgaatgggagttcgtagcaagagagtgagggcgcgcggatggaggacagaggccttccaagctgcaggaacagcgtgtcctagggcacagaagcgtgaaagcccccacggtgctgtgtttggctttgttgcagcggaaaatgtgagggaggagagaaaagagataaggcaggcatagtcaccaggagtcaggtcgggagggtcatgtgtgcagagctaatgaggtggccatttatcccactggagagggggtgatggggactgcgaagggtgaattcggggaaaatgtaaagtgcgtctgaggcacttccaaccccagggcccacgcgcccggaccacagaggttcctccttcatggctgtctggttttgaaatgttctgggttaaagtgattggtgcttccacctttggcagagtaatctggggacgcgatgggtgagatctatctgccagggcaggctgagaactctctttcaggggaaaattgcagttgtgctccctcaccttccctcagccctcctctgttaggtaggaacatactaggttttgtcatttccacaaaagggtgaaaagcctgtaatctgtggtagatagatcttagagcatgcatatccccctccc

SEQ ID NO: 13386 - DNA, 918 bp, Artificial sequence
  DNA replication origin
agaagagatgaaagaaagaaagaaagaaaggagaaagaaagaaaagagaaagaaagaaagaggaggggaggggagggagaggggaagggaaagggagggggaggggaagggggaggggagggagaggggaagggggagtggagggcgagggaaaggggaggggaaggagaggggaaggggaggggaaggagaggggaaggggaggggaaggagaggagaaggggaggggaaggagaggagaaggggaggggaaggagaggagaaggggaggggaaggagaggagaaggggaggggaaggagaggggaaggggaggggaaggagaggagaaggggaggggaaggagaggagaaggggaggggaaggagaggggaaggggaggggaaggagaggggaaggggaggggaaggggaggggaaggggaggggaagggaaggggaagggaaggggaagggaagggacccaggctaacagactccagataccagcagcagcccttgagccatgttgcctaattgtccccaaggagaaaacttcccaggtcttcggaggcagcaaaagctttcctggcacagagctagaaaagaagattctcatggtgtctcatgtggcaggaactacaggagctggggtgggtaatccatttaggccacttgacaaacacctatttttaggtcaactctgagaatagaaagatgaaaaaggagtggcctctgccatcctggagctaagcaactggtataagggaagtgacagcccccatggaatcggaccatttcaacttcatgcgatgaatgacaggtcagggcttctgggcatgaccataggaatgaccacagctaacattgaccatgggcctaatttgtgtgctgtttgcttttttttttttgagacagagtctcactcaagtcaccaggct

SEQ ID NO: 13387 - DNA, 859 bp, Artificial sequence
  DNA replication origin
tgtatttttagtatagatggggtttctctgtgttgaccaggctggtctcaaactcctggtctcaagcaatccacctgcttcagccttccaaagcgctgggattacaggcatgagccaccacgtctggcgtattttttatatttttaatagagacgagggtcttgctatgttgcccaggcctgtctcaaactcctggcctcaagtgatcctcctgcttcggcctcccagtgtgctgggattccaggcataagccaccactcttggtcaccagttgggtttttgtctccatcctgaaggagtgggagacgcccttgatcaggtctctgtccagcagagccctcctgaggaaggcgtggctctctgcagggtgggtgccagtcctgagctagggacggtcccttaccttcctctctgagaagctgacctcagccggaggtctctcctggtggtgcccctgagcagcaacctgatttctgtcctcagctatctggccaatgacatggaggaggacgacgaggcccccaaacaaaacatcttctacttcctgtacgaggagacccgctctcatatacccttgctcagtgagctttggttccagttatgccgttacatgaacccgagggccaggaagaactgctctcagatagccttgttccggaagtatcggttccacttcttttgttccatgcgctgcagggcttgggtttccctggaggagttggaagaggtgggtggggcctggggacgtggaggatgtggggaggaatcgggtgggctggaggctggacgaggggagagaggggtatcctggggagtccccgtcttctcaaagcgcgtttgtttttccagatccaggctt

SEQ ID NO: 13388 - DNA, 1060 bp, Artificial sequence
  DNA replication origin
acggagtttcactcttgctgcccaggctcgagtgcaatggctcgatctcagctcactgcaagctccgcctccagggttcaaaccattctcctgcctcagcctcccgagtagctgcgattacaggcgcccgacacacgcccggctaatttttgcatttttagtagacacggggtttcaccatgttggccagactggtctcgaactcctgatctcaggtgatccgcccgcctcggcctcccaaagtgccgggattacaggcgtgagccacggcgcccggcctgaataaatcttttaaaacataaaaatctgggtaagcccctggccggccggcacagatgccggggtggggccgcgaatcggttgggacgcactctatccggcctaggggcacccgggccagcacccggccgccgcgcgtgcgcagtgggcggggggccccgcgctcctacctgcaagtggccagtgccaagtgctgggccgccgctcctgccgtgcatgttggggagccagtacatgcaggtgggctccacacggagaggggcgcagacccggtgatagggctttacctggtacatcggcatggcgcaaccaaagcaagagagggtggcgcgtgccagacaccaacggtcggaaaccgccagacaccaacggtcggaaaccgccagacaccaacgcttggaaaccgccagacaccaaggctcggaatacacgccagaccacgacggagggcgaccacctcccttctgaccctgctgcgggcgttcggaaaaaaaaaaaaaaaaacgcagtccggtgtgctctgattggtccaggctctttgacgtcacggactcgacctttgacagagccactaggcgaaaaggagagacgggaagtattttttccgccccgcccggaaagggtggagcacaacgtcgaaagcagccaatgggagcccaggaggcggggcgcctgtgggagccgttgagggcactttcccagtccccgaggcggatccggtgttgcatccttggagagagctgagagctcgaggtgagctgggctcgcggtcgcccctctc

SEQ ID NO: 13389 - DNA, 2214 bp, Artificial sequence
  DNA replication origin
gaagattatattaagagtgaaaggcaagcggggcggctggggcgcagacagaggcccctttcatgcgcccggccgcgagccgcgggccgctgccaacacaaacgcgggcggaaccgaacccgcggagcgccggccgcgctgccaggccccatccagcccgccccggctggcgctgctccgcgtttccactctgctgacgtgcaggaatcgcggggcggccgggtgggcggcggggacccctgtgcgccccgagcccccgggtgggggccgcaccactgcccgtctcccctccctctgctcctgctccgtccgttttcttccaggccctggcggatcacgggtgcccaggggctcggaggccgcctcctctgggaagcctgcccaggttccgatggactcccacaggcaatacccctgggccttcctcgcggcccctgttggccccaattcccccacccccgcaaggtctgtgcctctcctgcagtcccgccaccaactagggcgagaggagctcgcccccacccaaacgtattggttcgatgaaggaagggcccatggttctgccactggccctggacacccagtgctggtttcccgtggaagtccccctggactgagtggcggctgggtgctctagtgatttgcgacctggggcctctgactcccatcatgttgggaaagtcgttgaacctcaccggtgaaacgggcacagtgaagtcatttccccgaagtctcaggactctgtgtaaggctggggacaggggcttgttggggcctaagggcaccttgggaactgcaggagcccgttctgcctccataagacactcactcctggcagggtcccctctccgggcacagcccagatccacccccatcatccctctccatctgtggctccctgcccctcacagaggattcatcactctgttcagaatccccaggactccctagggaaggaggtcccagcctggcctcccaagaccgtgcttgcccaattccaggacttcctcacatggctcctacctccagcacagaagcggcactaaaccaggtggtcaatcagggagcaccaccgaggttctgaatggtccagggatgagcagtgatgcctcaagctaagccaatcaaagccttccctgggattgtctcaaggagtccgcagtgagattctgggtctcagtactgggaaagggtgaggctgaggctgcctgctgtcctgggggcctcaccctgccaccaacaggaagccacacagagggaagcagaaatgagacgcagccagtgagggcagggtacaaaggtgagatcccggagagacagatgctgggacatcatccttgggtactggttccaacagtgcctgcagatggagccaccctcggagagtccacaacagcagccaatccattctatgcgtgtctgagctactttaagtcgggtttttgactgtttgaatgagagtcccatcttggctaggcaccatggcgcaacaactggggaggtggaggtaggaagattgcttgaggccaagagtcccagagcagcctgggcaacctatcaagacgctgtctttacgaaaagaaaaaaaactagctaggtgtggtggtgcgtgcctgtggtcccagctactggggaggctgaggtgggaggattgcttgagcccaggaagtggaggctgcagtgacctatgatggcaccactgtactccagcctgggtgacagagcaagaccctgtctaaaaaaaaaaaaaaaaaaaagaagtcccaccgaataccttcatgcagtgaaggtcaccccatctgaaaaataaagcctgggcacttgggcttggtattggtggcctttgcaaggtgtaagatgcgttcccctccttgggccccccttaagcttgtcctgtacatttcatttacaaaggactttcacaagcatgaatggaggtgaccccaccacaccccaggtttcggataaggaaaccgaggcttcagtaggaagtactgtaccccacgtcacgcaggcagtgggggatgagaatgaacttgagcccctcatctgactccaccccccactctcaccttcactcccctgctctccctcttcccccgaggactgactgttcctgacctctgcacttgggcatcttcaccgtgcagtgtgactcaaatgcttccttctctcctctgctgattcagaccagctcagtgtgtgccacctccc

SEQ ID NO: 13390 - DNA, 793 bp, Artificial sequence
  DNA replication origin
ccgccgccaacggccctggccctcgcgagctctggaactacagaggtcgcacggtgagttgccaggtgtggcccgtaatcggagcgcacaaaacatgatgggacacgtaacgggaccacacagggcacattgggcacttgcaggggcgcgaggtggcggcacgtaatgggagcgcgctgagcatgatggggcatgtgcgggagcgccaggcggggcatgtaaccagagcgtgcggggcatgatggggcacggacatggggggttaggtggggcacgtaattggagctcgcggggcaggatggggcatctaactggagcgacagagagcacgatggggcacttacaggggccggaggctgggtacgtaatgagagcgagcgggaaatgatggggcacctaacgagcacgcagagcatgatggggcacgggtgcgaggtggggcgcacagtgggagcgcgtggggcgtgatgggacacatggcgaggccgtcagggcacaggggaagcacttttggaacacgtgagtgacagggctgccgcccttgaaggagccctcggagtggctgcgtggtggggcacgtggggcaggttcaggaaaaaggatgcagcatgtgattgcagggcaacctggtgaggacacgagagccacctgccaccagcagggttcagggctcccagctgtgggttacttccaccttctttcactttccctcttccattgtattctagagaatttaggcccagacaagacactgattgattgattgattgattgattgacagaggctcgctct

SEQ ID NO: 13391 - DNA, 948 bp, Artificial sequence
  DNA replication origin
aaggctgaggggggaggatcacttgagcccaggagttcgaagctgcagtgagctgtgatgtggccactgcacttcagcctgggcgacagatctagaccccattctaaaaaaaaacaaaaaccccaaacccacacccacgaaagggtaatgttggcaagaagctgggtgcagaggtctactggtgaacatctgtggggaaagggtctaaggctgggaagcgagacgccaggttccgatcctgttgtgtagttaatttctggtgtggtcttgagtaaggtaccccacctttatctgtaaccatctagtcaggtgatctctttagccattccagtgcccgggctctattagagttagttctaaggcattcatacttcttgcttagggcgtttctgtctttgatccctcatccccaggtgctagtgtatgagttgttgggaaagggctttcgagggggtgggggccaatggaaggctctgttgggacggcaccaggcgaggtgttgagttggctcggctcaaggttcttcggggtgtgagctggcatgaggacctgttggaagtgggatccaggcctggtccaggtgagctggaaggagttgaggggcgggggaggtggggaactttgctcctgcctactcactgctcattgcgtcctacctagcctcccagctgcctcgatttgtgcgtgtgaacactctcaagacctgctccgtttatgtagttatttcaagagacaaggtttctcctatcagggtcgggcttccaggtgagagcttagagccctggctgtcctcatctagggaggtgtctggggtactgggaagagaagtggttggatagttgtgactttgctctctgggctttgttcctacctttccagcagtttctccatctccaaggtttgttttcctcgcatcccttaaacatcgaactcctaggagccccatcc

SEQ ID NO: 13392 - DNA, 1400 bp, Artificial sequence
  DNA replication origin
gcttatgctgtggcagtgaagagacaggcactgaatatagaactcagtgagatgccagggcatgatacatgttttgctaacgtagtaatgactggaggagccattgtggatttaactggtcaaaggccttctgagtacttaacaattgtaagctgaaggttgggcgcagtggctcatgcttgtaatcccaatattttgggaggccaaggagggtggatcacttgaggacaggagttcaagaccagcctgggcaacttggcgaaaccctgtctctactaaaaataccaaaaaattagccgggcatggtggtacccacctgtaatcccagctgctcgggaggctgaggcagaagaatgtttcaacccaggaggtggaggtggcagtgagcgaagatcatgccacactgtactctggcctaggtgacagagcaagactgtctcaagcgtaagctgaatatgggggtggggtgggggtgggcacagcacaagtggacatgcctttcaggcccaggatggcgcatgcaaaggcccagaggcagaaacatgtttggtatgttgaagagcagaacaaagacaagcatggcaggagggcaggagctaaagcagtggtgtggaaggaggccaagaggcgaggattgtttgtggccagggttgggtgtttgggtcttaagtgttcaggaaaaccattgcagaatcaggcagaaggatgcagtgatggttcctcccgtgtggaagatgaatgtagatcccatggcttctgtttgcttcgtgaagtaggagagaaaatctgggagagggaaggtcgggataaagtgtataaaaaaggggtcttttgaaatagtcattttggacagtgggggaaaggaacatcatattaaaaagtgtgatcagtttccaggcagtttgtgggctggaaaattgtgattgtgaagttaaagtgaggccagttagcatggcgtgtgtttcccagcgacactgggtatagatctaaggtcagcggacagctggtgccacccggctgtggagaccccagcaagcacagcaggaggggcagcgggtcagtgccccgatgcagctcagggggtgcaggagtggagagcgggtgaagtcagctgcaggaggggtggtgcctgcaggagattcgggagccggagcagttgtggtgacagtgtggctgcaggagtggtggcaggggtcggggagaggaggtcatgggggtggcagggccgaggggctgagaggaccatcagtcagccccacagggcgaagtcaccgtgagtggtgatggggaggaagccagtgagccaagggtcctctgtgaatcagggagtgacctggcagttgacaggtgacatgaggacatggcagattaaagtgatttgaacctgagttacggtattt

SEQ ID NO: 13393 - DNA, 1679 bp, Artificial sequence
  DNA replication origin
cgctggagcctggggtggccacgttgatcccaaagctcccactgccagcgggggctgccgaacccccaaacgtgaagggtgatggtgttgtgctgccaaacaccgagctgctgctcccgctgctggcggtctgggtggtggctccaaagccggagctggtggctgcaccgaaggagaagacagcagtggagccgccaaaggcgggctgtgagctggcgggagcgccgaaggcggaagccgtggctttcaatccaaacgccgagtgcgtggcaccgccaaaggtaggctggatgggcgtaggcacgtgcgcaggcacgatcttgatcgtggacgcaggtgcaggtgtgggtgcagtagccggggccggggctgcagagtttccaaaagtgaaagagctgccaaagctgggggtaagggctggcttggcggcccccggtggctgcccctcagcggccccaaatgcgggctgggggttggctcccggatatgatgggagcggggacttggcgcttgagccaaagggaatgttgaacgtgggggtgctcgtgttactgaacgtcagagtgggctggctgctggtggccggggcggaggtggcgagggtgctgccaaaaccactaaagtcggcagcgctgctgctggtggccgttggcacggcagtgggcagggactggctgaaggtggtgactgtggtggttgtgggcaaggcaggaggtttgccaaactggaatatggagcccatggccggggtgaagctggcagcagaggcctggggcgccccgaagaggaaaggctgtgaggcggcagtggcggtgctggtcgtggtactcacactgctgctgctcacactgtttatgccaaagccaaacgcaggcttcgaagcagagtctgtggatggactggcagaggtgatgggagccacagcagaggtggcgctggccaggccagtgaagagcggggcagttgtggtgggagcagtggcgggagtagttgtctgcttgaagaagggagcaggcaagggcacagatgcaggtggccccatgctgctaaagacaggctggaaggtcggggctgtggtgctggtggtcgtggggagggaggagctggagggcgctgtggctgagactgaagggccaggcggtgtgaggccttccttctcactcttgggtggagccgtgaaaatgggcttgaacatgggagatgctgaagatgcagcaggggcggcagggctggaaggtgaggtgttctgtgttccaaacaggaagctttgcttgggggcgggggacggggcagatgtggcttggggtttggtagccgtctctgcctgaagggttggaggtgccttggtgtcagtggctggtaccatggatggagcagggatcagccccagcaaagtggtcgggggtttggagtcaaaggaggggctggggagcagccctggcggccctgactgtgataaacccagcgggggtaggaggctgggtgtctttggaggtgagagggcctcagtggttgctgctccagcagattctggaagaagaatagaaaatgtgaaattggaataaacacttcaaagatgatggtattcagtatttcagcgtcctccccacgcctaccacagagcctgggatccaagagtcagtcaataaactcagctaagtctacactacaggcctgta

SEQ ID NO: 13394 - DNA, 835 bp, Artificial sequence
  DNA replication origin
ccggtgcactcctgcgcttgtgcacctctccctgcgtgcgtgttcgcacatgcgcgccacctccgcactgccctcgcttcctgtgcctcttcaggtcatcgcttgctctcgttcccaggctttggcttctagtggacgagaatcaccgagtctgcggggctggatgctgaccgcccggaccagcacctaggcgggcgggagctgtgcggcccagggttcgcgcgggccgggtagaggctcgagctgggacccccgagcgtgaaccccggagccggcggcgctggggccagaggggccgggagccccagggaggcggatctgggccccgagaaggacacccgcctggatttgccccgtaggcccggcccgggcccctcgggagcagaacagccttggtgaggtggacaggaggggacctcgcgagcagacgcgcgcgccagcgacagcagcccgccccggcctctcgggagccgtggggcagaggctgcggagccccaggagggtaagtcttgggtttttgggcccggagcgagaagggcctgggtgaagtcaccttgtgttggggacctttgagtgtggggcagagggagggtcccgattgcttgccggagagacatgtgttgggtttgagggcagggtccggctgcaccgaacaggtgctgcatgggaagatctgggaggacgaggcttacggaggcgtggagggtgtcaccaccctcagctgcggacgtcgtctccactccccgctaacccctaacagtccttcctcctcctctccgtgctccagatttcgaccgcctctaaacgtccgtcagcacttctattctctcactta

SEQ ID NO: 13395 - DNA, 1216 bp, Artificial sequence
  DNA replication origin
tcgttcctagggtttggcctgcagtggacgagcatcgcatagcctgcggggctggatgctgaccgcccgggccagcacctaggcggacgcggagctgtgcagaccagggttcgcgcgggccgggtggaggctcaagcggggaccccggagcgtgagccccggagtcggcggcgctggggccagaggggccgggagggagtcggctgaggtggcggcggaggcgaagtggcggcggaggcgaaggggcggcgggacccgggcctggcccgtatgtgtccttggcggcctagactaggccgtcgctgtatggtgagccccagggaggcggatctgggcccccagaaggacacccgcctggatttgccccgtaggcccggcccgggcccctcgggagcagaacagccttggtgaggtggacaggaggggacctcgcgagcagacgcgcgcgccagcgacagcagccccgccccggcctctcgggagccggggggcagaggctgcggagccccaggagggtaagtctgggattttcgggcccagagcgagaagggcctgggtgaagtcaccgtgtgttggggacctttgagtgtggggcagggggagggtcccgatcgcttgcaggagagacgtgtgtttgggttcgagggcagggtccggctgcacggaacaggcgctgcatgggaagatctgggaggacgaggcttacgggggcgtggagggtgtcaccaccctcagctgcggacgtcgtctccactccccgctaacccctaacagcccttcctcctcctctccgtgctccagatttcgaccgcctctaaacgtccctcagcacctctgttctctcatttaagtgtctgctgattcgccccttagatctgccctgggagaatcgtagtaatgcaggaacagcctgcagggattctctcctgctgcctcagttgctaggggaagagactgggccttagcaggtgggtgacttgaccaggtcactggctttgtggatggaattactcatagtagaactcaggagtcttatctcccaggccagtgctctttctcccgtatcctagttttcttaatagaagattattaggtgcagcaataaccaagttcagttagataatttagaaacaaaaccatattttatacacattcatttcatttctgagagctcacatattcaattcctatggcttctttgattttaagcagttta

SEQ ID NO: 13396 - DNA, 1304 bp, Artificial sequence
  DNA replication origin
ccccagccactctaaagaggaccacaattccccggccatcatcccctgttattgttgttgattgaggggctcctaatgaccagatggtccaaccctcctgggacgtggagagttgacttaggggaatcaggtatttacttggaagcatggtaggacccgcttctccggcccatgcccgtgacccgtggcagtgggcggttggcctcatgaccggagtccccccacagagccagcgggttgtgctgcagctgaagggccacgtcagcgagctggaagcagatctggccgagcagcagcacctgcggcagcaggcggccgacgactgtgaattcctgcgggcagaactggacgagctcaggaggcagcgggaggacaccgagaaggctcagcggagcctgtctgagatagaaagtgagcggtgggtgggggcgggggcgggccccgggggcaggcgcgggcagcagagcccagctggactcaggatgcggcacagaggctgggtgggggagacccagactgtctttctagaaacagctaggaatgccagctcttagcctcagtccagagggcgggtttgagtcctgcaggcacaaagctgtgtgcgaggcaccgctgagcacagagatgggaaatacagaagacagcactgaagtgcttgccctgggcagtggatactaagggagaaggagagaggattgaggtcctaacaaagaaattgacataaaagctgagggcacagtggcacatgcctgtaatcctagcactctgggaggccaggatggaaggactgcttgaggccaggagttcaagaccaacccgggcaacatagcaagaccccatctctagaaaaaataaaaaagactagccgggcatggtggcacgtgcctgtagtcccagctactcttgaggctgagacaggaggatcgcttgagcccaggaattcaaggctgcagtgagctgattgcaccactgcactccggcctctgcaacagagagccttgtctctaaaaaatttcaaataaatttgttaaaaagctgaaagcccccatagaataaatgccatgtatgtaagtgctgaagaggcatgaatccctggcttgattatttatttgttttatttttttgaggtggagtctcactctgtcgcccaggctggaatgcagtggtgtgatctgggctcactgcaacctctacctcccaggtttaagggattgtcctgcctcagcctcccgagtagctgggattacaggcacacaccaccatgtccagctgatttttgtatttatagtagagatggggtttca

SEQ ID NO: 13397 - DNA, 970 bp, Artificial sequence
  DNA replication origin
accatgccactgcactccagcctgggagacaaaatgagactctgtctcaaaaaaaaaaacaaaaaaaagaaagagtaaccctaggcactatattgccttatgaaaatgttacagaagcattgattttactgttaataaaaacaattcctggctgggcacagtggctcatgcctgtaatctgagcattatgggaggtcgaggctggaggatcgcttaagaccaggagtttgagaccagcctgggccatagcaagatcctgtctctacaaaaaaatttaaaaattagccgggcgtggtagtgtgcaactgtagtcccagctactcgggaggctgaggtgggaggataccttgagcctgggaagtcaaggatgcagtgagctatgatcgcatcactgccctcccgcctgggcaacagagtgaggccctgtttcacagaaaaaagagagaagaaggtgacacaatggatagtgtgaggtgggggaggcgagcagctgcggggtgtacaggggtctggcaactgtgggagacaacggggatcaggcagaggggtgggcacataggaggcaacgtaaaccagaactgaggctgggccaggccagggtgtcagaggctgaggcggggagtcgggctgcccttgggctggattgcaaggcgaagaagcaggagggagaggctgagagtgtggaggggagggggcttgtagcgtgtgattggagggaggaccgggctctggtaaaggtgtcatgaggaggcggggaaaggtgagaactggatttaagatgttttggggttgggcgcagtggctcacgcctgtcatcccagcatttcaggaggccaaggcgggcggatcgtctgaggtctggagttcaagaccagcctggccaacatggcaaaactccgtctctactaaaaatacaaaaagaaattagctcacgtctgtagtcccagctactcgggaggctgaggcagga

SEQ ID NO: 13398 - DNA, 1122 bp, Artificial sequence
  DNA replication origin
ctgccggccgccctccccgcagcatggcaccctcggggcgcgattagccgggagcagctttgggggaagcgggatctccaggggtgggggggtgccccgcagcctcggtcatggatgtgagcaagatggtaagtgtgagcaggggctttgccccgagccccctccccacacccccagccctggcgccctcccttctccccctcctagccggcgcgatccattgaaagtttctggattgttgatcctgcctgttggccccaactccaggcgtgccggaggagggagccgggccaggattctggaggcggctggccggccgggatgggctctggctttcccgccgcgccgccgccgggctgcccgggagatcgcgctggactccagggactgggctgcggggctcgccgcccacctcgggagacctgccggacgggagggagggcagcgccgccggaaggggcttgtaccgtgccctccggagccccctgcccgcacacctacaggagatcgatggaagatgtgtggggctgagcccgtgggcagggaggcacaggtggcgctgggaggacagtgagaagccaggtttcaaccatcctaggaggtgagggggcaggaatggagcccttggcagagacggggaaggttctaggttggccacttgggaaccccagcttcagtgggcctgaggtgcagccaacaccttcgcctcctaagcatgactccgcctttcctttagaaatgggctcctctggaggggtctgtgccctcccccagagaagccctccacccccacctccaccgcgaatacagtaggatcttgaagaaatcattgcttattgattgagaccaaggagcagccttcagccggtaccaggatgtgatttgggggattctgatgggaggggggttcgcagggagcacctggaggcccggaaactgcaggttttcccaggggtcttgattggctgtcactctgaatggagatttaagggtgcccttgccatctcaatcaccctgaccccgagtttagaccagggtactgtccctaccgtccagccttgcaaccctcaagggcctgtgtgtcaggcgggtcttgggaggggggaggcaatcagggctttc

SEQ ID NO: 13399 - DNA, 1537 bp, Artificial sequence
  DNA replication origin
gccggctaggagggggagaagggagggcgccagggctgggggtgtggggagggggctcggggcaaagcccctgctcacacttaccatcttgctcacatccatgaccgaggctgcggggcacccccccacccctggagatcccgcttcccccaaagctgctcccggctaatcgcgccccgagggtgccatgctgcggggagggcggccggcagggcccccgcggaccggggcaggcggcggcggcggcggcggcaccaaggctggaccggagaaaggaaggggagggggaggggaggcggcgagggggagggggaggggggcgggcgcggagccgcagcgcgcgccgggggcgggggaggcgcggccccgccggcagagaccggcgcgcccgagcccccggggaccgggaaatcccggaatcagctggcgggggcgcgaggggagaccgggaggcgggttcccgggccagatcccgcggcccccgggctcgcacggcgaggatgtgatttgaataacaaaaggtggcttctccccagagttcccggtggcggggatcgccgatcccggagcgagaggccgccggcccgccaggaagcgtgtgtgtgtgtgtgtgtgtgtgtgtgtgtgcgcccgcgtgtgtgtgcaggcgtgcgtgtgcatgcatgcgtgtgttttggtggtgggatcagtgggactcaggaagtgagcaggggaggtggtgaaaaaggagggacagatggggggcgcaggaggccgacattccagtgggggcagggggtccgctcggcccctccccacttggcttccctggacaaagggggaattcacggccagttgtttgcctcctgcggctaatctggaggggcctcccgaatgagactggggtctccaaacagatgggcaattgggaggaagtggaacaggtatccccaggaaggctctgagcgtccccctcccacgtgagccacagccagcccttcctggagtgagggaaattggctccgtggttcctaaatgatgtctgccctgagctgggagctcctttctctcaagccagaatcccgatgtccctttccttattcgatgccgaaatgcaaggcagacattcccctctgcagtagacacagctggtggcctcaaaaggtctcctggcaaatgctcctttggggcaagttctccggaaaaagcctggccattcaagcctatagtttcaacacagtctgtccccccaaaatcagatggcagtaaagttttggatgcagcagggacctgagagtccacctagatcaaccccactttatacggagaggaaactgagatccagagagggagagggaggtgccccaggtcacacacccggcagggactggggagcagggcagacttcagtaaggaccatccagcccaagcccagaagggcttcccatgctgccacggggcaaccatgaagttagggcttttaaaataatgaacaggtgggcctggctcccggcgggctcacgcctgtaatcccagcactttaggcctgtaatcccag

SEQ ID NO: 13400 - DNA, 1137 bp, Artificial sequence
  DNA replication origin
ctgctgctggttcctggggaggctctggaatttgaagctggctgttggggggcagagctgggaggcccgtgcaaacaacctcccacctgctggtttggtgcagctgtcccgggagaggaccaaaggccaccgagggagggaggaagggagtaggcagctgctggtggtgggctcggggccagacccggacggcgggtggagggtgtgcgtggggggcctgacaggtggggctttgtgtcctggatgcccaagcagatctccccttagtgcggcttcctgtcagccgggctgcacttgtgcgcttggctgcctgcccgtcccccacccgtcgaggggctccaccgacagctcatcccccccaccccctgcagacgcagcatgatggactcccctgggagcccggacccggcgcgcccccggccgttcttccttggctctcattgtagggctgagggacttctgcgtgtgtggtgaggagtctccctttccctccacccaacagctctgcaagctcctgccctgccccaggggaggaacccctggtggcttcacaagggcggtcccacctcccggattgtggcccacggaggggtgttggtggtgtgggcaggtgctgtgttgcatccaggatgagggaagaaccacagtctttgccctcagtttagtggaggagagagactcctaactaacaagtagactgagtttagtggctgaggtgtggaggggatggtaagtggccttcagggggacaggaggcctctttctagttggggaggataagcttacaaaagtggtaccacatgggctagcctggaagaactcttacagcccaggactcaagagagaaaatccagcgctccagagagaaaattcagcagtgaaaacatcacatggaaaggcctggaggcatgggagacagccaggttctgggaacacggagggttcaggagtaggggctgggaagagaggaaggcaccatggaaaggaggctgggaaggaaggttgggcccagcttgtgggtcataagagactttaaaggtggagagactggcaagagccagatgagttttttgtttgattgttttgttttgttttgtttgagacggagttccgctcttgtctcccaggctggagtgc

SEQ ID NO: 13401 - DNA, 1803 bp, Artificial sequence
  DNA replication origin
aaaaaatccttgggaaggcagaaggaagcattttgggatggggggaggacctgtgagttgtaaagcactcagaaatatgcaagtgagaaaaacactgggcctggcacagtggctcacgcctgtaatcccagcacttcgggaggctgaagtgggtggatcacttcaggtcaggagttcaagagcagcctggtcaacatggtgaaaccctatctctactaaaagtacaaaaattagccaggtgtggtggcaggcacttgtaattccagccactcggaggttgaggcacaagaatcacttgaacccaggaagtggaggctgcagtgagccaagatcataccactgcactctggcatgggcaacagagtgagaccctgtctcagaaaagggaaggggagcagaggggagggaaggggaggggaggggaggcgaggggaagggaggggaggggaagggaagggaggggaggggaagggaggggaggggaggagaagggaagggagaaagaaggaaaggaaaggaaggaaaggaaggaagagaaagggctttagctaaagtagcagaatggctacacaccttcccaagattagctgcatgcataatagtaaagaaataagaatgagaaagacccacaaggacaaagaaaatgagagagggatcattatcaaatagggtattttaacacattttggaaagaaaagaagaaatgataggccaggcatggtggctcacacctgtaatcccagcactttgggaagccgaagtgggtggatagctttagcccaggagttcgagaccagcctgggcaacatagtgagaacccatccctacaaaaaatgcaaacattagccgggcatggtggctcacacctgtcccatctactcgggaggctgagtgaggcaggaggattgcttgagcctgggaggtcaacactgcagtgagccatgatcacaccactgcactccagcctgggtgacacagcggaaccgtgtctaaaaagaaaagaaaagagatgctgacaggaggaaagcaaatgccaagagagacttgaactgggagacatcatactggaggcacgggggcagaactgaaggcaggtggagaggatgtctaagaaccagtaccagccaggcacggtggctcatgcctgtaatcccagcactttgggaggccaaggcaggtggatcccttggggtcaggagttcgagaccagcctggccaacatagtgaaaccccgtctctactaaaaatacaaaaattagctgggtgtggtggtgcatgcctgtaatctgagctacttgggaggctgaggcaggaaaatcgcttgaatccaggaggcagaggttgcagtgagccaaaattgtgccaccgcactccagcctgggtgatagagtgagactccatctaaaaaacagacaacaacaaaaaaaactggtaccgctccacaaccccttctgaatatcggcaggcaagtatttatcctacaactgcattgggttggagcagtggagagtgggctggagaagctgacccagagctcctaattcaagagacttcatgtggcagaggtttgggtatagcggatgctgaaaacaaggagaataactgaaagtctagaacatttcctgtatccagatgagccaagtacaagccatctggcatccacttcccatccaggtgatcagaggatacgtctctgcagaaaccaccaaggtctcagaaaaaaaagcctgcacaatctgacatttaggagtccccagtgagagtgctggctgcctgcccactctccctaaaaatgagtttgcc

SEQ ID NO: 13402 - DNA, 1739 bp, Artificial sequence
  DNA replication origin
gctcggggcgcgcggggactgcggccgaggggaggagagggcggtgcgcgggcgggggcggggcgagcgagggcatatcagggcagcccgcccaggccacgccccatccaggcctcgccccgtccgcaccccgccccggccctgcctagaacggcgggaccacggtgactgacaggactccagaccagtcaccacgcgcctcgaggccccgagaggctagtcggggccgagccagcggaggggctcctgaaggggcgggggcgggcggggaagccgttcggcgaggggcggggtctctggaagactggcagaactcacagccaatggcaggcgggagccgtcccgttagcgccggatccccgcgggtagggcggggcgggcggcgccgtggggatcccggggcagccgagggcccctgactcggctcctcgcggcgacatggatcggatggccagctccatgaagcaggtgcccaacccactgcccaaggtgctgagccggcgcggggtcggcgctgggctggaggcggcggagcgcgagagcttcgagcggactcaggtgaggacgggggaccccggggcatccctggggcaccctgagggacgcggtgtccgggaggggctttgaagggagtaggagtcttgcaggccccagttgaagacggggcgagggtgtagtgagcgggggcattgacgtgcagatctgggcgatcccaggaaggtcggggaccccagggtaccccagctggcctggggagaagggcagaggcgggctcggaggagatggcaggatgcgtggccaagaggagcctgatcggctgggtaccgggcaggagtcccaagatgaggtgagaggggaaggaactgaaaaggggcggaatggaagggttgcccctaaacaagggaagcgcacgggagccacttggaggctcaagtgtgggggcggagagtgggggcgccgggctgggaatgtgaagggtgaggggacctctcttcccctccgatcacttcttggttgcattgacatcccttcccaccccccaccccttagcatccccctttctcgatgcctcttgcttggctctggccagccccagctgtcagctctgaggccgggcggaaggggtcggagcagggaaaaggaatgtaggaaatgcaaagtgtggccactttgtgggaaaattactttgggggctaaagtggagaccatggtgcccctgagccctgacttggggtcttggttttatcccccaagatgtgcctgacagctaataggcagactgccctatttgtcctgcctggccagggcttggggccaaaattcctcagtgtcatcaacaaaaagccacaatccatttttttctccgagtttttaatgcctggtgtattgattgggctgaattaagctgacatgttgatggtgttcatcaattcatttgtatgtaaaatccatttcaaagagtacaacgcttcttttaatcccagtgccaatgctggaggggcagatttcttctacactcttgtgctcagagtggaacctttgaagatccatttgggtccccctctccagaggctggtcccctgatgtgttatgcgaggaatacttcccccaaacacagttggagggaaagggctttgggattttagttagaaaagacagtgagaatctgactgaaggttctgtatatggaatctttcaaagaatagagcttttggccgggcgcggtacctcacacctgt

SEQ ID NO: 13403 - DNA, 1088 bp, Artificial sequence
  DNA replication origin
gtggctggggtttgtctcacagtggaggcaaggaattgcaactcagaaatacgttgctacttggctgcctctactctattattgtataccttgaaggcaaggttaattaagtcctgtcgtggggtttgagggccagaatttaatttttggagttttatttaatgtcgggagtggattgggtaataaaatgtaaattgagaataagacggccttctgacctttcagggcctagggctgtaaagccgctaagggttgttgtgaaatgggccatgaactgggctgggtttttcatatttgatgaaagagcctaaatgctaactgatttgggagagttcagataaagaaaaaggagcattaaccttgactatgcctttagctcccgccacctttttaagaggaaattgctgggcaggtgggggagggctagtcatggaacgaaactgtaagccggacggggtgtgaggaggtgaggtgataaaaggattgtagggtgggggagcggaggctgaggaaaaactgggacctggctcggcctggcaacgagcagcctgtggaggaggggagaggtcagatgggtccatagaaaaggaagattggaaagactcagagacgcttggggttgggactgaggggacaggcgggagggaaagaagcaagatttgggatgagttgcattgggaacagagactagcgagggactgatgtgtaaaagaatgcctggacgtcaggcacctcagactgtttgcctatgttatgacaagaattatctagatcttgaaggatggaaaaatcgaaagtgccatttttctggctatttggaacaactgtcgagtttgtattggggtcaagtggtgctgcagaagaaaataaggcatttaggttttaggtcaggtgtcggttgaagaggttttaaaagtttttgagaacacaggctaagggagaagagagaggaatggagggtggaaggttgtccatagtgaaggaggcaagcccagagaaaagagagggtagagacacagagagaaaagttagtgggtgcttgtgccccaggaaagtggagagaaaagatagggtagagacacggagag

SEQ ID NO: 13404 - DNA, 1091 bp, Artificial sequence
  DNA replication origin
attgaatccctctcccgtttcctgtcccttttccttttttttttttccgagatacagtcttgctctgtcacccaggctggagcgcagtggtgcgatctcggcttgctgcaacctccgcctcctgggttcaagcgattctcctgcctcagcctccggagtagctgggattacaggcacgcgccaccatgccgggttaatttttgtagttttattagagacggggtttcaccatgttggccaggctggtctctaattcttgacctcgtgatccgcccgcctcggcctcccaaagtgctgggattgcaggcgtgagccaccgtgcccagcctcctgccccttttcttcaatatgaagataaagctgcccctggctgtactggaggccaattccgggccatagcaggaggaactgagttctaattctgtctttgccatgtaactgaattacccagggccctccctagtcctgtttcctctttggtgtaatagggatgaatacagatgggaagatcgtgatatgaaagagttctgtgagctgtaaggcataataatcatgaggtattattacaggaccaacaggtgcctaggcccgctgtgcaataacagaccagttacactgaggaagcagggttatcagcagaaaaagggtttaaagatggcagggtgcctaggaggagacgcagggagaccaacaaatccatcttccccaaggagttccgggctgggattttaaagggcattgtgaagggtgaggggctggaaaattggggtcatcgactggtcagggtaagggggttgaaatcctcaggatatggaaactgcagtccccattgagtcttgcttctgtgggctccttcagaacaactggtgtcagtaattatgctggtatgcgggacctgaaagaatatctccaagggaaaacgtttcataatgttcaagttgttatctatggagttaaggggaattgtaatcttgtgacagggtctacgtgattctaggacagacgatgggcacctatcatagctgatacacagagctatgagcaagcaggtcggagagcaaggtgacctagtgatgaacgcagagtgtgct

SEQ ID NO: 13405 - DNA, 1003 bp, Artificial sequence
  DNA replication origin
cagtaccagcccgagtaggatggaatcaaacacggtgctggaacattcctacccggaagtggccccgacccccctccccccgtcccggcctcccacgcacggggggggggggggggggggctgatcggcgctaccggattggacaacttggcatggggcggggcctctgggaggcgtggcctccggccggctcctctgctgttgccaagggaaactgccgcgaggaggcggaaggagcagaggaccggcagccggcgtcgaggcggggcgcgggaacgacggcggccatggcggcctcggggcccgggtgtcgcagctggtgcttgtgtcccgaggtgccatccgccaccttcttcactgcgctgctctcgctgctggtttccgggcctcgcctgttcctgctgcagcagcccctggcgccctcgggcctcacgctgaagtccgaggcccttcgcaactggcaaggtgagcaggggcgggccgggatcgcggggcgagtccttgtcctccgactttgccggttcctgggctctagcctccgggactcgccccttcaggcctcaccgccagtctccccctgtctcggtcctcatcaccatgcccgccccccggaggaccgacctccagcaccgtctcttgctctccgtgttccacacctttgtctgcagaccccatcttcgtcatcactgtaatcccttccctacccgaatttgttcccttccctgtcgccaccagactggttaaggccccaaatccattcgctagcaaatccatgctcgctctccaagggtaaagatttttcgtctccccctcccatttcacatacacacctacgtctgctttaggcctaagccccactgaaaaacgtttttctctcacctacatcacgacaattggactttatccacaaacccctataagccctataaacgtcctgccctcttgagatttggaatttcttctgctttttcatctgtatcttaatcttgactgccattcccag

SEQ ID NO: 13406 - DNA, 1550 bp, Artificial sequence
  DNA replication origin
aaccacgcactttcatttctctgccgggcgacccagccgagccgcgagggggcgtggccgggccgggccgtaccaagagcgcaaatttgcagggggaagcgcggggctccgggaatgcacgcgcggctcgagtgggcggggcggcggcccaatggccacgcccccacccccgcggccggcgaaggcggtggtagcgcctcagtggtgtgggcctgagccctgcccaggtgcccgcagagagcagccgggctgccagcggtgagtgctatctttcgcggcgacggcggggtgggtgaggtcgggccccaagactcggggtttgccgggcgcctcagttcaccgcggccgcctggctctctgcgtcggggtgggccctcgggcctgggcactgcgcgtctggcccgacgctcgggcggaaggcatggctcccaccccggccctcctccgcgtcgcccttcccctagagctgatctcccgcggcggcctgagggtcgacttttccacagcttgggccgagagagcccggcaggccctcggctgagggttagggctcggtatctcagggctcggggtccagtccccgcgccgccgccccccacgggctaagccactttaactctccgagcctcagtttccccatctgtacgatgaatgggcctcgggaggcagcgaattctgggggtacctaacgtgagaggcgctcgatgcatgctcatgggacccgaatctaaccctgcagcatcaggtgggctgagtcgatggatcacgggagccccccagcccggcctgcatccctgagggcagtgcccctcgcagtcaggtgtctcggcggcccccacaacacaggtacccggatctcctgggggagccgggacacccttagatcgggggagcaattgggtaagagttcaaggtctcttgggcgccagggggaggagagtagaggtttcagtgagcttgattgacttcgactttctgcgtattgtttttcaaaacgagttacccttgtgtaaactggtgaccactaataaggagtttggggctgtttcaatgaaagtggctgtctcctctcttaaacccttaaagctgcagccttgccttgccttgcctctgagcttggccaagctggagaatgatgccagcacaaaaggagacaggactggactgggtggccctggtttgattcttggcaagcaagatacctcctggagcctccgttttctgatcagtgggtctggtagtaagacagccaccctgctctccccacagggttgagattctgaggatcaagacagggtcccagagagtggcatcgagaactttaatcctccttgtaagcagaacgtttatggaaccctctgggggatccagtatccccaccgttgttcactgctgtaattccttgggtcttgctttatggagaaggcattgattcattaaccatttgcaagttctacctacggaaatcccttttgagtggttatggggttggcttggtcaggagaacagctccaaaggcccagttagtaaaccagggaacccagaaaggt

SEQ ID NO: 13407 - DNA, 1047 bp, Artificial sequence
  DNA replication origin
cgcccggccagctgccccgtccgggaggtgaggggcgcctctgcccagccgcccctactgggaagtgaggagcccctttgcccggccagccgccccatccgggagggaggtgggggggtcagccccccgcccggccagccgccccgtccgggagggaggtgggggggtcagccccccgcccggccagccgccccgtccgggagggaggtgggggggtcagccccccgcccggccagctgccccgtccgggagggaggtgggggggtcagccccccgcccggccagctgccccgtccgggagggaggtgggggggtcagccccccgcccggccagccaccccatccgggaggtgaggggcacctctgcccggccgcccctactgggcagtgaggagcccctctgccccgccagccgccccgtccgggagggaggtgggggggtcagccccccgcccggccagccgccccgtccgggagggaggtgggggaacccccatgtcaccagcctagttccctcataagatgctcaactggtccttccaccaacgacacctggtaggcagacgtgacatgagtcaacaaaggtccaagtgagagtccctgaaacagcagcttctgctgcttaccaaggaggctgggctcagccctgaaattcacactattccattttgcaatcatggatatgaccgactgggtttttcaccacaaccagagcacccagactcaatcaggaaagccttagtcatgtgtcagcaattaggcaatgagagactatgttctagctgactgctgatggctgtcactgtcaccaggaaaccatggggctggtctgggaagccagggcatccgagggttgtgggcatcggtctactgctacacaacctgctgggaacaggccattcagaacaggcccgcaagcttgggtctttgctttctcactaatctgagctgcttttccaatggcttgagttcatctcaatttagcttttttctttcttttttattttatttttttgagatagagtctctctctgtcaccctggctag

SEQ ID NO: 13408 - DNA, 1239 bp, Artificial sequence
  DNA replication origin
ctcctcactgcccagtaggggcggccgggcagaggtgcccctcacctcccggatggggtggctggccgggcggggggctgacccccccacctccctcccggacggggcagctggccgggcggggggctgacccccccacctccctcccggacggggcagctggccgggcggggggctgacccccccacctccctcccggacggggcggctggccgggcggggggctgacccccccacctccctcccggacggggcggctggccgggcggggggctgacccccccacctccctcccggatggggcggctggccgggcaaaggggctcctcacttcccagtaggggcggctgggcagaggcgcccctcacctcccggacggggcagctggccgggcggggggctgacccccccacctccctcccggacggagcggctggccgggcgggggctgacccccacctccctcccggacggggtggctgctgggcggagacgctcctcacttcccagatggggtggctgctggacggaggggctcctcacttctcagacggggcggttgccaggcagagggtctcctcacttctcagacggggcggccgggcagagacgctcctcacctcccagatggggtcgcggccgggcagaggcgctcctcacatcccagacggggcggcggggcagaggcgctccccacatctcagacgatgggcggccaggcagagacgctcctcacttcctagatgggatggcggtggagaagaggcgctcctcacttcctagatgggatggcggccgggcagagacgctcctcactttccagactgggcagccaggcagaggggctcctaacatcccagacgatgggcagccaggcagagacgctcctcacttcccagacggggtggcggccgggcagaggctgcaatctcggctctttgggaggccaaggcaggcggctgggaggtggttgtagcgagccgagatcaagccactgcactccagcctgggcaccattgagcactgagggaacgagactccgtctgcaatcccggcacctcgggaggccgaggctggaggatcactcgcggttaggagctggagaccagcccggccaacacagcgaaaccccgtttccaccaaaaaaatacgagaaccagtcaggcgtggcggcgcgcgcctgcaatcgcaggcactcggcaggctgaggcaggagaatcaggcagggaggttgcagtg

SEQ ID NO: 13409 - DNA, 1552 bp, Artificial sequence
  DNA replication origin
gtttgagaccagcctggccaacatggtgagaccctgtctctactaaaaatacaaaaaatagccaggcgtggtggcgggcacctgtaatccaagctactcaggaggctgaggcagaagaattgcttgagcctgggaggcagaggttgcagtgagccgagatcgcaccgctgtactccagactggttgaaagaacaagattctgcttcaaaaaaaaaaaaaaaaaaattagctgggcatagtggtgcacacctttagtcccagctactcgggaggctgaggtgggaagactgcctgagcctgggaggtggagattacagtgaaccttgatcgtgccaccgccattgcactccagcctgggcaatacagtgagaccatgtctccaaataaataaataaataaataaatggaaaaaagggttccagctctagcgctgctattgctggctaatgaccctggcaggcccgttaacattcttgagcccccggttcttaatctgtaaactggtgtcattttcgcagtgcttcctgtgaaggtcatataaacagcagatagaaaagggccttataaaccccacataagagatgattaagggagagctcaagcacaatctagcaagaaggcaaaacccaagagtcaccccaaaatgctacaaggagccttgcttctttcagcctgaggcccgcatgcaggacactgcttggagtggtgacagaagagggacagagagaggaggctgagaggcggcacttacaatgtctgaattttggtgaactcggggacttcttcttttttctttctgaagaggaaccagtaggttaggagacccacgatgagcgaaaacagaatcatgtccgtcatgctgaaaagagatacttcttcggccaccgcctcggacacggtggagctggtgtccacgtgggagtctcccatgttgatcatgaaactgttaggagacagaaacagcagatgtcagcagagggtagcagggtgcccctgaggctggctggggtgcccacctaaatgctgggccttgcccctggggctgcaggaaatggtcactgcacggggtaggagaaggggctcactcagccaggttcctgccaagacagccacagtcttggactggggctgacataacagacagcccccagtggtgtcagcaccagcccagggtggtcctggggtgcaagctaaggcagcagctgggactgggtccctggaagacagagaaaatgacagccactgactctcagtgtgctggaacatcctctaatcccacaaggacaccgcacggggggcaggcgggaggaagtgcacgcaagagtggaccatttcgcagcaaaccctttccccagctgtgtggctggcgggggttgccctaaaccctgcatgttccaagtctccaggcctggcccttgagtggctcctgatattcacgagccttggactatcctgactggcaagagtgtctctgtattcctaaaaccttgggctatgaaggtagttcctgttaacaatgagatttatggtgaatgcctgctttcctatgcct

SEQ ID NO: 13410 - DNA, 1347 bp, Artificial sequence
  DNA replication origin
gtgagattacaggtgcgcgtcaccaggcccggctaatttttgtatttttagtagagacggggttttgccatgttggtcaggctgggctcaaactcctgactcaagtgatcctcccgcctcaacctcccaaagtgctggaattacgtgcatgagccactatgcccgaccaaaaatgtcattttaaatacaaaaatgtattttcatcttcaggtttgtcacttgattcagaatggccatatttcaaatctccaccacccagaggaaggtgtttcccaccttgctgtattcagccagcgtttttcacctccttcagcttgaaagtcctgggcaaggggcactgggcttgttcctctggccctgcaggcttggggcaagggtcagaaggaaacagaagaacggaaaatggggcggggtgaggggtggtgcgggggtagaaggccagaagtggacagtggacagaagattgtgtcaccccagcctgatcctgaggctggcgggcaccaggctgccctctggaggggatggaccaaggtgagggctgtagtcccaggaacgcagagaagggaaaaatgaaatgtggcccagtgcaggggaagcagagggggtctttgaatcccaggggagctgacccttgcgcaggaccttgagggcagagcgggggtcagccaggtgaggggactgtggcaggaaggctctgggtggaagcgatggcgtgcacaggattctgaggccaccatgcagggagggggtgtgaattaggcatcaagcttggtttgtggaggggagtggcaggtgacgctggagacagactctgaggggactcatgtgcccggatcccatgggtcgtgggagctgttgaagagcggagcagggaagtggcagatgtgagaggcaggggctggagaaggaagaggtgaagaggtggaaggtcaggctgaggtcaggccgtggggacctgggctgtgggtggggaggaagagggaagtggaaaccttggctcttccttgagggaaacaagcccatatctatctgggtgcaggagaggtcttggctttgcaaagcactggtgtcgcaagaggctttactgtaggggaaatgggaagggtgagctggtgcgggaggcctgggagccctggtgttggattagaggccagctgctggcttagcccctggggagtggcacgggacaaagctggaatgtcccctccctgtgctgccacagcatcccatgaaacctgcatctaaggacacccacgtcccgtgacacctgtgtcccatgacacctgcctcccacgctcattgcacacttttgtcttgcaggacctcctctgtcagagagagcagctt

SEQ ID NO: 13411 - DNA, 1240 bp, Artificial sequence
  DNA replication origin
caggttgaacaacgtcagcgcgttaaaaagctgccagaactaagcagggaggaggcattttactcagaagacccagtccctgctggagcccgaaaccggcgcagaggacggacagacagacaggcagggacacagaggcacgacttacgtgtccaaagaaaagaaaaggcagcaggaaggtgaggccccgccacatccaggactggaagccctctgcggggaggaaggtcagggcacaggacggccagggacagaggggacgctaccactcagacccgggatgggaggaaaggggaatgtccagatgccagggccactcccgactcacccacagtgaggtccatggtgtgccgctcgcccagcgcccgcaggcggtagaggcagccgctctggtagtagtactggagaaactgcacgaagcctgggccgggcggaggacagaggagcagggctgagccccgggaggggttccctgcccctgccccccaccacgggtgcctccagggctcagcacagacatctgggacactcactctggtacatggaaaaggagaggaattggttccggaatttctggtacatgagaccgtcgggcctaaggtaaaaagtggagggcagtgtggggacccttggggatgccgtgtatcccctccttgtcccagctcctgcccctgccggggcccagccactcaccacgtcagcatgactcccgacaggaaggtggacacgtagtgatggaacacccaccagcctttgatcctggagcagagagccaccatcacccccagcgcctgttcctgcttcccggagggtcctggcaccccattccatgctcccctccctcagggcccgccctgcccaccgggagccgttgttgatgaggatgctctcccggatggtcagggtgcagtagtaccagaccagcaggaagttgaaggcagcatctgtcaccctgcggagggaggggaccgagggttggtactgcagcgactggggatggggtgggtcctcggccggggtgggacgcccacctggagttgagcaggaagcggcaagtgaaggagatgaggatgaggatgatggtgaggtagagcttgaacttctcatactcgtccttgtaggcaaacctggggggcgcaggccggtgagacgggtggggtgctggtggggcccatgtgtgcccccaccccgggagggcagctgagccaagggtagtcggatggaggagaaggccgggttg

SEQ ID NO: 13412 - DNA, 1733 bp, Artificial sequence
  DNA replication origin
gaagggagacagccaagtctaggagactttttttttttttttttttttttgagacagagtctcactctgtcgctaggctggagtgcagtcacttgatctcggctcactgcaacctctgtctccgtggttcaagcgattctcctgcctcagcctccggagtagctgggattacaggtgcccgccaccacacccggctaatttttgtatttttgtattttgtatttttagtagagatggggtttcaccatgttggtcaggctggtctcgatcttctgacctcatgatccacccgcctcggcctcccaaagtgctgggattacaggtgtgagccaccgcacccagccctctgggagactttttagagcttggctgtgagtggagggagagaattagcaactaggaactggaaattagcactgggttgaggggcagctactgcctgtttgtggggttactttgcctctgggaagactcgagcacatccacctgctgagaagaggggccgagaggggaaagacccaggagaagggcaggaggtgatggagggaagcctggggagagcgagaagggctagtgggggatggagggtgcagagatgagagtgaggagtgctcccggcacagtgctcctggcatagtgctccccatagagcaggagtcaggctgtcttctctgcagtgttgcaggtggggcccgaggtgggaggagacagggtagagggtttcggggagaggatgtggagaggcgagtgctgggaaccagatggcgagctgagtggggacacatccgcagcctggtgggttggcagtggaggctgaagctggcctgcttggggagcactgtgccgggagcattctgtagagggagaagcatggctgtcccagaagttctttgtggccttggggcaaattgcctaaccatgctgagcctctgtctgtttggcttgagtgtgaacaagagcccatgtgtctggggcaggtgctgagaaagtgaccgtgactttgctgtcacctcttggagtatctctggcagagaagggcaagatgatctcagttggtgggtgtggaggctggacatgaaggggattggcaaaaaagtggtgtaattggcgggtggcctggggactcagccagctctgatgagatctgggactggagagcgtgggggcctcggtgagggacaaggggggtcgtggtgggaagaaacgccccgggaggctgagtacttggggtcagcccacagtcagagctctgagtttctgttctggtttgggaggtcgtcctagatgtggccaggcgtgtgggtctctgaagtggaacctagtactgcaggttctggaggggaggtggcagggagctggggggtaggtggtggccatcgcacaggggagcaatcggggacagggggacggccctcagcagggagggagagccgggttctcttggtgccctgaggtgggggagtttcagacaagactctggagatgggggggaacactgtttcctccgggggtcaggattccggagcaggcggccaggaaggctgggcatggcagggagtgggtctgcagcctccaaggtcagaacccgatgccaaggccctgcggaaagcagcgggtgagggggtggggtggtggcccaggctctggcctggcaggcttggctgagtaccggtggcttgtctgtcactcgggcttctcctcaccccgccacccccttccctagattgtacctg

SEQ ID NO: 13413 - DNA, 1309 bp, Artificial sequence
  DNA replication origin
tggggagctaagggtcaggggtcggggccctggcgtcactgccaaggggggcgaggcccctggtcctggtgtccactgccaccacctccagtgtccgggaaccccggcgggaccccatcgcgctgggcgacctcggcttccaatgagggccttggaaaggggcccagaccccgaccccgtcccttcccagaagagagcggccgcctgagtcacacacgggcgggcccagccttgggtcagccactcagcaaacgcgcagcgggcagcgcccgagaggcagcccaggtcgggggagcagcgtttaggggggtgtcctcggcctggatgggggacgccccaggcagagggataccgcgcgccgccgaggcctttggaaggaaagaggggacttgacaggcccatgtggctgcatcaaggagaaccaggggaggggtgggacgggtgggaggggtgggcggggctaggccctgcagggacgctctggcctggcagagatcagagtccctccgaggccagtggaaagctacgggaggaattgtctggactgagctccccagggccaccgtggctgttctgtccagaggccagggaggaggaggctgttggcctcatccaggcagggaagagggcggtggctgtgggtgggcagaagtggcacgtgctggggtccgagggggcgtggtgacccctcctgggcatgagaaacaagatccagacagagtagagccctggccagctgatggcttggttagcccttggcctctcctggactggttccaactgcttcctgtgggcattgaaacccagctgcccctggccctgccaaggcccctgccattggtgcttctccccagagactgagcagacccagtctccccgcctggccgccgctgtcctggccacagcccctgcttggctctcctcacactgccccttgccccatctctaggctgcgccttcttgagactcacctaccagggcaaagtgcttggggaatccttgggccaaaggtgctaggggaagggagtggggctggccttagagcaggaggctctagggttgaaacctgatgacctttaacctgggaagaagatgtcagggattcctgagaacctgagctcctcctgtactggaaggctagataggcaggaggagctgagaggatagaggggtggctctgggctgcctgcttggtccaggaggtggccctgggggcctaagctccagactcaaggtaggagaaagagtctgtccttgtagggtggggacaactagcagatgggctgagactaagaaaaccttggctggg

SEQ ID NO: 13414 - DNA, 926 bp, Artificial sequence
  DNA replication origin
actgcagcctcaacttccctgggctcaagcgatcctcccacctcaacctcctgagtgagtagctgggaatgcaggcatgcaccatcacacctggctaatttatttttatttttgtagaaacagggtcttgctctgttgcctaggctggtctcgaacttctgggctcaagtgatcctccagcctcggcctccccaaaatgctgggattacaggtgtgggccacggcacccagttggaagttgttttccaaatgcacttctccaaagctggcagcacccacagaacaaactgggcatcaggagacggcacagactaggggactggtaggggattaggatgtccatccatgcaggaccttccccaagtccattcggcaaccattccctgccaccgcgtgggtggggctgggaacagagagatgaatgccgtcccaccacttagcgcgctctgtggagggatgggggtgggagggggtgggggattcccctcaacagaagggcaggccttcaaggaggagtggggttttgccagagggggaacggctttacacacagccctggctttcctcagggtgtgagttgggacagagcccgggatggctgcagagctccgattagggacctcctggtaggcaggacacagccgctggaaagttttaagcatgaacatgatggggaatcagccttgtgttttgggaagggcagtccggtggccgcgagaagggacagtggaggtgaggcagggagaaaggaggccgctgtaaaaatccaagcgagagaagcagctctaactcccttccccaaagaggctcagcttcccaaggacgaaaatgttgcaagcaggtgtcacctccctgcaccttggtttgctctcagcatgacgggccagagccctgctggctgcaccacgcggctggcacagtcagtg

SEQ ID NO: 13415 - DNA, 1191 bp, Artificial sequence
  DNA replication origin
agctacgtcaaagcaatggaacgctgcagaaaaaaacgtaagtttactttcagatgcagagccctggtttcccaaccttgaaggcgtgcaagccaagagcaggtcctctgggaaatctgggagacctgggggaaccctgacaaatggaccggccctggagcgggactacctcgcccccttttccccggctttctcccccgcacctccaggccagtgtcagggcctgccccgggcgccacagtctccagccagtgccgggcatccctgcggtccaggctggcctggagagggtcagagctgcccgcgaaccggggacgcacgtggcccgggccggggggcctccgcctgcaggccgcccctcgtctggcctacctgggccgaggtgctgaagctgcggcggagagcagcgctggcaggccgggcgagggcggagagcatggctggagcgggaggggcaccgactggcaggcacaggagctggtgacggggaagtgactccaacgacctccacactgcccagcgcctgctctctggggcctcgcgagagtgaccggacttccggtcgcgctcgcctccgggatctcgtgagatcacggccacttccgggagtcggaaaggaaagctgtgggaccatcctggcaaccccggtgtttggctgggttctagcgtagccgtctgtgtggccggtgggggacctgcggtcggagtgggagggccagtctgcacccaagaggtggaagaggacgggctttaggctggaagcgccttagaggagccatttttccaggtggggccccaggcagaggctccgacagggagcctggccatagtcgcgcagccggggaggtggagcgcgtcccagacccgagcccccgacctcagccaaacccattccttctgcccttggaggccagaggggactctgagctccggaaaggtagggtcagggaggctgagagtccttaggcggggtgggaggaaggggccatctcctcagatccgggccgtcgtttcccaagttgcagagacccttgggttcaggtttagtgacaccactgctgataatggcgacctccagccctgcaagctttagaggaccactattctgtgttccagatgagcaaataggttgtagggacaacaacttccgtggtcatacagttcctgtcttctctcgcctgcccggcagtg

SEQ ID NO: 13416 - DNA, 2021 bp, Artificial sequence
  DNA replication origin
ggcaagagctgggcccggggaggctgctgcgaggccactggtgggcctggagagctgggctggaggaggtttcgggcctacgaaggccgccgggatctgggcacaaaccgagtcagaagcggctgtctgcaggtgggggttgggcctggaggtgcagccgcgagagagcgctgggcctggagaggaggccgagaggtagccaccgggccgtcgcggtggcttgcccacttgggcctgtagaggccgccacgagggaaaagccaggcctctgaaagaggcctttcagagggacgagccgggcctaaggaggccatcgggatgcaggagccaggcctgcggaggccaccgaaaggcaggagcctggcctaggggaggccgcggtgaggcacgagatgagcccaaaaaggccgatgggaggcaggagccgggcctgtctgggctgccgcgaggcaggtggcaacgtggcccggggaggccgacacgaggcaagagcggggcccggagagaccgctgtcaggcaggagctgggcttctccaggccaccagggagccgaaggcggggcctgggaggcctcacttcgaggagcctggggcctacaaaggctaccaggagctgggccaaacgtggttgtcgtgaggcaggggttgggaccgctggacgcggcccggatggagagccgggcctggagagggccactggaaacagttctgggcctggaaaggatgccggcagtcaaaagccaggcatggatagaccaccaaaaggcaggagcttggcctgatgcggctaggatgaggcaagagctggttccaggggggctggtgtggggcagaggccgtgcccctaggggcctacaacaggcaggagctgggcctggtgaagccaacttcgggatgctttgggtgggcccgcagaggccatcagcagcaggcaggagctgggtctagaggggtcatcgttcagtaagggagctttgggccgggagacaccatcggggtgggcgggagctgggtctggagaggccaccgcaaggcacaagctgggcctacagggaccagcatgaggcaggagctgggcttgtggaggctgcccggaggccggcacgaggggggtcgtggaaggccggcacgagtggggtcgtggaaggctgccgcgaggcgagagctgggcctggaaaggccgctgcgaggcaagaggcgggcctggagagctggactggagcaggctttgggccgatgtaggttgccaggagctgggcaggagccgagtcaaaggaggctgtttggaggcaggagctgggcctgtgggcgcagccatgagcaaatagctgggcccggagaggaggccggcaggcagcaactgggccgggggaggccgatttgaggaagttctgggcctggagatgtcgccagaagggaaaagctgcgcctcaagaggccgcggtgaggcaaagccaggcaaaaaaaggccatcgggacacaggagctgggcctgcagaggctgccgaaaggtgggagcatggcctggggaggccacggcgaggcacgagatgagcctctttaagaggccctcggcaggcaggagctgggcttgccaaggctgccgcgaggcaagcggaaacgtggcctggggaggccaatgtgaggccacagctgggccaggagaggccttcatcatggctccggcgttggggaccctgctcaagtacatccaaaaggacccttcccacaccagtctttatagcggtcaagtgcagcagccacttagcacccaaggcatgtgccacagctggcatttcatcacaatcaacaataagtggtagcttgagtcattgtgaggtcacttcctggaaatcaacagcatcccatgtcccattggcaaggagctcagcacggccccttggataaccaaatctatgcccaaatcccatctgtgtgggtctgtctcctgggatccttcccagcatcaactctgtattagtcagggtccaatcaggagacataaaccactcaaaagtcca

SEQ ID NO: 13417 - DNA, 1325 bp, Artificial sequence
  DNA replication origin
tgagctgaggccgccgctgtcttcttcctgcccttgccttggtgggcggcggtttcccacgccgtggctggcttggcaggccggggcaccatgccgggcttcatgcagccgggctgcgtggctgcgcagagcaggtgcctctgggtgtctggtcgggggcctggcaggagcgggccggggatggccgcggcaggcggcgggtccgccgtggagccccggggaggcggccgccacgattgcttcccgcagtctgcgaggtgtctggccgctggctcagggccccttttgcagactcggtgcctggcatgcgccggtgctgcctgctgggtcttggcaccactggcgcagccacggcggcgggggcctggctccagatccccgacccctgcgagcgccggccctgcgtgcctgctatgttggtgccatctcttttgcatatttgtgcttgcctgtcacactccctggcctctgagtgtcctttggcagtttccaaagcatttgggcaagacggaggttggggagcttcacaacaggtgggggcgcgcaggggagggtccgcggccggaccagcagagtgcttcaagggctgccgtgctgacggaccttccacactgtctttcggaactggggttaggggacagcccttggccaccactgtgcccttactctgtcgctttacttggggctggacctcccctttccagctctggcgtgtgactctgcactgagcgtggtgttgagaccaccaccagctggggccgtgggaggaagggtgccccaggcttggggaaggtggggacctattccccgctccccaagtgattgttgcgtgctctggtgaggggacagtggtacctcgatttcccatgtgccagcttcgggactcagctgtgcttttgtgtctctttgattagcaaaagcaaaatgaattcctccctgaacactaagcttcctggatacttccctagacctaaacctgagaaccgcatataaacaggccttgagggttctgttgtcagtagcgggttacctgattgcaaactgagcaagtttaaaacggagtgggctgctttgggctgcacagccgtctggcattcagacagctgagcaggaggcagaggtgagagaccaagatggactaaaaatgctctagctgctgggagctcatctcggcccagcctctttgaaaggaggaacattcggtgcagccattggaaccttatcctttataaaatgggacagctcacaggattacatttctaagccaatcctgtgaccatcctccatgaaattctctattttggttacatgtggtcaaactgagc

SEQ ID NO: 13418 - DNA, 1746 bp, Artificial sequence
  DNA replication origin
tgcacaccgactgcatttcccagatccaaactaataacctcccttgccccaggcgccttccagggctgacatgcctcctctcgcaagtgggggaaacagatgtccccgggggctggggataggggcgggggtgtggggaggtgaggggcgaggggaagggggggaggggggcgaagggggcggggaggagggggagccggccgggagacggcccggcccagccgcccgggctgttgcctccgctgcgggcgttcctccaggcctgcggagggcgctgcgggcgcggggctgggccgctctggctggcgggcgagcagagaggcgcctcggtggcggtgcgctgtccagcatttcagcaagcggcggcagcacccgcggggaggcagagggtgcggggccgtgggggccgcggagctgccctgcccaactcagcccagactaggcggcagcccggaccggcgggacccgagggcctggccccagcgcccggtagatcgcggcggtcagcggtgaggtgagagcgcctgtggggcgggggcatatccccgaggggctggggctgggtggaagctcgggcctccccagcacccccgtggtctgcaggctcccccgagcagaggggcagtgtgggaggtcggcgagggcgtctgtccgggggtgccaggcgcccggggagcagagatgaggaacattcatttcactgagagggatggagacagtggagacctttggggtcatgggcaggactcccctgggcataaatgaccatggcctagtccatgagggtgccagggaggccccccaaccgcagtcccactgaggagaaggacctgctccccagggaagggaggaccgatgcagtaaccctgtggagatgctggtcactggccctggtgaagggagcaggcccccacctggatgctgggcctctgtccagcaggaggtgccggcccaggggacagcctggcccctttcccggctacccaaatgcccctagggaggcaggagctggcaaggagaactgggtctcacaggatggcatttactcttgcactgggaagaggatggaggacacagaagagaaaatagctactaggaatttgggagggggttctctgtgcacaccccccaccccaaccacggacgcccagagagagtttctagcccagagttagacctgcgccagagtgaattcctggtaaagaagagagctgagaaaagacgcagcctctgccttgcctccgcctccccctccctcccagggctcctgcctggacagtgttgaagcctcctgcagttcctactcctgacagcagatccattgtggggagagatttagtgggaggaagggaaggttgtaccaaggtctgacgtggtacttcaatgcctgtgccctatcccagccataacttctcgctgtcctaagacctcactcaccctagcatcgggggcttgagctggtcttttgtcccatggcaagagaaaaggcaggtgctgggctttgacggagagacgtgcacaagttcctctgtccagggagcatcttaaggtcatggccccagtttgtgccagcttcttcctcagtcaaaaataggacccagctggctaggaaattgttcccacacagcagtagctttctggttccttaactttatgccccatcccactctcctgtggggtggaggaggtattcttgaagactgactaaagagtcaactgggttttaagaggtaggggtatgtgggt

SEQ ID NO: 13419 - DNA, 1400 bp, Artificial sequence
  DNA replication origin
aggaggctgtggcaggggaatcgcttgaacccaggagcggagcttgcagtgagctgtgatcgtgtcactgcactccatcctgggggacagaccaagactctgtctcaaaaaaaaaaaaaaaaaaaaagagggaagggaagagaagggagagggagagaggggaagtgggggcaggggagaggggaagtgggggcaggggagggggaattggggggaggggaggggatgctctgtcaaaaaaaaaagagggaagggaagagaagggagagggggaggggggcaagttgggggaggggagggaaggggtggggagggaagggaagggaagggaagggaagggaagggaagggaagggaagggaagggaagggaagggaagggaaggcaaaagccaagggcatgttaagatccagggacccttggctaagagggctacagtggaatggaatttatgatccaggaaactgcattcctgtgaaggtggtggctgcaaacgcaggatgagaccttccagagaaaaagcccagtgtggtgacagcaggtgggcaaggatgtgcctcctgaggaaaaagattctttccaactgtcagaaacgagacagaactgataaatacccatgaaaccaggtccttaagttgtgaaactcattctgggtcttgttaaaaataagtgtgtgcaacaatcgtttgtcaagatactttatcaagctggaaaagaaaagccatctgcatcatgtccaaggaatctaggtgtgtccccactccaaatcctggcattgaagccaggtgcagccatgacagggacatattccctggagcactctcctgctgacccttcccttccctgtgtaaggacccttctgcagacctccagccttgaacactttatattgaaagcttcccctgtgctcactgcccaagagcgtggggctgggggggtaaggaccagaggaccaagagacaccccatcaacttcagggttgggtcattcattcaggtcacagctatttgtgagtggctactctggggttcaccagaggacacgagagaaatgcagaaggagaagcactggtgcttatcatgctggggatgatggatgcatggcagagacatctaacagctggggtgcgtcaggagaggagcatagctaggaggtctccctggaggagagatcttgaagcataagtaggagttggcgggacaaaggaggaggagaaggatgtcctggtcagggtgtgggggtgagcaggaagaaggcatggagaggaaagagggaaaagcatggacttgaagctgggcgcggtggctcaatcctgtaattccagcactttgggaggctgagccaggagaatcattggaggtcaggagttcgagaccagcctggtcagcctggcctgtctcc

SEQ ID NO: 13420 - DNA, 919 bp, Artificial sequence
  DNA replication origin
ggctgggcgcggtggctcacgcctgtaatctcagtactttgggaggccaaagtggaaggattgtttgaagccaggaattcaagaccaccctgggcaaaataacaagaacgtgactctacaaaaaaaaattctttgttttaattagctgggtatggtggcacatgcctgtagttccagctactggggagactgaggtgggaggatatcgcttgagctcaggagttcaaggctgcagtgagctatgactgtgccactgcactccagcctgggtgatagagtgagaccctgtctcaaaaaatgaacaaagaagaagggatgagggacccaacttgatgacaggtgaactgttgtgggtcaggtcaataggggtctccaagctccacacatgtccctggctcagatgaccaacagatagaggggtcacccatgagccaagcactgcagccgaggtgggtggggagcagggcacccggagctctgtttggggcatggtgggtgattcttgtggagtgtcctgggaaaacccctggtggaactggggtatagggctggtctcgggacagaggcgggaagccagcaggtgtgggagtggaaaagaggggttagaagaacagctttggtctctgagtccccaggcactcccctctccagaagactctggcagatgctcccaggaacaggtggaaatcagaggctcagagaggggtagtgacatcttcagggtcacacagcaaggagtggagaagcgcagcctagaacccatgcacttgggactcagggggaaggacatatgagaagagcttatgttttcatcaccgctgttgcctcctgtcactctgtccccttcagagcctcctgtagctgtcacagtccctctctcttctctgccttccagtttctgtggctctgaacactccca

SEQ ID NO: 13421 - DNA, 1102 bp, Artificial sequence
  DNA replication origin
caccccaactggtctgaactctggcttcttgtctggacaaggctcttgggttcccacagtcgcccgactccgccctaatagcccctagccccgcccttctccccgcccacgacgttcgccacgcccacgtgcagcatcactcgcttctcccaccctcgccccgcctatctccccaccccagtcccgccccgcggcctgctcacccctgctcctccatcatctcctgcagctccatgcacttgagctccacccgccgcttgcgctcgtggtccaggatctcgcggtgcgcgcgcttcaccaggcccggctccgcggcgcgcagctcctcttccgcccgcggccaggtccccgaggaggagctgggctgcgggaagccgttcgcggcgtcgggtgtggactgcatgctggccgccccgttgttcacggtggaggacatcgtggctggccctggagccgctggcctgggccgctggccctgagggacagacacagacacgaggcgggatggtcacttcttcgccacctgttaagctcctctctgctggagttaatcctggagatttaagggcacactcatggctctaatccgcttcctttcctggtgcagagggaagcggacggctggtttgcacctttgggtcacacctcagggcacgagtgggttggacactgggctttttccatctgtaaggtgggtggatgcaggccagactggatggcctctaagagccattggctgggaatcgtgtcacctccaggaactaccgaggaccatcctctctggcttgcacgaatgcttgggccagacatcccagcgcccgcttgcacacatcattaactccccagtcatatttctcctttaggctcagttgaaactgtttacgcacacaccaggcccactatcctggctctgtccagtggcacacagattacatgtgttcctacctcccagtctgctcccagggcagccctacagagaggggaagatggaagcctactctattcccaccccagaggcagattttagctctctgtttgatctggccaacttctccaaagccaacattccagataagcggggctcacccagattgggcccaca

SEQ ID NO: 13422 - DNA, 1011 bp, Artificial sequence
  DNA replication origin
accaggaaaggaagcggattagagccatgagtgtgcccttaaatctccaggattaactccagcagagaggagcttaacaggtggcgaagaagtgaccatcccgcctcgtgtctgtgtctgtccctcagggccagcggcccaggccagcggctccagggccagccacgatgtcctccaccgtgaacaacggggcggccagcatgcagtccacacccgacgccgcgaacggcttcccgcagcccagctcctcctcggggacctggccgcgggcggaagaggagctgcgcgccgcggagccgggcctggtgaagcgcgcgcaccgcgagatcctggaccacgagcgcaagcggcgggtggagctcaagtgcatggagctgcaggagatgatggaggagcaggggtgagcaggccgcggggcgggactggggtggggagataggcggggcgagggtgggagaagcgagtgatgctgcacgtgggcgtggcgaacgtcgtgggcggggagaagggcggggctaggggctattagggcggagtcgggcgactgtgggaacccaagagccttgtccagacaagaagccagagttcagaccagttggggtgaagccatggcaagtccagctcatctttcatttatgtattaggttgttgcaaaagtaatcacggtttttgccattacctttaatggcaaagtgatggctcacacctgtgattccagcactttgaaaggccgaggcgagcggattatttgaggtcaggaattcgagatcagcctgcctaacatggtgaaaccccgtctctatgaaaaatacaaaaaaaaatttagctgggcgcggtgtcttacacctgtaatcccagaactttggggggcctaggcaggtggatcacctgaggtcaggagtttgagatcagcctggccaacatggtgaaaatccgtctctactaaaaatacaaaaattagccaggcgtggtgacgcgtgcctgtaatcccagctactcgggaagctgagg

SEQ ID NO: 13423 - DNA, 756 bp, Artificial sequence
  DNA replication origin
tgccattacctttaatggcaaagtgatggctcacacctgtgattccagcactttgaaaggccgaggcgagcggattatttgaggtcaggaattcgagatcagcctgcctaacatggtgaaaccccgtctctatgaaaaatacaaaaaaaaatttagctgggcgcggtgtcttacacctgtaatcccagaactttggggggcctaggcaggtggatcacctgaggtcaggagtttgagatcagcctggccaacatggtgaaaatccgtctctactaaaaatacaaaaattagccaggcgtggtgacgcgtgcctgtaatcccagctactcgggaagctgaggcaggagaatttcttgaacccaggaggcggaggttgcagtgagccgagatccggccactgcactccagcctgggcaacagatcgagattctgtctcaaaaaaaaaaaaaaaaaaaaaaaaaggccgggcgcggtggctcacgcctgtaatctcagcactttgggaggccgaggcgggtggatcacaaggttgggaattcgagaccagcctgaccaacatggagaaaccccgtctttactgaaaatacaaaattagcctggcgtagtggcacatgcctgtaatcccagctacttgggagactgaagcaggagaatcgcttgaaccgggaggtggaggttgcagtgagctgagatcgagacattgcactccagcctgggcaacaagagcaaaactccgtctcaaaaaaaaaaaaaaag

SEQ ID NO: 13424 - DNA, 1124 bp, Artificial sequence
  DNA replication origin
agtggcacatgcctgtaatcccagctacttgggagactgaagcaggagaatcgcttgaaccgggaggtggaggttgcagtgagctgagatcgagacattgcactccagcctgggcaacaagagcaaaactccgtctcaaaaaaaaaaaaaaagaaaagaaagaaagaaactagtgggctggctgctgaaggggtcaaagtcaggagcagggactgcccatcagacttgcactgtcagtgagctgagaaatcggaaattccctacacggggtgggggggcggggagctggagcctggagccacatggggccagacacagcctgtgtccttcagtccttccaagccacacctttgtccaccccaggcctcctgggctcccttagacaggggccaccatctctgaggagcttaggaagacccccaggcttaggcagagacagcgagttgctgaaggccatccggaaggcggggggccaaggcggagccaggatcaagagccctgctggctgccaggcaaggctgcttgtagggagaagaaggggtaatggggacctgatgctcacctcacccagaggaccaggtagcggggaggaggccccttgcagagagggatggatggatggatggcaggatgctgaggacacacacaaaggaggttccagctggcaagggaacatgttgatgagctgtgggtaccggaagagggaatgagatctcaaggggcaggggcaaggaggggcgaggtggggagcatctcctacagtgagaacctcaggtcgtgaattaaaccggcaaatccagccagattcggtggctcacggctgtaccagctcacgtggctcccggcactttgggaggccgaagtgggcagatcgcttgaggtcaggagatcgagaccagccttgccaacatggtgaaaccccatctctactagtaatacaaaaaaatttaaaaggccaggtgcggtggctcacgcctgcaatcacagcactatgggaggacaaggcgggcagatcgtgaggtcaggagatcgagatcatcctggcaaacacagtgaaaccccatcgctactaaaaatacaaaaaattagccgggcatggtggcatgcacctctagtcccagctg

SEQ ID NO: 13425 - DNA, 889 bp, Artificial sequence
  DNA replication origin
tagtgagaccccatctctacaaaaaaagttttttttaattagttgggagtggtggtgtgctcctgtagtcccagctactctggaggctggagtgggaggatcgcttgaggccaggagttcaaggctgcagcgagctgtgatggcacaactgcactccagcctcgcgacagggtgagaccctgtctcaaaaaataaaataaaaaataaaaaataaactgcacagcacctatgacctcagcaaattctcccaacagccctggaatggagttatcactctcaccttcgagaagaggctcacagagggacacggcaggctccaggtcacaaggcggctcaggacagtgcaggatgagcccttgtctggagcttcaaatctcatgctcttgcctccagcccagctacctctagaaaaaaagaagcgctctgagaagagcctgtagggagccaacatctgtggcagaggctggctggggctgcgggagcagggacaggaggtgtctggtccctgctgagcgaaaaggagagttctgtaagatggatagggagtattggaggcccccaccctctgccaccaggcttgattgatgagcacagtcctgctgccagagatgagcagggggggcccctggaggctgcagaggggagggcgaggagaggctatgaatatttcagcgacagaggccgggctggaggaaaggaggggaagcggggcagggaggcactcagccagcgggagggggctcagggactaggacacccaggtgaggaaagacccacatcattgagccagggctcggggagggcggagataggccaggaggaaggggctctttaagaaattagagtttgccgggcgcggtggctcacgcctgtaatcccagcacgttgg

SEQ ID NO: 13426 - DNA, 1421 bp, Artificial sequence
  DNA replication origin
aggaaggggctctttaagaaattagagtttgccgggcgcggtggctcacgcctgtaatcccagcacgttgggaggccaaggtgggtggatcacaaggtcaggagttcaagaccagcctggccagcatggtgaaaccccgtctctactaaaaatacaaaaaattagctgggcgtggtggtgcatgcctgtagtcccagctactcgggaggctgaggcaggagaattgcttgaacccagcaggcggaggatgcagtgagctgagatcatgccactgcactccagcctagtcgacagagtgagactccatctcaaaaaaaaaaaaaaaaaaaagaaaaagaaaaagaaaaaaaaaaaaggaagaaattagagttcgccgtgcgcggtggctcacgcctgtaatcccagcactttgggaggccaaagctggcagatcatctgagatcgggagttccataccagcctgactaacatggagaaaccccatctctactaaaaatacaaaaattagcgggcacctgtaatcccagctactcgggaggctgaggcaggagaatcacttgaacccaggaagcggaggttgcagtgaggtgagattgcaggagactgcagcaggcagaggttgcagtgaggcgagatcgggcccctgcactccagccaggacaacggagtgagactgaaaaaaaaaagaaagaaaagaaaagagaaattagggttcagtgagagaaaggaggggtggggatggggttcccagaataggacagtagggttaggggcacagggatcaaatggggggttcactgagggggagggcttcaatgaatggggctaggatatggaggggattcagtgaagaagaggagcctcatctaaggagtagccacacacaccccacccacgactgcagggtggctcatgcctggaattccagcactttgagagatcaaacgggaggatcgcttgaggccaggagttcgaaaccagcctgagcaacatagtgagaccccgtctctgcaaaatttttcaaattagccagggtaggggtccacgcctgtagtcccagctactcaagaggctgaggaggaaggatcgcttgggcccagaagttcaaggctgcagtgagctatgatcccaccgctgcaacccagcctgagcaacagagcaagaccctatctccaaaattaaaaaaaaaaaaaagaggagggggcttactgagatggtgagaactcagaaggggtgcgggctaaataaggggctcggttatctccttcttttttgcaaaagattgtaccgtgaggtcggggacctgtaggggatgtgccccgttgggttccccaaatctctgcctagccctgtaaggccaggggccgcagttacccctcgcccctcccccagccgggtagcagcccgcagacttgcggggc

SEQ ID NO: 13427 - DNA, 3118 bp, Artificial sequence
  DNA replication origin
ggtgctggagcctgctttgggcttcagtctccccattggaagttggtctattcctagttcacttttaggacctgtccaggaaggatgggagctggccagagggtgtgtgtaagctaatggtggccacttgggggcagtagggacccacactgatccatagacactgggaggccaggggaagatgaaaaattggggacattggaggggcaggattaggtgtttatgtaggctcctcccctacttggcaaattcccactacaaagaaggaactccagactctgcccttcctctgggctgctggaagggggtctggctctgatgccacctctggaatgtgactgccccacaacttccttccgagctctcctctcctctcctttcccttttcccttcttttcctttccttttcttttctttctttctttctttcttttttttgagatggagtcttgctctgtcgcccagactggagtgcagtggtgcgatctcagctccctgtaatttcctcctcccagtatcaagcgattctcctacctcagcctcccaagtagctgggattacaggcacccgccaccatgcccagataatttttgtattttcagtagagactgactatgttggccaagctggtctcaaagtcctgacttcaaatgatccagccacctcggcctcccaaagtgctgggattacaggcatgagccaccacacccagactttgtttttttttttttttttttctgagacagagtctcgctgtgtcacccaggctggagtgctgtgcactccactgcaatctcttggctcactgcaacctccgccacccgggttcaagtgattctcctgcctcagcctctcgagtagctgggattacaggcgcttgccaccacacccagctaattttcgtattttcagtagagacaggatttcaccatgttgtccaggctggtgtcaaactcctggcctcaagcgatccacctgcctcagcctcccacagtgctgggattataggtgtgagccaccgtgcctggctcaggctgttttctgctttctcagcaaccctcttctcctgcaccactctgcctccacctggactcctgcctttcacttcctctcccctcccccagtccaccctgaacaagccactgccctgctcagagctcccccacactaacccccagccctcctgggtggaggatggctccataacctggcagtcaaacctgttgggaggctagcacctgtccccgagaaactctacctctagccacagctccccgaccctgcctcctatccatggagccctcccagctcacagaggtcctcctgcctcgcgagctgtttccctgcaaattcagggtctcggtgtttctgcttgtctaactggcacctccacagacagacacaccccttgggcattggacctgccatgttgtctagaaattcttggggtcaccacgtcatggctgatgcatggggcaggcaagggttgcaaacagttggttttcatgctccttctccactgccctgtccccgcagcctggctgtgggaaggaaccctggagctgaaggatggagccctgtgggaccctcaaaaccccctcccatcattgcgtcctttgggctttggtccttaagggaccactgaccatgtcctctgcaaagcgccgctcacctgtgccgtctcttcctccgggacccagaatcagacctgtagggcgataaaggagttctcttgagcctgcctggggtggcccaggggagacctatggagggccacagccctggccctgggccccacgggaggaagaggaggccccagggtgggggcagcaagggtacctgtctcggcgatgcttcttcacactcttcttcttcttgcggaggggtgaggagctcccacagctgtggacacagggaggtgggctctagtgagctggggtggggggtggggggctggaaatggctggagagacctgggtgcttgggacattgaagctggaaagggaattccaggccaggaagcccaaggtcccttgtacagagtgacccgaggccccaagggtcgccaaggtccctcagggtagttgatggcgctgcctatgttgtccccacaattgtggggacaacaatgtcccccctggcattgtgggcaaagatagtttcaaacccagaagtcagaggctccaacggtgggattcacggcctctgtaggggcaaaacttgcaccttggcagtgtccaggtgcaggccctgagggtccaggcctccggcctctgggggatggccttggaatctctcccacccacagacatcccccgccctggccccagccagctctgtccccactgacctgcattcggactccagtctcctctttttgctgagggcagatgccaggaagaaaggacagacggatggatggggttagttggggccccagacacttgccagggtctcacgcaggacaggggagggtggacagagagattcggggatggcagatgaggcccctcctccccagggccactcgcactagtgttggtgggcacgggacccctgggagggcagagggggactgggagcaggtgctggtaacacacgggcccggtcagtgagtctggctctgggggattcagtgagaggcaggtgctagagaagggctcagtgaggggcggatcccagataaggggaggggctcgatgaggggtggggcctagtggggagaggacctcgatgaggggcgggtcctagagaaggggaggggctcggtgaggggcgggccccagagaaggggaggggctccttggggggcggaacctagcgaaggggaggggcttgtcgaggggcggggcctagcgaggggaggagcttgaggcctggggtgggttcagttacccggagggcacctagtcgggggacggcacggggagggcgagggaggggctcagagaggggcggggctcacaaatgctgcatggttgtgagccagggacgggcatccggggagagaccccacctcctcctcccttcccgctccggtcaggcgcggttctcaccggcttctccggtggccgcctttctttttcttctttttcttgggagggggcgatgccgagct

SEQ ID NO: 13428 - DNA, 1341 bp, Artificial sequence
  DNA replication origin
cctggacaacatggtgaaatcctgtctctactgaaaatacgaaaattagctgggtgtggtggcaagcgcctgtaatcccagctactcgagaggctgaggcaggagaatcacttgaacccgggtggcggaggttgcagtgagccaagagattgcagtggagtgcacagcactccagcctgggtgacacagcgagactctgtctcagaaaaaaaaaaaaaaaaaaacaaagtctgggtgtggtggctcatgcctgtaatcccagcactttgggaggccgaggtggctggatcatttgaagtcaggactttgagaccagcttggccaacatagtcagtctctactgaaaatacaaaaattatctgggcatggtggcgggtgcctgtaatcccagctacttgggaggctgaggtaggagaatcgcttgatactgggaggaggaaattacagggagctgagatcgcaccactgcactccagtctgggcgacagagcaagactccatctcaaaaaaaagaaagaaagaaagaaagaaaagaaaaggaaaggaaaagaagggaaaagggaaaggagaggagaggagagctcggaaggaagttgtggggcagtcacattccagaggtggcatcagagccagacccccttccagcagcccagaggaagggcagagtctggagttccttctttgtagtgggaatttgccaagtaggggaggagcctacataaacacctaatcctgcccctccaatgtccccaatttttcatcttcccctggcctcccagtgtctatggatcagtgtgggtccctactgcccccaagtggccaccattagcttacacacaccctctggccagctcccatccttcctggacaggtcctaaaagtgaactaggaatagaccaacttccaatggggagactgaagcccaaagcaggctccagcacccaaacccatagcctccgggccttccccgcagtcactctgctcctgtgggagcacatttctgtgttccttagtatggctttgttttggggtcagaaggactgaagggatctggtggcaccagggaggatggggctgaggattggggttgggtgagacctttgagggctaaccagaagcttctcaggcctttcatcaaaggtagagggtgctgggttggggggcttgccccagagggctggatgggatgtgacaggaagctgtgggagttgggagggggcagccctgcagatggatccagagatgtcattcaaaagcagggagattggccaggcacggtggctcacatctgtaatcccagcactttggagggctgaggtgggcagatcacttgaggccagg

SEQ ID NO: 13429 - DNA, 1136 bp, Artificial sequence
  DNA replication origin
ggcaggtggagggctgctctctttccccgtgctggggaagggggaaagaggaggcgcaactgcttgcaaagcgggtgtcccacgccgactcccccattcttcctggcgcctaaccccaggctgagccccaagcaccgagacgaagggcgaaagacgggcagccagcggtccagcggaagccggtcgccttccccgtcgggcggcagcggatgggggtcgccccagcggaacggcggcagcgggcagcggagcggagcgcacgggggccgccccggctcggcgcacagcccgcccgatgtacgtacgcttcgctttgcggagggttcccgcgccgcgggctgcgccgtgcgtggtcgggcgggtcgccagcggggcagggggcgataagtgtggcatgggggcgggggcgggggcggccgcttcctccctcctcggctccccgctgggcgtcctggctcgggagccgccgggagtgctaggccgttgcgcccacctggccctggtgtcagggtgaggggcgcctgcggtcttgggccacccttgcgcttggcaaactgaaggccagaggggggttgaccgcggggcactgagttgggtacagggctggggaggaatcagggtctcgtgccctccccaggcatattagggtgggaggggcatggacattgataggagtcccaggcaggagcaggattcgagagacaggaccccccactgggcaccacctgggccctgagtctccctcttcccaccaagccctggccccacctctgagcacccccctccccctccctcaatcttctccccagcccctccctccctcagccccctcccccatctcagtccctctgccctctaaagtccctgctctgaggagactctgcccttttccaggcaccgcccacacttggactggtgtctcaaacctgccggctcctcttcccacggccaccctcctgaggcacctgccagcgtgcctcagagaccccacaccaacacccccaaaactgtccccacccttcctccaagaggggcacagatgcccgaagacctacaggcaggtgcaatgggggagctggcagaggagagagacgtctcagcctgtccccagatggatgggctgggcctgggttggg

SEQ ID NO: 13430 - DNA, 955 bp, Artificial sequence
  DNA replication origin
caaaaacatagacggggttaaaaaatgttgagctttcctttttttccatttgtttctctctctctttttttcttttctttttttttttaaaggtatcgtccaagaataccacccccagtattttttcccgaagacggtttcgttcatggtaaagtctgggacccctctcccatcccccatctcacttttctgcatatgagcaagaactagcctcttttgactcctcaggggtctttttaaggcagagaggcagggatctgaatgcaggtttgagacccgggatgctctgaagtcccagatctcccagggccccaagggtgagggataggatttggggaccatgcttggtgaaaggagtcacaaaatgccgtctccaagaaaactcccagggctgtgccaaactagagtcccatgctgggagggagacaagatgtgggtgcttcagaagctcccgccccaaggctggtggctgggtccccttccccgactgccctatcctggggatgcctagatgctgtggccattttgtctgcattggggagggggtggaggtgggatcattgctcaggactccagggctggagagaggaccagaggtacgaagggacccacttccagccctgacttcagagaacccgcatctctgtgtctcttgggaggccccagaagggtggatgagaagctggcaagaaggtgtttcgggtcctgtgctcttgggactccatgcccacaggggtgggggatggtgggtgcccctcttgtgggttgttaatcctctccagcctctgccatgctaccctcagctacctctgcctgccctcaaccccctcccaagacagatccggggacatcagtgtcatcctccctgcgcggcccaaccaaaacccccagagcccaggagcctggtgcctggtccaggtgggacagtctagagacaggtaaatgtccttcaata

SEQ ID NO: 13431 - DNA, 1384 bp, Artificial sequence
  DNA replication origin
gctcatgggggggtggaatccatgggggtagctcggtgggagggggttgggatccctggagggtagctcagcgcggggagggatcccgtgggcagggatccgctagtggaggggagccctgtgcggggtgggggcgggagtccagctccgggtccagcacgctcaccgtttcccgtgtccgccgtggcctcgctcagagccgggctcgggcccggggccgggggcgccgcggccgctgccggagtcgctgctggagcgggccctgctgagcgagcgcgacgagccccgggggggcgcgggccgggggcgccggcgacccctgcggcggggcgcggacgccgaggaccgcgagcgccgccgcctacgccgccgccgccgccgcctgcccgccccgcccgccgcgcggcctccgcgaccttgggacgacggcgccgagcgcgggctcgggctctccttcccccgcgcgggcggcgtgggtgcggcggccgccgccttgtcacggaccctgggcgagggcgagctgggcttctgacggggagagaggcagacagggcacggaggggggagagggagacgagagagacagagacagagagagaagagaggagacagacgggagagagagattgaaagaaagagacagagacagagacagaaagaggaaagagggagagacagagacagaaagagaggagagagagagagacagagagacagaaaaagagcgagagacagagaaaaagagacggagagagagaatgaagagagacaggagagagggagagaggaaagacagagagaagaaagaaagagggagagagggaggaggcagagaagagaaagaggaagagagaaaaagagcaggagagagacagagtgagagggagagagatgagaaagagagagggcgaaagagcgagggtgagaggagagagcaagggaggagagagggaggagaaggaaaaaagggggcaagagagaaggggacagagacagtgagaagaagagacagaggagagacgggggtgggggaagagaagagagagagaggaagagagaaagagcgaagagagagaaggatggaagccagggagaagttcgagaaacagaaaaaatccagacaggcaggggacaagagtgggggcagagagaggacagagcaagaggagcgagaagttggggtgagagagcgggcgggtggggtggggggagagaaggagagagggctttcaccgggcccgagccgggggctgccagtcccggagcatcgcacacacggttccccgcgcctgccctgcctctgcctctcctgggtgtccaccttctggcctcaacagtgcagctcatgcagggttcttggcatgcaaaacacaagagggacgga

SEQ ID NO: 13432 - DNA, 1244 bp, Artificial sequence
  DNA replication origin
ttggcgagtcccggcgccgcttgcggatgggcgagtagctgcgggagcggcgccgggcgcgggtggcctcggcctcagagtgccttgcgcggccctcgccgtccttgtccctgcggggccggcgcgaggtaagtgagcgacgcggcccggccgctccaccccgccgcccgccccgtcggcccggtccgggcgggcactcaccggctgaggggcttcttgggcgacggcgagcggctggggctgtggggccgcttctccgcagagcgcgagcgagatttggagggcgagcggctggagctccaggagcgggggtgcgggccggggctgcgcgacgagctcttcccttctgggccgccgcgccggccgtgcgcgcccggggacggagaggtgctggcgggccgcgcgcgcgggggccgctccttggccctggaggagggagacggcgcgggatagggctcagcgacccggaaagggggctgggggcggggagggttccctggggcggggcttagggcggaggggcggggtccgtgtagtttgtggtcagttcgcgcggagtgcgcagtgaacgcggagcctagtgaggggcaggggtcagttcagggggagccccgtgagggggcgtgttgggggagatcagtggaggagattgttctgcgggatggggggagagtgatcagtaagcggggagcctcatgggaggagagggggttccctgggggcagtgatcagtaaggggagacggatcagttgtggggaggggtcaggataaccgggggtagctcagggtggggagggagctccctggggggttggcatcagtggagggagaactccgtcggggggctgggatcagtgtggggagggaaactccctggagtttggaggtcagtggagggagggtaactccctagagagagttggggtcgtcgagggagggagccctgtgagaggggagttgagatcagtgtgcggaggaaatccatgggaggatccatggggtccataggggtttggggtccgtggagagggaggagagctccgtggggggttgagatccgtggggggtagttcagtgaggaggggttgggatccgtggggggtagctcatgggggggtggaatccatgggggtagctcggtgggagggggttgggatccctggagggtagctcagcgcggggagggatcccgtgggcagggatccgctagtggaggggagccctgtgcggggtgggggcggga

SEQ ID NO: 13433 - DNA, 1477 bp, Artificial sequence
  DNA replication origin
agcggcccccgcgcgcgcggcccgccagcacctctccgtccccgggcgcgcacggccggcgcggcggcccagaagggaagagctcgtcgcgcagccccggcccgcacccccgctcctggagctccagccgctcgccctccaaatctcgctcgcgctctgcggagaagcggccccacagccccagccgctcgccgtcgcccaagaagcccctcagccggtgagtgcccgcccggaccgggccgacggggcgggcggcggggtggagcggccgggccgcgtcgctcacttacctcgcgccggccccgcagggacaaggacggcgagggccgcgcaaggcactctgaggccgaggccacccgcgcccggcgccgctcccgcagctactcgcccatccgcaagcggcgccgggactcgccaagcttcatggagccgcggcgcatcaccaggtatggagggtcttgggggggccggtggcgcagggctggggccgctgacccggatcagggacagagacctcggcccggggaccttctctgaggatccactgaacctggcacggggatgggggggggtgctaagggacaatgagtgggttctgccagggtagggggccaggggaggagggggctagaactggaggtgctggggtctatcagagagacaggtgcaggaggccacgcagaaggaagggccacggtgggggcctgagggcccatgaaggggagggggctctgtacttgggtctgggtgggccgcagccggcatggaattcagctctgcaagagtcccgccatccctccggagcccctcccgccctccctgcatccgtctccggacaatgatgtctccttttctccttcatctcaaggtccagcctgctgagtggcctgtggtcagcctgggggccaggcggacccctctgcacaggctgcctgggagatgcccaagtgagctggtctggccctggtcagctgtccgtctgtctgcctctctctttctcactaacctgggggatttggaggagggggcacagcagtctggtctctggggcagctgtcagaggagccagccacacctccttgccctacacagctgtggggctgtgcccagggcgtggctggtgaagccattatcagtttctctgctaggactggaagtgtctgggcctgggtctccgggtgacattatggtctgcctttgtggaaatcaccctgaagccctagattaccctggcagggggttggggggaacacaggcaaaaagttctgagcccaactctgccactgccttgctgggcagccttgggagatcggtgtgcctctctgggcctcggttgccacatctgtacaataaccagggtttcgtgagcatcttttcagttctaacagggtatgattatcaaactagtccctcctagtccttggtgatccaggtaaccaagaagcatggggtgggcattaccccagagctcaaagcc

SEQ ID NO: 13434 - DNA, 1232 bp, Artificial sequence
  DNA replication origin
aaggtgaagtgacagagcagatcatggactctggtaccatccaccggcagcagtcccaagcctggtgagttggcatcagcaggaagggggatggggagattcctgtgttcgtaacggctctttgttccccgggcacagtgggtggacaggaggtgggagaggacacccgtagaagcagcacatctggcttctccttgtccactggatgcccaccctcaaagtcttccccggtcccatctgcccgtgcactggccctgagacctctttgtagccttgggggcaaggagatatagccccctccccactggggtcctggggcccgcccctcgcctctcccagtgccaggggggcaccaagctgagtctgtctgggctcagaagcccccgctctcagagctgctccggctgtggtagctgggactgggggtcctcgaggggctgcgtgtccggctgcgggtcccatggctgcgactgctgtagctcccgtggctgtggccggggctggggctgcggctgtggctccgggtcgagtagtcgctgctcaagcagctggaggaggaagaggggctgggccggtagtatggaataggacgcttgcgggcgctgccgggaagaaaaagctgattacaggccatcccaggccccgagccccatcccagcagcggccagggcttcctgcctcagtttcccctgagccctggccttagagacacctgccttctccaaatggaatctgacggtcattggttacttgcaaattccatgttgatcattttgcttttcttcacctatctgcagggaaaggagaccatgtctctgcccgatccgaacacctgctaataaatacttgttgaggctgggcgcggtggctcacgcctgtaatcccagcactttgggaggctgaggcgggcggatcacttgaggtcagaagtttgagaccagtctggccaacataatgaaaccctgtctctactaaaaatacaaacatttgccgggcatggtggtgtgcacctgtaatcccagctacttgggaggctgaggtgggaggatcgcttgaaccccagaggcggaggctgcagtgagtggagattgcgccactgcactccagcctgggtgacagagtgagactccgtctcaaaaaaaaaaacttgttgaatgaatgaaacttgcaaatgtggacagctcccatcacccaagctggcgtgtaagtgtctgtgactacgtcccagccct

SEQ ID NO: 13435 - DNA, 802 bp, Artificial sequence
  DNA replication origin
tactcctgtctctggggttctctgggagcctgtgtttagggcccagtctcttcttccagtgatttatttgctagcatgtttatctctccccaaagctctgagcttctggaggccaggacatgtcttccttgtctctgcatcgcccacgtaggccactttgaaatgtttgttgaatgagtcatcgagtgaaggaaggaacccgcagaggaacggttgcagaaactttgggggaggcctgggcaccaaaggcgaggcgtggtggcggaaagccgacactagagggcgacagagagtaagggaaaaaatgcagccaggaccaacaggcttggagcagagagatgcctgggccagggctcgtcccagcctggaagccccaagccttcgtcctccatgcctgccctggcttcgtggggaaggggtggggagcataccagccccccccccgccccaccccgtctgaactcagtcagccgactgaactctgctctataccctggggaaagggaagaataggaccaggacggccggcaggaaaacaggaaactccagtcccagagcagcgggcagaagaccgtccccaggatgtgggcacttctcgccagagggtcctgagcctggggcgcactcttctggtttggggtaaacttggtcctctcgtggtctctctctcttcagatagggcccaggggagcccccactccataccacgtttttccttccaacacatacagcagccaggaggccggacagagctttccggtttcctgttttcacaactgtattttcccctttctccttaatc

SEQ ID NO: 13436 - DNA, 2459 bp, Artificial sequence
  DNA replication origin
ctataatcccagctactctggaggctgaggcaggagaatcgcttgaacctgggaggcggaggttgcagtgagccgagatcacgccattgcactccagcctgggcaacaagagcaaaacttggtctcaaaaaagcagcaaggtggtggggggtgatattgggggtggtgtggacatgctccaggccctcgcctgcagggtgccacccttcttagggaacctgggaaagtcagactgtgggctgagaaaagaacatgggagtatttttttttttttttttttttttttttttttcttctgagacggagtcttcctctgtcgcccaggctggagtgcagtggcacgatctcggctcactgcatgctccgccttgaacatgggagtatcttgctacagcctcagactctgggtccctcaaatatttgaggaccttgggactgagctccaaagctcccatctgttttttgttttttttttttagatggagttttgctcttgtcccccaagctggagggcagtggcatggatcttggctcactgcaacttctgcctcctgggttcaagcgattcccctgcctcagcctcctgagtagctggaattacaggcatgcaacaccatgcccggctaatttttgtacttttagtagagacggagtttcactgttggccaggctgtctcgaactcctgtcctcaggtaatccacccgcctcggcctcccaaagtgctgggattataggtgtgagccaccgcgcctggtcccccatctgctttctacctcaactttccctgggcctggtgagagggtggcagctagggcaagggcagacaagagagaggggaactgggcccttggaagcctgtctacacctggagggaggccagctggaaataaacacaggcaacaagagctgctggcccagccagcagcacaggtctgagcccgtcggttggccagggctctgcccaatctccccaccccgagactctgcgggctccgttctcaccccatttcggcttgccagttcccttgtgactgccaacagggatgccctggcctcagggagtgtggcggtgacagagatctcaaagcttgccaggtccactgtggtgtccttggggtgtgctgaagccgatgccaagcttttgacatagtaatcctcccatcagctctgaggtgcaattacctctgtgccccttcacctgggacccaacctaggtgctcctgagaactcaagcctcaggtgcttctcttatttcctcctccttccccaccttacagttttaattgcaatcgtgaccttgcaatcatgaccttttttttttttcttttaaagatggggtctcactctttctctctgggcttttggttgttttgagacaggatcttgttctgttgcccaggctggagtgcaatggcacgatgttagctcactgtacccttcacaactcctgggctcaagcgatcctcctgcctcagcctcctgagtagctgggactacaggcgtgcagtaccaccctgcctaatttttattttttagagacagtcttactatgttgtccaggctggtctagaactcttggcttcaagcactcctcctgcttcaaccccccaaagtgctgggattgtaggtatgagccactgcgcccggccctaagacctctgtctttatggatgtgagtcagcctgtgtccagcaacctacaccagtgtacccacatggcccagcacgggcctgagcaaagatgactcctgaaagccagcaaatggcaggtgcctgaggcttccttccacaaacaccagggcctgggccagtgacaggtggttgctttgaactttatttgagaaaaacagaagataaatgtatcaaaagaacacacaggtggcgggggaggcacagccagtggcggcagcaggggtgggcatccgggctaaggctttacttggcggcagtctcatcggattttgcagcttctgggcccccaagctgggcccgcgactcgaaggtgactgggatggtgatctcgttggactgcgtggctagcttgggcatgggggcctccacggtcagtgtgccctcaggggacagggaggaggaaacttgggtggggtccacaccggggggcagcctggacgtgcagagaggaaaggcaagcgttacattacacaccgggtgggtccctgtgccctcttccctgaccccacccccacgccacccacccaccccgacctggcgccaggactcacgtgtatttccgcgtgaagcaccgggagatgtagccatgctcgtcctgccgctcctcgtgcttgcctttggggggaagagggaaatcagactgcgggggaggggactgcctttcggccccgctaggccagaggccccacctcctgcttggaagcagccaggactgcaggctggtagggattaacagagggggttggggatgggggcgtgcccgccgg

SEQ ID NO: 13437 - DNA, 1393 bp, Artificial sequence
  DNA replication origin
tcaagaggttgcagtgagctgagatcaggccactgcactccagcctgggcaacagagcaaaactttcaggaaaaaaaaaaagtgtccctgatctgtaaatgtgtagtggaaactatagaaaggcactgcaggctgggcgcaggggctcacacctgtaatcccagcaccttggggggcctaggcaggagatttacttgacaccaggagttagagagcagcctgggcaacatagcaagaactcatccctgcaaaaaaagaaaaaaaaaattagccacatgtgctggtgcgcacctgcaggaggatcacttaagccgaaaagctagaagctgcagtgagttatgatcacaccactgcactccagcctgggtgatagtgcaaaaccttgtctcaaaaataaataaatttaagaaaagcaaagaaaaggtgtttccggctgggcacagtggctcacacctgtaatcccagcacactgggaggccaaggcaggaggattacgaggtcaggagtttgaaaccagcctcaccaatatggccaggcgtcgtagcacgcctgtagtcccggtgagtccagaattcgtgggttcttggtctcaccgactcaaagaatgaagccgaggaccttcacggtgagtgttacagttcttaaaggcggcgtgtcgggagttttttccttctggtgggttcatgctctcactggctcagaagcgacgctgcagaccttcaccgttgagtgttacagctcttaaggcggcgcatctggaattgtttgttcctcccggtgggttcgtggtctcgctagctgaagagtaaagctacaaacattcacgtcaagcgttacagctcttaaaagcggtgtggacccaaagagcgaaacaacaaagcttccacactgacgaagaagaccctaagtggcttgctactgctggttcgggtagcctgcttttattcgcttatctggccccacccacgtcctgctgattggtccattttacagagagccgactggtccattttacagagagctgattggtccgttttgacagggctgattggtgtgtttacaatccctgagctagacacaaaagttctctacatccccactagattagctagatagagagtgtggacacaaaggttctccaaggccccaccagagtagctagatacagagtgtcgattggtgcattcagaaatcctgagctagacacagggcgctgattggtgtgtttacaaaccttgagctagatacagagtgccgattggtgtatttacaatcccttagcttgacataaaggttctccaccagactcaggagcccagttggcttcacccagtgaatcctgtatgggggccgcaggtggagctgcttgccagtcccgtgctgtgcgcccgca

SEQ ID NO: 13438 - DNA, 1651 bp, Artificial sequence
  DNA replication origin
catgtccggctactttttcctttttttttttttttttttgtagagaagggatctcactatgttgtccaggctggtctcacattcctaggctcaagcgatcctcccgcctcagcctcccaaagtgctgggattacaggtgtgagacactgcgtctggccaagaccaagtcaattgcccctgtttgcgctctacagggctcagaacctgggcagagattcctgaaggttctggactgggcagtgttggtgcctgaggaattcatcctctctgggagggcaccagggggcagtcgcttactgtcctatctgggcctgggagtggggcgatgtgggtccgcaaaccccagggcgtcctctagggggcagtctcgggcctgcctgcgcacagctccatcctccgtgtgggaggggctgaggcttcctgcctgatcttgacttgagcccgggtggggattgatttatctttctcccacccagagcccactaccccctgctgaggggatcggtctgtggggctgctcccagggttcaaggctttcaggctgggcagacctggagaagaggggtctttggggccacgggaggaattacaaagggatagtttgggcatcagggttcagagacaggtggggtggaattcagagaggggaggggcctcaaacaagggaggggagagtggggaagtgaggaagtgcagtcatggggtgggagctcagggaagacgggtgaactccaagaaaggccaggtgaggcggctcacatctgtaatcccaacactttgggaggtggaggcaggaggatcacttgattccaggagttcgagacctccctgggcaacatagtgagacccgcatctctacaaaaaattagaaacttaccaggtatagtggcgcacacctgttgtcccagctactcggaaggctggacaggaggattgcttgagcccaggagttggaggttgcagtgagctatgatctcactagtgtactccagcctggagacagagtgagacctggtctctaaaaaagaaaacaaaaagaaaagaagaagccaagcacggtggctcatgcctataatctcagcacttcaggaggccaagacgggcggatcacctgaggtcaggagttcaagaccagactagccaacatggtgcaaccccgtctctactaaaaatacaaaaattagctgggtatggtggtgcacacctgtaatcccagctaatctggaggctgaggcacaagtattacttgaacccattgggaggaggctgcagtgagccaagatggtaccactgcactctggcctgggcaatagagcgagactctgtctcaaaaaaagaaaagaaaaaaaagaaagaaagaacggatttcctgtgcgaggagggacttggtgttgggaggggtacagtcaggtagtggagctgagtcagggagggacagaatcagtggggcagatgggaactcacgaggggtccagtgagggcatgagggccaagagagggtaggtgaacccaaagaagggagtgatttcttttttgtttgtttgtttgtttgtttgtttttgttttgagatggagttttgctcttgttgcccaggctggagtgcaatggcactatctcagctcaccacaacctctgcctcctgggttcatg

SEQ ID NO: 13439 - DNA, 1487 bp, Artificial sequence
  DNA replication origin
gcggtcaacccgccatcgcgacagggcgacgaagccccgggccttccacgccaaggaccgcgtcttcggaggggcagggagcggcgggggaggggaggagacactcacgttcttcatggccgcggccatgtcgtcgtagcgctccgcctgctcggccagccgggctttctgcaccagttgctcgcggtccaccatcttcgcggggctgggtctggccggagaaggaggaggacactggggcggcctgaagggcttggagggcgcgactggagcccaagtgccggagaggaccgacccacagagcgagcagctgaggcggcggctgcgcggaggaggcggctggagctgcgaccgcgggaccgggcgcgaggcggctgcggctgctgtgcgtgccactgacggacaaccccctgcggccccgcccacgccgcatgacgaaggcaggccccgcccacccgtccgcaagccccgcccatgccccgcccgagcccggccgcggctagaactccccgctccccagctgggctcactgcgcgtcttccgggcaccccgtcctttcccactgcgcccccactctccccttttttcacttcactccccagttccctcaccccagcttctccagtcgcccccttacgcctcccccttgagcctcccgccccgccagccctcggacgcatgggcccctgggagttgtagtgtaacctgcagtgcactgaggcgctgaggagaccaaggacaaaggggcggtcaagactacaactcccagcggacatagcgcgcaggcgcaggaggacgggggggggtgcttcgaatcccgaggccgctggggacccctggcggggatcagggctgcatcagtccctgcgagtgctgattcaccgccccgccccatattctccgggaaattacgagaggagggggcaggggcctcagtcctagaccctgtttccgagatcacgtagcaggtcgtggtgggggaaggacaggaggcgcgtccattgtagatccagactctcagtgtggtgcctgcccgcgggatggccgaattaaggggccagaccctggggactgtcacctccaccccctacgagcttccattaaaccccccaccccaccttgaggctcttgggcctgaataggtgaaaacatggacgaacgacaaataccggctggccacagtggttgatttccagaaaggatgcagctgtctgctggctgaccctggagaaccccttcttcctctccagggtggagtgctaaagattgagttcagctaccaggagcctactccacatctaactgggctgcgtctagggcttggttgtccagcccttctctcccctcctaagacatacatacctactgaggtcacgctgatatattctcgttcatattattccacatagcttgcagatagcatgggtttttttgctttgttttgcttttttgtagagacgggggtctagctttgttgcccatgctgg

SEQ ID NO: 13440 - DNA, 1399 bp, Artificial sequence
  DNA replication origin
tttttgagacagaatcttgctctgtcgcccaggctggagtgcagtggtgtgatctgggctcactgcaacctctgcctccgtctcaaaaaaaaaaaaaaaaaaaaaagatttggagccccagctgggcacagtggctcacacctataaccccaacactacaggaggccaagatgggaagatctcttgagtccaggagttggagaccagcctgggcaacagagtgagaccccgtgtgtataaaataaaaaattcaaaaaattagccgagtgtggtgagccacacttgtaatcccagctgctcaggaggctaaggcagggggattgcttgagcctgggaattggaggctgcagtgagctatgattgcaccactgcactccggcctgggtgacagagcaagacccaatctcttaaggaaaaaaaggaaaaaagatttcaaaacaactgttttgaacagtaaattaatggtcagatgaaggagggaggagctgatactggtggtggctgcgggcaataggaaggcttcattaggctgggagatgcctgggacggtttaattgcaggagcctagaagagagtgaggctggagggttagggggtggaggtgggagggacaggtggataactggaaacggggagatctggagcactcagggaggttccactgaagtgggaggcgagtgaatggacttctgagcagagagcagacaggtccctgggaacctgtttctctgagaagtgtttctctgaagtcatctgctgagtcatggaggaggataggaggaggctggagaacaggctgaaggtttccaggagcctctggagagggtggggaggacgctggggaaggactggccgttggagtaccagctgggcctggagaccagaccctgagggccccccatctgtggttttctccagggccctcagcagcctgggctaggagctgagaaagccaaggtcagaccacccacagcaagcagtggcccactgcggccatgagactgggggataaggagttcaatataccgaagaagtgagtgctcagattggccaaggtggagaaaggaaagaaggaggcagtcaggggctggaggcctggggtaccctgaagaataggtagagggggacaatggagtagaggtgccagagcatcaagagagtagagtggctgggcacggtggttcacgcctgtaattccagcactttgggaggccaaggtgggcagatcacgaggtcaagagattgaggccatcctggccaacatggtgaaacctggtctatactaaaaatacaaaaattagctgggcatggtggcacacacctgtagtcccagctactagggaggctgaggctggggagttgcttgaacccaggaggcagaggttgcattgagccgaga

SEQ ID NO: 13441 - DNA, 1159 bp, Artificial sequence
  DNA replication origin
tgtgcgccccgcaggtggacggctgcgactggtgggcggcccgggtccgtgccgcggccgcgtggaggtgttgcacgccgggggctggggcaccgtgtgcgacgatgactgggactttgcggacgcgcgcgtggcctgccgcgaagcgggctgcgggcctgcgctgggcgctacgggactgggccacttcggctacggccgcggccccgtgctgctggacaacgtgggctgcgccggcaccgaggctcgcctgagcgactgcttccacctgggctggggccagcacaactgcggccaccacgaggacgcgggagcgctctgcgcaggtgaggctgacagcgaaggtgaggctgacagcggggccgcgcactgcggcgtgggaggggcggggcggcgccacgcgcgaggcctctcttgcggcactgccgcccggggagcatgcgcactccgcagaggggcgccgccccgccgtgcgcccgctctgcggctgcgcggcggggcgaggccggaacggagagccttctgcagtggaaaatggggcggggcctggtgagcgccgcgtggtgcagctgtgaggggcggtgtccgaaggtcagggctaaggccgatcccagttcgagaaaggcatcaagtccgtaaagggtggggccgtttgctcccggctaaatctagaccccgcaaaactctattaagcagagagtggatcacccttaccagagctagcgtgtgacctttgggcggagtcagtggaaaggggtgtttgcagtttggcagaacattgtgaaattcattgattgctgtgggaattgatatcttcaccctcatttggtgccccagggctagtaggccctacttcccatagttttggccacagagggttctgttttggggccaaggtttggagaggcacaacacctatttctttttttttttcttttgagacagagtcttgctctgtcactcagactgggctgcagtggcacgatcatagttcactgcagccttaaactcctgggctcaagctatcctactccgctcaacctccagagtagctgggaccacaaggggcatgccaccgtgcctggctaatttttgaattttttttagagatgaggtctcactgtgttgcccaggctactctcgaactcctggcttcaag

SEQ ID NO: 13442 - DNA, 1327 bp, Artificial sequence
  DNA replication origin
gcaccatgtatgtactagtaaaaactagttaaaattaagtcagtaattaatgaaggaataagtcaatgagtgagcaggcgaaggaagaaaacatagaccggagcaggtgcgccttgggttgagcccttccccgctgagccccgccttctgcccgcccctgggccctaccgggactacatttcccagaaggccgcacgccccgggcatgcgcagcggctcgctcggaagctgcgacgccgagtttcactctggctgccttctcctgagagtcggagccacagccagagccctgcccaggccgagccggagctgcagcccgagcgcggtggtgccctcagccccgtcctcttgtcctcctcagcctcggtgagagggcgggaaggccacctgcgcgtcgctagggctgcggtcccaggggcgcggggtggcgcggggagccggagcctagctgggaccggaagggggcgggcgtgggtgtgagggggaccgacggccggggcggcggggacacccgggggtcccgggagatcgggggtgtcggggggatcggtctccgggatcaaggtcctgagggcgagagttgggggacttgggaggcgccggcagctttggacgggacagggtgccgggtgcgaaaggggacgttcggatgaaggctgaggggctcgcaggcggaggggcgcggttccgggtcgctcggaaggcgcgcaccccttcccaaagtacccagaggagggggtgacgagattgccaccggctccctgacgaggggttggtcctgctggggtctacccccaggtgaagggactcactgggccgggggttgtactttggaggagtttgcttcctaactctgcttccctgctttcctgtggggggtcttcccaggagttcctggggccctgggtcactttttggggtgcgtaaggggtgccgaaaaagatttagaactcggttcccttttctggagctgcgctttcatcgcgactgtctcagccagctgccctcctcctccaagctggctccacttctctaagcgccaacagcgatggaaataaatagcatgtgtacagacgcctggacccttgagaaactcagaatatttctgcatgccttcctagctcctctagcgctctagaaggtagactttctggtagccaccatccgggcttaagccatccggatagcaagccctctgattcggttgctctgtgaccttaaatatttaccctctctggtgtgttgatttcctggatgcttagctgccagactggcttatgaagtccttttagagttttctgtaaaagggctcaggccaggcacggtg

SEQ ID NO: 13443 - DNA, 756 bp, Artificial sequence
  DNA replication origin
ttcgaggcagtggagtggagggggaggtttggcttgaaacattcagaggcatgagccgtcaggcggggggttgtgaggggggattgggggtagactgaggcctgctggagtgcagccagtcacaactgaggagcagcctggggcttggcgtgtgtgaattcatttcgtccttaaatcactgaggtggaggcttttgttcccattttcattagaggaaactgaggctcggagaatttaaaaattctctgccagcccttggcagagctgagacacagccccgggccttcttgcctatgacggttcagtgctgctgagtctagggggaggttgggagggggtgatggctgtggagtggccgttggagctgttccggggcagtgggatttggctgtgggcctcagaagagcagtcttgggtggaatggggtgcccctgacccctcgtgggagcgtgtgtgccacagagaccgtgggcaggactgaagagaaaatgaaggagcggccagagaggtgggggcaggagggagaggagctggagtggggcaggggagacagaatgagcaagacacactggccagaaagtccctgcccactgaagtcaccgtgcggcgccgtagggaaatcacagtgtaccgtgtgtgcatgtgcggccgtggtggcattggagacaggttgtgggtaaacagacggggcccccacacggttcctcatggcccagctccttccagttctggggctctcgcaagccttcgtggcca

SEQ ID NO: 13444 - DNA, 1156 bp, Artificial sequence
  DNA replication origin
cagaggggcttggcgaggtctaggaaatactcgaagcgcctggcatgcggcaagggtggcttccgatcgtgtccgacctccagcccacaggcgaggaggtgggctcagggaggggtgggcctcgagctcctgcccccagcccagggctctgcacgccctgcccttcccctgccctgggggaggagccagactcgttggcagcccgggctggcaaccttctgtggcactcgggtttacctgggaaggacacgctcttggtgggtcgcctggctggccccttctgagacacgtggctaatggaaagctcccttctgctctgaaaagctgcaagggctggggtgggtgggcgggggtgggatgctgtgcccggcctcaccagggctgggcagaggcgaggcccaggctcacccggagatggctctggagttggcaggcttttccaaaggaaaaggcccccctcagcctgagtagggcattccagccacacggagggcgaccctgagctgggggccatcgttctggtctggcgttctcgccaccgtgacaggatttgggttcgggcagtctgtatgggtgtgtggaggtgtggggtgtgtggggtgtgtagaggtgagggtgtgtggggtgtgtggaggtgagggtgtgtggggtgtgtggaggtgtggggtgtatggaggtgtggagtgtgtgtggagtgtgtgtggaggtgtggggtgtatggaggtgggtgtgtggggtgtatggaggtgtgaggtgtgtggaggggtgaggtgtgtagggtgtgtagaagtgtggggtgtgtgaggtggggtgtgaggtgtgtggaggtgggtgtgtggagctgtgtgtggtgtgtggaggtgtgaggtgtgtggaggtgtggggtgtgtggagctgtgtggggtgtatggaggtgtagggtgtgaggaggtgtggaggtgtggggtgtgtggatgggggttggggggtgtggtcttgccagcagtttccctccaggtcacagcagccatgccatcacagcaattccagcttggttacatattcgtctttcccgtttgagatcagggaaccgaggctcagaggtggcatgattcgttcacagcaagagaactagaattaaacaaaccgtgccgactccagcctccaccccaccacg

SEQ ID NO: 13445 - DNA, 897 bp, Artificial sequence
  DNA replication origin
agggcagcctggacctcacatagcctcgagggaggaggagaggccatcaccttccagcaccctgccgggtggggtcaggagctcctgagagtcagagtgtgacaggcagggaccgggggctgtgttagaccaggtgaccacggaaggctggagcagtggtgtctgcactgagacatgaatagggactttgtggctgcagagaaggttggggacgagccttccaggaaggcaggatagtgggagcccgtggtgtgggtgtgaagacagggtgccccccaggccagcaccaggggtagagctggttctgagcgcccagcgaagccacggaggtggagctgctgatggagctttggaaaagctctggccgtgtgagaatgggcttgaggtggcggagctggaggcggggagagggcagggagagggcagggaggcctggattccaccagggagggtgggtgggcgggcgctcgtccagcaacggctgtggaagcagggaggactcgagcatggtgcctgggcatcaggaccaaacggatggcagtgccaggcactgaggcggggtgggctggagcccaggttcatgtgggatcctaatgtactatccagtgggcagttttggggtccctgcagatggggtgagtgccagggagtggatgagtcacctgggaggggctgggatgggaagaacatggtgccaacccgtgcctgctcactgagcccctctcactctccgtcccctccttcctcttccccctcctcctccccgggcaggtcctagagctcctgaaggtggcctggaagaggcggctcatcttcacagtgggcacgtccagcaccacgggtgagacggacaccgtggtatggaacgagatccaccacaagacagagatggaccgc

SEQ ID NO: 13446 - DNA, 1373 bp, Artificial sequence
  DNA replication origin
gtaagagcgggtaggagccacctctcctgctccctgcctaataccgacgagactgggtctgaactcggcccccgagtttcctgccagatctgcccgtggtgggggacaggggcctagactttggggaagctgccccctcccaccttgactaagatcccgcctccccaaggtgcccacctgctcctcctgggccttgcccggccccagcgggggtgagcactgttgctgactctacagtggaaggagcccgggcttgcaaaggggaggaccggggccggggacccctccctggaaagatgctagagagagcatccctggtcccagcaatgcgtccgccccaagcacagccccagtcccagggctccggtggggaccacccaccgatagggtccagggccagggaggggcgcgttgcagaagggctgctggtggcagccgtggtcatggcccacccgcagcacgggggcgcctccgctgcccgccatggggtcgccacagggcagctggtccggagacaggggcagcgtcatgtagtggccatcggtcagcagctgtggggaggccggaatgtcagccagtgtctccgggttctggaagcccctggaggctgcaggaggagagaacagatggaggtgggaggggagaaagcagctttgtccttatgagtgggggttctgtgttcgcccagtctccagccctgaccccccatgccacctcctccctcagggcccccagagatagtccagacccagtcgactttgttacccctgaaggggagcttccctctggccttttgtccccacccagagccaggagtggggagcagcgggcagtcccaacctgcccagccccagccccagccccattgcagtgcaccggccctgccccacaggaggccacatcctcccaggtcgcagcctcggttccctgtccaaaggaagaactacttggattcagagaaagggttgcagagcccttgacagctgacaaacccaccactagcactactcccgggatttggtgttcactacgtgtgtatttttcaatacacatattacccctttagataaagcccaattcatccacacctactctcccaaaggcccccacaggggctcaatcattgaaggcgcttgctggtgaggggctcctagggcccaccactctcctcagccgtcaccctcacccaggccccacagcagtccccgtaccattgctgaaggccaccacgagccagacggtatcgctggcgctggcaagcccatcgaagacacagcgcggctgctccagggagaaggtggtggctgtgaccttcccttccaggtcccaagctgttatctgtggtgtgtagggcaccagctctgtggccacgg

SEQ ID NO: 13447 - DNA, 1320 bp, Artificial sequence
  DNA replication origin
cctgaccctgacctcctccacaccctcttcctccctcccagcaggggctgacacaggctgactccctacaggaggggggaggctgtctgtgcccacaatgtggcaaacgcttgcggatgggccgagatggtgcccctgccgagggggctggctgggtgccccactcccccagcatgaggttctgttgggggctgggcccgacttggacatggcctccaggcccccagccctgtgggagcaggggtgtggccagctcagcagaggcggcccagagagatcgtgagtccactgggggcagcgcccctcctgcccagcgctaccttggtggagagtgatggggtctgaccacttggtctcagccctgggtgagcccctggtgtccatcaggaggaacttcaccctggggatgggaggtggtgggggaggaggggagagcttcagaggctgggaccaccctgggcagggccaagccccaggcagctcctctggggccctcccatggatgtggagtgggggtgcccgtcaagagcagcagcccatggcctggccctgctctgagaatcccctgagatgtctccagccacttggcctgtgccaccacccctcatccccccgagcaattgctctccagacaccagacctgggccggggatgctggtttaggggccctggttcctaaatgtcacaagccaaaagagcaggtgaaggtggcttagcagggcacatggggcaggggtcacaggcctcccagaggggcagcagtagccgggggcagggggctcaatcaccagcagcctgaggacccagggcaccaggagccccgcagagggcctcggtttgtctctttgcagggctgggagctctgcaaggcctgggaagcggggaaggacctggcaggttggcattgaaaagagtggctgcgggggatggggcggggcatggagctggaaggctgagccagggtgaggcagcggggagggcagagggtggacctggagagtgggtgagagggcagaagggggctgggcggagcggggtgctgttccagcctcaccacgccctgccttcccggcttcccctgggcctggtcttcctgaggtcaccccgcctcctcctgtgtccggacagtcctgacctggacacactgcctgcttccccatcccggctccaccccgatgttggcaggccacttgacctcctgtgcctcagtttcctcatctgtaagagcgggtaggagccacctctcctgctccctgcctaataccgacgagactgggtctgaactcggcccccgagtttcctgccagatctgcccgtggt

SEQ ID NO: 13448 - DNA, 1218 bp, Artificial sequence
  DNA replication origin
acccccactccacatccatgggagggccccagaggagctgcctggggcttggccctgcccagggtggtcccagcctctgaagctctcccctcctcccccaccacctcccatccccagggtgaagttcctcctgatggacaccaggggctcacccagggctgagaccaagtggtcagaccccatcactctccaccaaggtagcgctgggcaggaggggcgctgcccccagtggactcacgatctctctgggccgcctctgctgagctggccacacccctgctcccacagggctgggggcctggaggccatgtccaagtcgggcccagcccccaacagaacctcatgctgggggagtggggcacccagccagccccctcggcaggggcaccatctcggcccatccgcaagcgtttgccacattgtgggcacagacagcctcccccctcctgtagggagtcagcctgtgtcagcccctgctgggagggaggaagagggtgtggaggaggtcagggtcagggtcggggctggctggggaggcagccagcttgagttctgagcagaccccaaggggcaagcgtgaatgtaccaagcccagaagtttcgagtgccacggcccaggtgtcgggggtgggggtctcctgggagacggcttcagaggtcagggggtgtggggtggaagtcttgtcatctgaaggccttgactgctgggctccagggagcagggcagtggatgagcacgtgggtgggagcagcctagaaggtaggagcagggcggaggctgtggtccaggctggcagagaacagatgctgtgccgtcccgaggaagagggacggggggtgggatcaggggggcgcctggggatatgagacagccagaccttgaagctaggccagcgtgggtggggagggagcgagggaggagatgacagccagccctggggtcgaggggcagcccctctgagcagctggtgtgtgtgcagggaagacccccggatccatcgacacctggccagggcggcgaagtggcagcatgatcgtcattacctccatcctctcttctctggccggcctcctactcttggccttcttggcagcctctaccatgcgcttgtgagtggggacaccccctcgggcccctctcccacccagaacccctctgttgaattggtcccagtgtctggaagccctccaggcatgccatggggtttattttatttt

SEQ ID NO: 13449 - DNA, 1158 bp, Artificial sequence
  DNA replication origin
ctggttcccaggctttggcctctagtggacgagaatcaccgagtctgcggggctagacgctgaccgcccgggccagcacctaggcgggcgggagctgtgcggcccagggttcgcgcgggccgggtagaggctcgagccaggacccccgagcgtgaaccccggagccggcggcgctggggccagaggggccgggcgggaggtgatggcggaggcgaaggggcgacgggacctgggcctggcccgtgtgtgtcctcagaggcctggcgccggccgtcgctgtacggtgagccccagggaggcggatctgggccccgagaaggacacccacctggatttgccccataggcccggcccgggcccctcgggagcagaacagccttggtgaggtggacaggaggggacctcgtgagcagacgcgtgcgccagcgacagcagcccgccccggcctctcaggagccgtggggcagaggctgcggagccccaggagggtaagtcttgggtttttgggcccggagcgagaagggcctgggtgaagtcaccgtgttttggggaccttagagtgtggggcagagggagggtcccgattgcttgctggagagacatgtgttgggttcgagggcagggtccggctgcaccgaacaggcgctgcatgggaagatctgggaggacgaggcttagggaggcgtggagggtgtcaccaccctcagctgcggacgtcgtctccactccccgctaacccctaacagtccttcctcctcctctccgtgctccagatttcgaccgcctctaaatgtccgtcagcacttctattctctcacttaagtgtctgctgatcccccccttagatctgccctgggagaatcgtagtaatgcaggaacagtctgcagggattctctcctgctgcctcagttgctaggggaagagactgggccttagcaggtgggtgacttgaccaggtcaccggctttgtgggtagagctgctcatagtagaacccaggagacttatctcccaggccagtgttatttctcccgtatcctagttttcttaatagaagattattaggtgccacaataactaagttcagttagataatttagaaacaaaaccatattttatacacattcatttcatttctgagagctcacctactcaatt

SEQ ID NO: 13450 - DNA, 1013 bp, Artificial sequence
  DNA replication origin
gcagttcggcagggtcaggtccttcgagcagggtccgcggctctaggaggtttccgttggctgtcgacttggccggaggcgaagcgaacagtgttcgccgatgtcgcgccttctgaacgaaggaggacaaggggcgcgaacctcggggctcgcggctcagtccccaccaggccgcggtagtccccacggccagccaggccagcgcagccgcagcaggcacgaggtacagtaggaggccgaccagcgacaggccgagaagcgccgccccggccggccctgacactcgctatcggccgccgccgctcgcctgctccagccgccgcagccgccggagacatcgcggctccgcgccgcggaggagacttaaatatcccagcgtgcaccgcgccacgcgtcgcgtcatcgcgcgcccgccacgtcatgcgcgcgcgactcggggagacgctacagcccggcagctcccgagacacagctgttttggaaaatgctgcctgccttcaacgcctgtttctgactcttgcggtttcccgcatggctcccagcgagacgatcccgtccgggatcccatccggctcccatccggaggcgatcccgtgaaaggatcgcgtccaaaataaaagggcccgagacctatgcttatgtaattcctaatccgtgatcttttctaggggctgaactcccctccagcacagcctgttaccaggtgcttttcacaaacgccactggcggctgagttttcccccccacttccatttctactttacaagttgataacgtgggacgattacctaccaaatttcacatcatggcccagacatcgggtggattttgaggctctgtgatcgatttatacctatgctaaagttatcggtctgagaaagtagattagtggttgcctagggctaaggagtgggtttgggggtggggaatagaaaatgactgcttatgggtataggctttctcgtagcagcataaacatagtttaaaattagatcgtgttggcggttgcacca

SEQ ID NO: 13451 - DNA, 1173 bp, Artificial sequence
  DNA replication origin
tagttaaaattaagtcagtaattaatgaaggaataagtcaatgagtgagcaggcgaaggaagaaaacatagaccggagcaggtgcgccttgggttgagcccttccccgctgagccccgccttctgcccgcccctgggccctaccgggactacatttcccagaaggccgcacgccccgggcatgcgcagcggctcgctcggaagctgcgacgccgagtttcactctggctgccttctcctgagagtcggagccacagccagagccctgcccaggccgagccggagctgcagcccgagcgcggtggtgccctcagccccgtcctcttgtcctcctcagcctcggtgagagggcgggaaggccacctgcgcgtcgctagggctgcggtcccaggggcgcgggggggcgcggggagccggagcctagctgggaccggaagggggcgggcgtgggtgtgagggggaccgacggccggggcggcggggacacccgggggtcccgggagatcgggggtgtcggggggatcggtctccgggatcaaggtcctgagggcgagagttgggggacttgggaggcgccggcagctttggacgggacagggtgccgggtgcgaaaggggacgttcggatgaaggctgaggggctcgcaggcggaggggcgcggttccgggtcgctcggaaggcgcgcaccccttcccaaagtacccagaggagggggtgacgagattgccaccggctccctgacgaggggttggtcctgctggggtctacccccaggtgaagggactcactgggccgggggttgtactttggaggagtttgcttcctaactctgcttccctgctttcctgtggggggtcttcccaggagttcctggggccctgggtcactttttggggtgcgtaaggggtgccgaaaaagatttagaactcggttcccttttctggagctgcgctttcatcgcgactgtctcagccagctgccctcctcctccaagctggctccacttctctaagcgccaacagcgatggaaataaatagcatgtgtacagacgcctggacccttgagaaactcagaatatttctgcatgccttcctagctcctctagcgctctagaaggtagactttctggtagccaccatccgggcttaagccatccggatagcaagccctctg

SEQ ID NO: 13452 - DNA, 825 bp, Artificial sequence
  DNA replication origin
tagggcggctggtgcagagcctgacctcagacctgggggcaccagccaaggcctgaccagcttcgaggcagtggagttgagggggaggtttggcttgaaacattcagaggcatgagccgtcaggcggggggttgtgaggggggattgggggtagactgaggcctgctggagtgcagccagtgacaactgaggagcagcctggggcttggcgtgtgtgaattcatttcgtccttaaatcactgaggtggaggcttttgttcccattttcattagaggaaactgaggctcggagaatttaaaaattctctgccagcccttggcagagctgagacacagccccgggccttcttgcctatgacggttcagtgctgctgagtctagggggaggttgggagggggtgatggctgtggagtggccgttggagctgttccggggcagtgggatttggctgtgggcctcagaagagcagtcttgggtggaatggggtgcccctgacccctcgtgggagcgtgtgtgccacagagaccgtgggcgggactgaagagaaaatgaaggagcggccagagaggtgggggcaggagggagaggagctggagcggggcaggggagacagaatgagcaagacacactggccagaaagtccctgctcactgaagtcaccgtgcggcgccgtagggaaatcacagtgtaccgtgtgtgcatgtgcggccgtggtggcattggagacaggttgtgggtaaacagacggggcccccacacggttcctcatggcccagctccttccagttctggggctctcgcaagccttcgtggccaggcctgac

SEQ ID NO: 13453 - DNA, 2943 bp, Artificial sequence
  DNA replication origin
gcctccgcttagcagaggggcttggcgaggtctaggaaatactcgaagcgcctggcatgcggcaagggtggcttccgatcgtgtccgacctccagcccacaggcgaggaggtgggctcagggaggggtgggcctcgagctcctgcccccagcccagggctctgcacgccctgcccttcccctgccctgggggaggagccagactcgttggcagcccggctggcaaccttctgtggcactcgggtttacctgggaaggacacgctcttggtgggtcgcctggctggccccttctgagacacgtggctaatggaaagctcccttctgttctgaaaagctgcaagggctggggtgggtgggcgggggtgggatgctgtgcccggcctcaccagggctgggcagaggcgaggcccaggctcacccggagatggctctggagttggcaggcttttccaaaggaaaaggcccccctcagcctgagtagggcattccagccacacggagggtgaccctgagctgggggccatcgttctggtctggcgttctcgccaccgtgacaggatttgggttcgggcagtctgtatgggtgtgtggaggtgtgggggtgtgtgaggtgtgtggaggtgggtgtgtggggtgtgtagaggtgagggtgtgtggggtgtgtggaggtgagggtgtgtggggtgtgtggaggtgtggggtgtatggaggtgtggagtgtgtgtggaggtgtgtggaggtgtggggtgtatggaggtgggtgtgtggggtgtatggaggtgtgaggtgtgtggaggggtgaggtgtgtagggtgtgtagaagtgtgtggggtgtgaggtggggtgtgaggtgtgtggaggtgggtgtgtggagctgtgtgtggtgtgtggaggtgtgaggtgtgtggaggtgtggggtgtgtggagctgtgtggggtgtatggaggtgtagggtgtgaggaggtgtggaggtgtgtggtgtgtggaggtgtggggtgtgtggaggtgtggggtgtgtggagctgtgtggggtgtatggaggtgtaggctgtgaggaggtgtggggtgtgtgaaggtgtggggtgtgtggaggtgtggggtgtgtggaggtgtgggatgtgtggggtgtgtggaggtgggtgtgtggggtgtggagatgtgtgaggtgtggaggtgtgtggtgtgtggaggtgtggagtgtggggtctgtgaaggtgtgaggggtgtgtggaggtgtgggagttgtgtggcgatgtgtgtggggtgtgtgtgtggaggttggtgtgtggaggtgtgtggtatgtggaggtggggatgtggggtgtgtagaggtgagggtgtgtggggtgtgtggaggtgcgtggggtgtgtggggggtgtggaggtatgcggtgtgtggaggtgggtggtggtgtgtggggtgtctggaggtgtgtggggtgtgtggtgtgtggaggtgtggggtgtgtgtggtgtgtgtggacgtgtggtgtgtgtgtggagatgtgtggtgtgtggaggtgtggggtgtgtacaggtgtggggtatgtggagatggggtgtgcaggtgtgtggaagtgtgcaggtgtggaggtgtgcaggtgtgtgggtatgtgcaggtgtggggtgtgtggtatgtggtgtgtgcaggtgtgggtatgtggaggtgtggggtgtgtggaggtgtgtgatatgaggagtggggtgtggaggtgtggggtatgtggagatggtgtgtggaagtgtgtggtgtgtgcaggtgtgggggtgtggaggtgtggggtgtgtggaggtgtggagtgtggggtgtgtggagttgtgaggtgtgggtggagttggtgtgtggtgtgggatgtgtggaggtgggtgtgtggaggtgtgtgggatgtggaggtgtggggtgtttggaggtgtgtgggatgaggtgtggggtgtgtggaggtgtgggatatgcggggatgtgtgggaggtgtgggtggagttggctgtgcgtgggggggtgtgggtgtggattggggtgtgtggtgtgtgtataggtgtggtgtctttaggtgcggggggtgtggattggggtgtggtgtgtgtaggtgtgtctgtaggtgggggtgtgggtgttggtgtgtgtgtggaggtgtggggtatgtgggggtgtgtggaggtgggggtgtgggtgttgtgtggggtgtgtgtggggtgtgtggaggtgtggggtatgcggggatgtgtggaggtgtggggttgtgggtggagttgggtgtgtgggtgtggaatggagtgtgtggtgtgtgtataggtgtggtgtctttaggtgtggggggtgtggattggggtgtggtgtgtgtgtaggtgtgtctgtaggtgggggtgtgggtgttggtgtgtgtgtggaggtgggtatgtgggggtgtgtggaggtgagggtgtgggtgttgtgtggggtgtgtgtggggtgtgtggaggtgggtatgggggtgtgtggaggtgtgggggtgtgggtggagttgtgtggggtgtgtggaggtgtggggtatgtgggggtgtaggtggagttgggtgtgtgtgggggggtgtgggtgtggattggggtgtgtggtgtgtgtgtaggtgtggtgtctaggtgtgggggctgtgggtgtggattggggtgtgtgtgtgtaggtgtgtctgtaggtgtggggggtgtgggtggaggtgtggggtgtgtggatgggggttggggggtgtggtcttgccagcagtttccctccaggtcacagcagccatgccatcacagcaattccagcttggttacatattcgtctttcccgtttgagatcagggaaccgaggctcagaggtggcatgattcgttcacagcaagagaactagaattaaacaaactgtgccgactccagcctccgccccaccacgccacctccctgccaaactgtcccctccctggcc

SEQ ID NO: 13454 - DNA, 940 bp, Artificial sequence
  DNA replication origin
gtgagtgccaccatgcgccccgggggtggacggggccctgaccaggcggcaggaggccaggcgccacactggactctgtttctgcagcggaggacagaggctgaggccgggccgagtgtctgctgctcttttctggggacctgctgtaggtacagggagggcagcctggacctcacatagcctcgagggaggaggagaggccatcaccttccagcaccctgccgggtggggtcaggagctcctgagagttagagtgtgacaggcagggaccgggggctgtgttagaccaggtgaccacggaaggctggagcagtggtgtctgcactgtgacatgaatagggactttgtggctgcagccagacccaaggggctgggggccctgctggagtgattggaccctgggcgcccacccccctccgattgggagaggcagccccagggacccccacgcctgtctccgtggctcaccttttgtcccccgtggccacagagctggtgccctacacaccacagataacagcttgggacctggaagggaaggtcacagccaccaccttctccctggagcagccgcgctgtgtcttcgatgggcttgccagcgccagcgataccgtctggctcgtggtggccttcagcaatggtgcggggactgctgtggggcctgggtgagggtgacggctgaggagagtggtgggccctaggagcccctcaccagcaagcgccttcaatgattgagcccctgtgggggcctttgggagagtaggtgtggatgaattgggctttatctaaaggggtaatatgtgtattgaaaaatacacacgtagtgaacaccaaatcctgggagtagtgcaagtggtgggtttgtcagctgtcaagggctctgcaaccctttctctgaatccaagtagttcttcctttggacagggaaccgaggctgcga

SEQ ID NO: 13455 - DNA, 787 bp, Artificial sequence
  DNA replication origin
tctcctgctccctgcctaataccgacgagactgggtctgaactcggcccccgagtttcctgccagatctgcccgtggtgggggacaggggcctagactttggggaagctgccccctcccaccttgactaagatcccgcctccccaaggtgcccacccgctcctcctgggccttgcccggccccagcgggggtgagcactgttgctgactctacagtggaaggagcccgggcttgccaaggggaggaccggggtcgggggacccctccctggaaagatgctagagagagcatccctggtcccagcaatgcgtccgccccaagcacagccccagtcccagggctccggtggggaccacccaccgatagggtccagggccagggaggggcgcgttgcagaagggctgctggtggcagccgtggtcatggcccacccgcagcacgggggcgcctccgctgcccgccatggggtcgtcacagggcagctggtccggagacacgggcagcgtcatgtagtggccatcggtcagcagctgtggggaggccggaatgtcagccagtgtctccgggttctggaagcccctggaggctgcaggaggagagaacagatggaggtgggaggggagaaagcagctttgtccttatgagggggttctgtgttcgcccagtctccagccctgaccccccatgccacctcctccctcagggcccccagagatagtccagacccagtcgactttgttacccctgaaggggagcttccctctggccttttgtccccacccagagc

SEQ ID NO: 13456 - DNA, 1317 bp, Artificial sequence
  DNA replication origin
cagagggacctgggctccaccgtggtggggtttttttgtttgtttgtgtgttttgttttgttttgttttgaagacggagtcttgctctgtcacccaaactggagggcagtggcaagatctcggctcactgcaacctccaccttctgggttcaagtgattctcctgcttcagcctcccgagtagctgggattacaggcccccaccaccatgccctgctaatttttctatttttggtagagacagggttttgccacattggccaggctggtctctaactcctgaccttaagtgatctgcccacctcagcctcccaaagtcctgggattacaggtgtgagtcactgcgcctggcctgttcgttcaagacagggtatcacttcaccctggggatgggaggtggtgggggaggaggggagagcttcagaggccgggaccaccctgggcagggccaagctccaggcagctcctctggggccctcccatggatgtggagtgggggtgccgtcaagagcagcagcccatggcctggccctgctctgagaatccccctcagatgtctccagccacttggcctgtgccaccacccctcatccccccgagcaattgctctccagacaccagacctgggccggggatgctggtttaggggccctggttcctaaatgtcacaagccaaaagagcaggtgaaggtggcttagcagggcacatggggcaggggtcacaggcctcccggaggggcagcagtagccggggggcagggggctcaatcaccagcagcctgaggacccagggcaccaggagccccgcagaggggctcggtttgtctctttgcagggctgggagctctgcaaggcctgggaagcggggaaggacctggcaggttggcattgaaaagagtggctgcgggggatggggcggggcatggagctggaaggctgagccagggtgaggcagcggggagggcagagggtggacctggagagtgggtgagagggcagaagggggctgggcggagcggggtgctgttccagcctcaccacgccctgccttcccggcttcccctgggcctggtcttcctgaggtcaccccgcctcctcctgtgtccagacagtcctgacctggacacactgcctgcttccccatcccggctccaccccgatgttggcaggccacttgacctcctgtgcctcagtttcctcatctgtaagagcgggtaggagccacctctcctgctccctgcctaataccgacgagactgggtctgaactcggcccccgagtttcctgccagatctgcccgtggtgggggacaggggcc

SEQ ID NO: 13457 - DNA, 1482 bp, Artificial sequence
  DNA replication origin
tcccagtaggggcggccgggcagaggcgcccctcacctcccagacggggcggctggccaggcggagggctgacccccccacctccctcccagacggggcggctggccaggcggggggctgacccccccacctccctcccggacggggcggctggccgggtgggggggctgaccccccatctccctcctggacggggtggctggccgggctgaggggctcctcacttcccagtaggggtgggcgggcagaggcgcccctcacctcccggacggggcggctggccgggcagggggctgacccccccacctccctcccggacggcacggctggccaggcggggggctgacccccccacctccctcccggatggcacggctggccgggcgggggctgaccccccacctccctcccggatggggcagctggccgggcggggggctgaccccccccacctccctcccggacagggtggctgccgggcggagaggctcctcacctcccagacggggcggctgccgggcagaggggctcctcacttttcagacggggtggttgccaggcagagggtctcctcacttctcagacggggcggccgggcagagacgctcctcacctcccagacggggtctcggccgggcagaggcgctcctcacatcccagatggggcggcggggcagaggcgctccccacatctcagacgatgggcggccgggcagagacgctcctcacttcctagatgtgatggcggctgggaagaggcgctcctcacttcctagatgggatggcggccgggcggagacgctcctcactttccagactgggcagccaggcagaggggctcctcacatcccagacgatgggcggccaggcagagacactcctcacttcccagacggggtggcggccgggcagaggctgcaatctcggcactctgggaggccaaggcaggcggctgggaggtgtaggttgtagtgagccgagaccacgccactgcactccagcctgggcaccattgagcactgagtgaacgagactccctctgcaatcccggcacctcgggaggccaaggcgggcggatcactcgcggttaggggctggagaccggcccggccaacacagcgaaaccccgtctccaccaaaaccagtcaggcgtggcggcgcgtgcctgcaatcacaggcactcggcaggatcttctatctgtccaaactgggaccgagtcctcggcctcggaggctccacgctccctctctcacagcccgcacctcggcggtctctcggaggagggaggaacccgaggtacctggtagtcgtagctgaggaacttacaggcttgttgaccatctcaccatggaaactcgaccattttttaatggggttgtttttttgttttgtttttgtttttgttttgagacggagtctcactctgtcgcccaggctggagtgcagtggcgtgatctcagctcattgcaagctccgcctcc

SEQ ID NO: 13458 - DNA, 1203 bp, Artificial sequence
  DNA replication origin
ggaggtgggggggtcagccccccgcctggccagccgccccgtctgggagggaggtgggggggtcagccctccgcctggccagccgccccgtctgggaggtgaggggcgcctctgcccggccgcccctactgggaagtgaggagcccctctgcccggccagccgccccgtctgggagggaggtgggggggtcagccccccccccggccagccgccctgtccgggagggaggtgggggggtcagccctccgcccagccagccgccccgtctgggaggtgaggggcgcctctgcccggccgcccctactgggaagtgaggagcccctctgcccggccagccgccccgtccgggagggaggtgggggggtcagccctctgcccggccggccgccccgtccgggaggcgaggggcgcctctgcccggccgcccctactgggaagtgaggagcccctctgcccggccaccaccccgtctgggaggtgtgcccaacagctcattgagaacgggccaggatgacaatggcggctttgtggaatagaaaggcgggaaaggtggggaaaagattgagaaatcggatggttgccgtgtctgtgtagaaagaagtagacatgggagacttttcattttgttctgcactaagaaaaattcttctgccttgggatcctgttgatctgtgaccttacccccaaccctgtgctctctgaaacatgtgctgtgtccactcagggttaaatggattaagggcggtgcaagatgtgctttgttaaacagatgcttgaaggcagcatgctcgttaagagtcatcaccaatccctgatctcaagtaatcagggacacaaacactgcggaaggccgcagggtcctctgcctaggaaaaccagagacctttgttcacttgtttatctgctgaccttccctccactactgtcccatgaccctgccaaatccccctctgtgagaaacacccaagaattatcaataaaaaaataaattaaaaaaaaaaatggtcaaaggacatgaacagagacttctcaaaagaatatacacatgtggccaacaagcatatgaaaaacactcagtatcaccagttaatagagaaatgcaaatcaaaatcaaaaccagggtgagataccatctcgcaccagtcaaaatggctatttttaaaaagtgaaaaaataacatgttggtgaagttgttaagaaaa

SEQ ID NO: 13459 - DNA, 980 bp, Artificial sequence
  DNA replication origin
tactgggaagtgaggagtccctctgcccggccagccgccccgtccgggagggaggtgggggggtcagccccccgcccggccagccgcccagtccgggagggaggtggggggggtcagccccccgcccggccagccgcccagtccgggagggaggtgggggggtcagccccctgcccggccagccgccccgtccgggagggaggtgggggggtcagccccccgcccggccagccgtcccgtccgggaggtgaggggcgcctctgcccggccgcccctactgggaggtggggagcccctctgcctggccagccgccccgtccgggtgggaggtgggggggtcggccccccgcccggccagccgtcccttccgggaggtgaggggcgcctctgcccggccgcccctactgggaagtgaggagcccctctgcccggccaccaccccgtctgggaggtgtgcccagcagctcattgagaacggccaggatgacaatggcggctttgtggaatagaaaggggggaaaggtggggaaaagattgagaagtcggatggttgccgtgtctgtgtagaagtagacatgggagacttttcattttgttctgtactaagaaaaattcttctgccttgggatcctgttgatctgtgaccttacccccaaccctgtgctctctgaaacatgtgctgtgtccactcagagttaaatggatgaagggcggtgcaagatgtgctttgttaaacagatgcttgaaggcagcatgctcattaagagtcatcaccactccctaatctcaagtacccagggacacaaacgctgcggaaggccgcagggtcctctgcctaggaaaaccaaagacctttgttcacttgtttatctgctgaccttccctccactattgtcctatgaccctgccaaatccccctctgtgagaaacacccaagaatgatcaataaaaaacaaaacaaaacaaaacaaaaacaaaaa

SEQ ID NO: 13460 - DNA, 1378 bp, Artificial sequence
  DNA replication origin
acggctggccgggcggggggctgacccccccacctccctcccggacggggcggctggccgggcagggggctgacccccccacctccctcccggactgggcggctggccgggcggggggctgaccccccccacctccctcccggactgggcggctggccgggcggggggctgacccccccacctccctcccggacggggcggctggccgggcagagggactcctcacttcccagtaggggcggccgggcagaggcgcccctcacctcctggacggggcggctggcgggcggggggctgacccccccacctccctcccggacggggcgactggccgggcgggtctgacccccccacctccctccggacggggcgactggcctggccggcggctgacccccccacctccctcccggacggggcggctggcctggcggggggctgaccccccccacctccctccgggacagggtggctgccaggcggagacgctcctcacttcccagacggggtggctgccgggcggagggtctcctcacttctcagacggggcagccgggcagagacgctcctcacctcccagacggggtggcagccgggcaggggcgctcctcacatcccagacggggcggcggggcagaggcgctccccacatcccagacgatgggcggccgggcagagacgctcctcacttcctagatgtgatggcggccggaagaggcgctcctcacttcccagatgggatggcggccgggcagagaggctcctcacttcctagatgtgatggcggccaggcagagacgctcctcacttcccagacggggtggcggccgggcagaggctgcaatctcggcactttgggaggccaaggcaggcggctggaaggtggaggttgtagcgagccgagatcacgccactgcactccagcctgggcaccattgagcactgagtgaaccagactccgtctgcaatcccggcacctcgggaggccgaggctggcggatcactcgcggttaggagctggagaccagcccggccaacacagcgaaaccccgtttccaccaaaaaaatacgaaaaccagtcaggcgtggcggcgcgcgcctgcaattgcaggcactccgcaggcggaggcaggagaatcaggcagggaggctcttttttttttttagagacagagtttcgctcttgttgcccaggctggagtgcaatggcgtgatctcgctcaatgcaacctccgcctcctgggttcaagcaattctcctgcctcagcctcctgactagctgggattacaggcatgcgtcaccacgcccggctaattttttgtatttttagtaaagacggggttggtttcaccatattggccaggctggtcttgaact

SEQ ID NO: 13461 - DNA, 1057 bp, Artificial sequence
  DNA replication origin
ggcggcaccggctgggctcccgacaccacaacttccaggagcagccgccgctctcccacagtaccaggcgagccgctgcgctagcgccaaccccaacccccagcttgctccatcctccttccccgccctcctcctccgtcggagacgccgccgccgccgccgccgccgccgccgcctcaggaacacagctagctctccgctcgccctgcccccccttcccggttcctcctcccccccaccccccgccagcagccgcagccgcagccgcagccgcctctccccacgggcgcgtccccgccgccacccagatgcgcggcctcgcgctgcggctccgccccaagcgctgcgcccgcagatgcatccccgcccgcctcccggccacgcccccaagcccgccccgccggccccagccccgcttggagtggctggaaggcacttcagcgggcggcctggagacctgactccatttccggggcgtggccccgcccggggtgctcagaggtcggagtatcgctgggaggagagttggttcatttggaggagggaatgcgactctgagcgggccaagccctagtgggtcagagtaggattctgatggaatttgcggtctcaccgcctactagggaggaaaagcagttttcaggagtcccgcaccgccgccagccgtgggctgggactacaagtcacggtctgtggagtccaggagtgggggcgggcgggaggcaggctgggagctgtagtagtgtcaccgccacgttcgcagcaggtagatgctcatcttgctaacggattggtgagagtggacagcaattaggctttggcaccttggagcgtggctccagctaagggaagcgaaacgcttcctgggtgagaggacttttattctttgctcatcctcttaaacctggcgagtgagcgcctgaggttcggagtgccttcttcacagacgacgcgaatgtggggtcttcgtgtttgccgaactgaagggaatttgccttcctgcctttaggttcgcagcagttcataactgaataagagactttcctccatagaatgg

SEQ ID NO: 13462 - DNA, 706 bp, Artificial sequence
  DNA replication origin
gcatctgcgggcgcagcgcttggggcggagccgcagcgcgaggccgcgcatctgggtggcggcggggacgcgcccgtggggagaggcggctgcggctgcggctgcggctgctggcggggggtgggggggaggaggaaccgggaagggggggcagggcgagcggagagctagctgtgttcctgaggcggcggcggcggcggcggcggcggcggcgtctccgacggaggaggagggcggggaaggaggatggagcaagctgggggttggggttggcgctagcgcagcggctcgcctggtactgtgggagagcggcggctgctcctggaagttgtggtgtcgggagcccagccggtgccgccgcagccgccgcctagggcggtggggaggaggagggagccgcggggcttggcggggtcgggagggagggacgtgctgggggaacgagctggggaagacggagcgggctctgtgccgggcgggcgggcggcgggggggccagcgaccgcagccggggggacgcgggaggatggagcaagtggagatcctgaggaaattcatccagagggtccaggccatgaagagtcctgaccacaatggggaggacaacttcgcccgggacttcatggtgagtctctcccctcgctgtcgcgttttcttgccggcgccggagcccatcgccgcctctcccggccgggccgccagtgct

SEQ ID NO: 13463 - DNA, 901 bp, Artificial sequence
  DNA replication origin
ggcgggggggccagcgaccgcagccggggggacgcgggaggatggagcaagtggagatcctgaggaaattcatccagagggtccaggccatgaagagtcctgaccacaatggggaggacaacttcgcccgggacttcatggtgagtctctcccctcgctgtcgcgttttcttgccggcgccggagcccatcgccgcctctcccggccgggccgccagtgctttgtgtacctctgtgaggagaggggcggagggggcgcgcaccagccgggtgagccgggtggtctcggaggccagcgggaggcgagagcgcctccccccgtggcctcctttcttctcccatgttcgcgacccccgcgcgggttcccgggacgcgaagggagcggccgcgcggccgagcccgcagcctgcaccgtggctcgcgaccacctattgtttaccgggccgggagccgtaggcaagtgaggtgcaggccgggggggggggctcgcgtttccacacctccccgcgcagttcgctcctcccaggagggtcgaggcaaggtatctggctgtgaccgggaggagtgcagatcgtggctgacagaggaacgggggtattgaggttggcactaactcctgggatccctttgctctagctggtctcaaagcgggcagggtaggacttaggccgtttctggggtcgcagtcatgatctccaacgcttgggaaaggattgcccataaggaatctcatgggtttacctaatttccatttacccgcgtcccgcttctcctctcctgaggcccaggtttgaggtggtcttggggtccgtgtgactataggttcaggggataagtgtgggtgggggaattatcctgaaggaagccagccgacttcggactccccaggggatattgccgaa

SEQ ID NO: 13464 - DNA, 976 bp, Artificial sequence
  DNA replication origin
agctgcagccgccggcagcaccttcgcctcagagctatggcagccccgcgtcttggagctttgcccctctgtctgctgctccctccccgtcctcttctcggagcagtttctctttctccgctggcacggccgttccctcctcagcctccgcttccttgtctcagccggtgccgcgcaaactgctggtccctcctacgctgctgcacgctcagcctcaccatctcctcctgcccgccgccgccgccgctgcctcggctaacgccaagtcgcgcagacctaaggagaagcgggagaaggagaggaggaggcacggtctcggtggggcccgagaggccggcggggcctcccgggaggagaacggggaggtgaagccgctgccccgaggtgggtgccgtgcggggagggggaggggagggcgccgtgggtccccgccgccccctggcgcccacggggcccgggaagggggagcgcggcggccgcgtgcgccggcctggaggggctgggaggcgtccggttttcagcagaggattttgcagttcccaaggggacaggaaatggagcctgtaatttcggttgcagagagggggatggccgacactcttattttctgtatcgtttcttcctcccagttagtgcgctgcaggatttgtgaaaatccatcttgaggactctcctaggtttgtttggctagggagagagatggagggaacgggatgggggaagggtttggttttgtaaaagatgcttgattgattgttagaccacttagacgtggtcgcgggaattcgtatttgtgacacagcgttcaaccccggataatcctgtcaaaaaaggggtgtggagagagcactggcgtcagctggaagctaccagaggcctgagcttttcatccctattagggaaatgaggtagcgtgcagggcccgaagtgcgctgtttcgtaaggtaccctccctgcaccctactctccgctgcgt

SEQ ID NO: 13465 - DNA, 894 bp, Artificial sequence
  DNA replication origin
gaagaggttgttggcttaaaccagagactaaagtattttaaaatgaaagaacaaggctgggcgcgcagtggctcacgcctgtaatccgagcactttgggaggccgaggcgggcggatcacaaggtcaagatatcaagatatcgagaccgtcctggccagcacggtgaaaccccgtctctacaaaatacaaaaattagctgggcatggtggcgcgcacctgtagtcccagctactcaggaggttgaggcaggagaatcgcttgaacctcggaggcggaggttgcagtgagccgaaatcacgccactgcactccagcctggtgacagaacgagactccaaagaatgaaaggagagggaggggggagggagaaggggggagggagaaggggggagggggcagaggaagggaagggggagggagaagggggaggggggagaggaggggaagggggagggaaaaaggggggaggggaggggaggggaggcgaggcgagagacagaggtgaaggggaaggggaagagaaaagagaagacggtggccgggcacggtggctcaggcctgtaatcccaacacttcaggaggctgaggcaggcagatcacctgagctcaggagtttgagaccagactgggcaacatggagaaacctcatctctactaaagatacaaaaaattagcctagcatggtagtgtgtgtctgtaatcccagctactcgaaaggctgaggcatgagaattgcttgaacctgagaggcagaggttgcagtgagccgagatcgcaccactgccctccagcctggatgacacagcgagactccatctgaaaccaaaaacaaacaaacaaaaaaagacagagagagggaagaaggaaactgagggccactgtccatggaatgtt

SEQ ID NO: 13466 - DNA, 1488 bp, Artificial sequence
  DNA replication origin
acacgccccccaaatcggagccagaggagagcccaaccacagaggacttccactcaatgagggcaacccctgagtaaagtccatgcggacaaccattcatctcctccgacaaccattcatctcctccgacccccgcccagcactagactgcgctcctagcaccgcgccttcttccggagcctcctcccccgggctggctaggggtgagcgcaggggttagtcagtacgcacgtgacgcgcgatgcccacatgacacgaccgtgagcgggggagggggacacggagtgaagaaggggaaaagttacagaagacccgtcaaagcgcccaaagcaatttgtcccttcttttcttcgccagcggtggctcacggatccctaagggacagctggggacccaggcgcccccagcccagccccagaaacgctggacgcagttctccgctcaccccaccaccttctcttcccagacccgctggtgatgccgctgcaccctgaagttgctccttccttctttccctcccttcctcccattctttctttcttttcttccttcctcccttccccaaaagctcttcatccgcttcgggtgatgccactgacgcacattcaatttgccccagcagctctgaggaggtcagaccaggccgagcaccttccaaaggggagggtctaactgagcaaacaaagttgcacgccacaccacaacctgcccctcccctccctttagcccccaagtcgaatccccggcgaaactcacttgcactgcgggtgctctctggcccccaccccatcatcgcgcaacacacccccttcaacatgcgcggccaccctttcattgccctgcgccccgagcggtcccaccgcccggcaaaacactgagcaagccgctgctctcaccttgcttgacacacttgagccggagggggtccttgcagtgtttgatcacggccagcacgtccctgatggtgagccccgccacgggggtctcgttcacctccagcagcagctcctccgacaccaatttgctgccgctctcataggccaccttgccgggcttcacctcccccaggtaggggaactgtccattctcggcgccccccttcagttcaaagcccagctggccctccgggttcctgccaatgacactctcatggactttgctagtccagtggcttttctttttcaagcttttggacatggcagtggggcgagtcgcctcagttcctgggctccttggggttaggggggctggtggtgagagaatgaggatggaggagcaagggggcccagggggaagaacagcagactttgccttcgcccccctctattcggtgctttccctcttctttggatggagtgtggacgaggaatggggaggatgagagggacggctgggcagaggtaggagagcttggatgaggttgtgctgtcccttgaatgacactcaaggctgtggccccgcagcagaggaagcagtggtggtggcgtc

SEQ ID NO: 13467 - DNA, 1457 bp, Artificial sequence
  DNA replication origin
tcacccagtggatcccgcaccggggccgcaggtggagctgcctgccagtcccgcgccatgtgcccgcactcctcagcccttgggtggtcgttgggactgggccccgtggagcagggggcggcgcttgtcggggaggctccagccacacaggagcccacggagtgggggagaggctcaggcatggcgggctgcaggtccggagccctgcccctcggggaggcagctaaggcccagcgagaaatcgagtgcagcgccggtgggccggcactgcttggggacccagcacaccctccgcagccgctggcccgggtgctaagcccctcattgcccagggccggcagagccggccggccgctcagagtgtggggcccgccgagcccacacccacccagaactcgcgctggccggcaagcagccccggttcccgcccgctcctctcccttcacacctcccggcaagctgagggagccggctccggccttggccagcccagaaaggggctcccacagtgcagtggcgggctgaagggctcctcaagtgcggccagagtgagtgccaaggctgtggaggcgctgagagcaagcgagggctgtgtggcacctctcactattctactgtggctgagctggtatccaagttgtaagacaaagtcctctttactcttcccctctctatcctcaagcagagggaaggaatctctcccggaaccgaaactgtgagttgtactgcctggggttggaggaggggtgatgcaaacacacccttggcccccatggctagtatctcaatagatcatatgccccaagtccactagttccgagcccaggacagcaccaggacttgtctagaaactacagtccttgtggcctagactgtctttcaggtttatttaggaccccacagtgcttttgccaccagtgttggggctagttagactcaggttttcacagcaggcaaggacaatttgcctctggttagggctggtataaatgctctctccattggtgtcagccaagctctgccccatgtcgtttgctgctgtgacagagcagcactgagttctaatgaaggtcccatagtcaccacactgtctcctcatcaggagcgcagattctctctgcaccatgtggctgctgccagggagtaggggaggggtgttgtaggtggttcaaaactgtctttcctgccccctccagtgcttcttactgagatcactcacctgacttttgaatgttatgaaatgtttttgttttgttttgttttgtggatagttcctcaatttggtgttcctgcatggggaggggaagatcacaggaggcttctgttagaccatcttgctccacttcctcctcacgcactagaattttcagtctatatgaaacacataacaatttcactggttaaataaatattcatcaatttgttcataacacgaatgcatctgcttaacagggact

SEQ ID NO: 13468 - DNA, 1389 bp, Artificial sequence
  DNA replication origin
ggacgccgaggaaggggcggtggcgggcggacccactagcgtgcgtcggctgctccgcgccgcggccgccttgcctccgccgccatcaagggcgactttggaaacagacctcggcgagcccgccggcgctcgcgcgctctcgctctccctctcggtttcctccctgatttattcccccgattgccgaggcgaaggcggaggcgggggcgggggcggaggaggggtgacggcgctggagggtgggggtggctgcaggaatcggggaatggcaggcagagagacttgtggaagcgagaggctccgtctggcttcttaggcaagtcagagggaggcggctgggggtgggcagcgggagggctgggcgtcagagcagtcgggcggagacgggccgggagcagccctccatacaaggcagccaggaactcccaaagtcggcgccggctcgctcccgccgcccggcgtgcgcaggcggagcggaccagccccgcggggctcccgggggacggccagccgcccagcgggcatccacaggctgcagaggctccaacccaggacttggctcgcgtcttcgggggttatttttgcacatgcaggcagcgttcccccccagccctactcccaggcgcagaatccagtgcctgcctgggaatcgtgaagtgatttgacaacaaatgtaggaggggtttgtattgcattttaaagcaccactgttgactctctaccaggtggcactatatgcccgcgtgtgccataggttagagcctctgccggggctgggtgccctttgtgccagcggtcccacgcccaggtactgctcggctcacctggcgaggacagagcctcagggaccgggctgtggacggacagagaagtactgacgctgtaaaatcttcccagccctgtggttccattggacagaggggtggagggacgaattctgcatctagggaggacagtagtaagagaagcgctttgcagcatcccagttgggactacctccaaaagggtcctaacgccctgctctggccactggcctgccctgcctgacaaggttaccgcagggtgagctcacttttgtcaatgcgaaggcatgaaaagggtaagcagcaggaacaggtggcactctgagaaatgcgcctgaaatgtagaggaggaattaagggagggggagagagctagggagtagcaatgccggactggttttatctccagactcagaggaagcagtggcgggctttctccttgaaaagacagggtctgcgactaggcctctcccgcccaacacaggcctcctacaagagggccctggtgggccaaagatagaaatatattcttgcacaccttaaattcttaagctccctctagtagtgtatgagaatacttttgaca

SEQ ID NO: 13469 - DNA, 1118 bp, Artificial sequence
  DNA replication origin
ggagttaatgcgttaatgggctaccctggtagcgcacgggccgttttcggcactgtttctccttctctgatgactcgagttcaacctcctgggctgagttgctttgcctccgtcacagtgcaaggagggaagttgacaggaggaggagacgccgcgctgtggcagggagctttgggatccaggggactggaagagagccgcgcgccagcagctggggccgctggtgtccgggattccgagttatggggacaggagttaaatagccgaactttcagcgatttcgcctcgagcgaagcggtaataaaaggcaagcttctgtgcgtggactcttatttcatcaccaaaaccccaccactttccgtttagcttagtgctatttgcacaagcaaaagaagaggggagaagacctaaactttccggtttagcctaaaaagggttctcctgcatgtgtgcgctagcgggggatggcggggtgggggcgcgcagagacgagggggaggatctcctaacagagagggaagggttgaggcggaggtagaggagaggtctgagacatctcctgggtctggtgctgctgctattgtgtaaccatggcaaccgcgggggcaggggtggtcagagccttcccagttctgcacgtggaaagaaaaatgtgaagggcagagaagggagagagccacatgtcatcactccagtgatgccttgccttctcctttttgttctccttttccttctccttttccttctccttttccttcttctctgaggccagatagcaaggaggatgagcaagaagacacacatgtcatcactccaatgatgccctcccttctccttttccttctccgaggccagacagcaaggaggatgagcaagaagatcggggttgggagtgatcagccccagctggccactgctttaacccagtcgggtcttagagtctctgagactcgccccagcggataagacgggtcaggggtgccatcgctgacaggcgcaaagtgatggccctggtcagggagatgggcaatgaccttggctcttggaagggaaaggccaggaaatacaggaaggtgatgtgggacgagataagagtagggtcaagggctgacagacag

SEQ ID NO: 13470 - DNA, 911 bp, Artificial sequence
  DNA replication origin
cccgcgccacctgctccccagctccagcgtccccgccccgcgtcccgcccccgcgccgcgcccgcgccccgcggtccctccctccggcgtgacgggagcatcggcgctggctgcccgggccgcgagcgcagcagagctgtcagcgggcggacgggcagcgggtgacggagcggcgagacgagcgcacagcagtcgcggcccgggagccggagctgccgccgcaccccgggaaggctgccttgccgccggcccgccgaccgcggccggacgaagatgctgttccgcgcccgggggccggtacggggcaggggctgggggcggccggcggaggctccccgccgcgggcgctcgccgccctggagccccgcctggatttgctgctgggcgctcgccggctgccaggcggcctgggctggggacctgccctcctcctccagccgcccgcttcctccttgccaggaggtgagcagcacctggtcctctacctggagtttgctgggggagggcgcggaagatgaaggctgagagcggttcctgtttatttctgtttgccatccccttttcctttgcttggagaacaggggctttcgtttgcttcgaggggtgaagttgcccgccctggtagctggcccggagagggtgtgtggcttcgctgtctctcgggggatgcttttctgtccgcgcttgtgtcttttgggggctctgcaggactttgcggcgtcctttttggacagccaggtttgaggacctggggtcgagggaaagatttcaggaaggggaggagactggggaagccccaccagtgggatttgaagaaccatctcatcacagcttttccagagagccagacacagacaccagaggatttcccgctcctcctccccctgtctccactcccctgtctctgcaaa

SEQ ID NO: 13471 - DNA, 1092 bp, Artificial sequence
  DNA replication origin
gcagcaaatccaggcggggctccagggcggcgagcgcccgcggcggggagcctccgccggccgcccccagcccctgccccgtaccggcccccgggcgcggaacagcatcttcgtccggccgcggtcggcgggccggcggcaaggcagccttcccggggtgcggcggcagctccggctcccgggccgcgactgctgtgcgctcgtctcgccgctccgtcacccgctgcccgtccgcccgctgacagctctgctgcgctcgcggcccgggcagccagcgccgatgctcccgtcacgccggagggagggaccgcggggcgcgggcgcggcgcgggggcgggacgcggggcggggacgctggagctggggagcaggtggcgcgggcgggggctgcggcccagcccggcgggtccccaggggctgcgcggcgctcgcctcgcgctagagggcgagagaggctggggaccccgtggagtagcctgtctcaggtccccgtggcccactgggaggggcgctcccgggatgaagccagagtaaatacaggacatcaggacattgttttctggcggtgggtctttaaaaagctcgccactttcctcattgcacacaaacacgcagatgtgccctcggaacatcccttgtaaggatccatgctggctagcgtcagatcgaatttctagttagggtgtgcatgaaatggcggggaagaaagaggactgaggtgtagacgtggtgtgtgactcagttttctcacctatttaatgaaaataatacccaccacgtaggattattatgaggattaagtaagttgatgtacataaagcacttggaagagtgcctggcacacagtaggtgacatgtgttggtagtagtagccataattattgctgctattggtgttattttgtggagatgtgtaacattgggcattaagccctgtgttttctggaggaaacagtttctccatctgtgcgatgattgaggtgctcttcgttttttctttcattcaaaaacatactgaactaggtgatggtgaacaagatggacataaggccttcctcagtggcaaggatctcaagatcccttcttgatctc

SEQ ID NO: 13472 - DNA, 1231 bp, Artificial sequence
  DNA replication origin
gccagcgggacagacgagcgggaggggcagcgtgcggggagctgggggcggggcgcggccgcagctccgtttccggtggctcgtcgcgctcgctcactccagctgcagccactctcgcccgtggctgcttcctccatcctggtattttttggagcttccatcctggttcttccaaagtgcccggacccaaaacaggaagtaagtgcgatggaaccttcaggttccaaccgccgccagggccgctccgcccagtggagcctgtccggcccccttgctgcccgctagctcccgccggctggcgcaagctgtcggcgccggggcactgcgggcggggtcggagcctggccttcctgacgttgcagctgccgtccccgcacgttccggccagggcctccctcttagggccgggcggtgcccgtggctcaggctgcagagtagggaagcgagcggctgccgaggcacagcggcgatccggcgggggcggaaaatggcggcggcttcggaggagctaaatggcgccgggacccctggggggtggggtgggccgggaggttgagtagagaactgggccagaaggagtggagacagtaaggaagccctacttgttttctcgtggtgttctatttttagtttttatttttgttacgttttcggttttgttttatggtccagcgtaggagaggtaggcttgggtggggtcgagagagtgggggtgggtctcgacccaacttccccccctttgcttttttgttcttttccctcgtttgcgctttagattcttctgtaattttgcgggggttcagccttgctcggcgattcacggcccagacatagagaatcgggatagctggccgaaccgtctctctcagtctgactctctttaaagaagggatgtgggctggggcgcggggacagtcctggtggagcacggaaaatgcggctgtaaagttgtaattaccctattgtgccgagttccgagaaagttcttaaaattgttaagtccactttgttctctaaaatgtacttcgctttgagaatttcttcagggaggtatgtagaatgttttaccacaatctccagagcagatttgagagtagaagtggccaagtgcccttttgtgcaattgaatgatagagcatatgtctttatataaaatactcggtgtagataaggaaaaggataatagtatacagtatgagtcaggactcctccctttctctcattgaatttg

SEQ ID NO: 13473 - DNA, 1036 bp, Artificial sequence
  DNA replication origin
tagttgaaataacacactaactgggcttactacaaactcatgttttctatcctcacctgggccttcactgtatttccatggcctcttattttgggtggactgcccctgcttctctctgggaagtggtttgaagctccagctttcctcaggttcccagtcctacccttgaagcctttacatccattctcacactactagaaagaactacctgagactgggtaatttataaagaaaagaggtttaactgaataacagttccacatggctggggagacctcaggaaacttacaatcatggtggaatgtgaaggggaagcaagctacatattacatggcagcatgagggggtgggaaagggtgggaatgagggagactggggagaagaggttgagaggggggaagaagaggggaagagagagaggtgggagagagacaaagacatagtgaatgagagagcgagagtgaaagagagtgagacagagattgagacagtgagacagacagagtgagacagagagtgagatagtgagagagagagagagagagtgagaaagacagtgagagagagagtgagagagaaagtgagagacaatgagagagacaatgagagagagacagtgagagagacagtgagacagtgagagagagagagacagagagagagactgagatagagagcgagagagacagtgagagacagagcgagagagagcgagagcgagacacagcgagagagcgagacacagtgagagcgagacacagtgagagcgagacacagtgagagcgagacacagagcgagacagtgagagcgagacagagcgagacagtgagagcgagacagagcgagagacagtgagagagcgagagacagtgagagagagacagtgagagcgagagagagagagagcaagagacagtgagagcgtgagagacagtgagagagtgagagacagagagagaggacagtgagagagaaacaggagggggacagagagacagaggagggggaggggggacagagagagagacagaggag

SEQ ID NO: 13474 - DNA, 1093 bp, Artificial sequence
  DNA replication origin
gagagagagagacagagagagagactgagatagagagcgagagagacagtgagagacagagcgagagagagcgagagcgagacacagcgagagagcgagacacagtgagagcgagacacagtgagagcgagacacagtgagagcgagacacagagcgagacagtgagagcgagacagagcgagacagtgagagcgagacagagcgagagacagtgagagagcgagagacagtgagagagagacagtgagagcgagagagagagagagcaagagacagtgagagcgtgagagacagtgagagagtgagagacagagagagaggacagtgagagagaaacaggagggggacagagagacagaggagggggaggggggacagagagagagacagaggagagggaggggggacagagagagaggagggggaggaggtgacagagagacagaggaggggaaggggggacagatggggagggcgggagcggggaagcgtgtgggagcggggaactgccacatgcatttaaaccatctgatgtcatgagaactcgttcatgagacagcactgggggatggtgctaaaccattagaaactgcccccatgacctgatcacgtccctccctgcccctcaacatgtggagattacaatttgacatgagatttgggtaaggacacagccaaaccatgtcattcagcccctgggccctccgaaacctcatgtccttctcacatttcaaaaccaatcatgccttcccaacagtccccccgaagtcttaactcattccagcattaactcaaaagtccaagtccaaagtctcatctgagacaaggcaagtcccttccacctatgagcctgtaaaatcaaaaacaagttagttacttccaagatacaatgggggttacaggcattgggtaaacagacccattccaaaagggagaaatcagccaaaatgaaggggctacaggccccatgcaagtctaaaacccagcagggcagtcattaagtcttaaagctccaaaataacctcctttggctctatgtttcacatctaggccacactaatgcaaggagtgggctcctaaggccttgagcaa

SEQ ID NO: 13475 - DNA, 1544 bp, Artificial sequence
  DNA replication origin
gccgccactggggaacgtagtgggggagacgcagaaggctaggcgaggggttctcaatgcgttcttccaagaaaactttttctcccttgaacatgaaggaatacgtgcttaccgtagaaaattgggaaaacatgggaaattattgtgtaaaaatggggggcgacgtgtgggagtctctcccggggcgaggggactgcgatttgctgtgctagccgggggcgagcggcgggcggcgctaccctggcggcccagaggggcggagagccacgcggcgccaagggctgagatttgaggaagtgggagctgcccgggcgggggcgtcccgctgagagtctgccacgcagtgtttgtttcctttcacttcctgcggcagctgctcaagatgaggaggtgcgcggggccggggcggagcagtcgcgttccccgcgtgtgagcccccacccatccctggcgccagcgcttccccgaccactcgggttcggctatgcgggagccgtgaggaggaggcttgcagtcgtggacctgagacctcgggaggtcatgctgtcttgcttttaagtggcttggggaaagtgaagaaaccccaaaatggaggactttgctaccaggacctacggcaccagtggcctggacaacagacctctgtttggggagacgtccgccaaggtgagtgcggattgtgactccagactgggatggggggtgtgtctgctgcctgccctctggcggagtccgggctgcgtctttctgcggctcctaaaagcacttttagggaggaagctggttctgcaatcccacttccctctcaagatgtttgcccggccaatcgtcgcctgctttgggacatggttggctaagagccttgaaggctggagtggagaaaagttcagaaagttcggggttgttggaagcccttctggggagtgcgggaaccccctccggaggggaggttgatttagtggttgtacagctgcacctccagcaggagtactgaccctccagagacttcaggtgtgcgcccagagcttcctgagagagccgagaaggggtgcttctgattcctgtttacatagaactcataagggttcattgctgagcagtgaagcagccaagcaaggaaaggggagaggcttgaggtgagggattcttgaatgatggcctccattccaggaagtgatcaaggggtccctgaacctgaacaggctaccatacgttattctaggctttaaaatgtttaacaccttttaaaaaggattaattatgtgatgtcttgggccaacaattgaggagagatctttttctatcgtcagcattaactttctgagtagtttgggcaagatctgcctggtttattttttcatctaaaagtggcattggttggctggtcccagtgcagtggtgttgacaactaattgatcatagcccgttacagatttctttgctccttctccaatctccctgcttcacttgactggcctaaaagaaggaaaaaaaaaaaaaagtggcattggtggtctttgacctctgataaagtgctttcaact

SEQ ID NO: 13476 - DNA, 1339 bp, Artificial sequence
  DNA replication origin
atcaggcgaggctttctcggcacccgaggctccagcctgatctcggtcttatcctgcgaccgggctggttctggcgggtcgccagggtgggcggcggccccagccgggcgccccggcggcaagagcggcaggctgcgcccctggcccgcgcctagcctggggagagagctgggcgggcggcgggagctgctctcgcgggccgcggccctcgccctggctgcaacggtaggcgtttcccgggccggacgcgcgtggggggcgggggcgggggcgggggcgaggccgcggcgagcaaagtccaggcccctctgctgcagcgcccgcgcgtccagaggccctgccagacacgcgcgaggttcgaggtgagagaggtccgggcgcgtctggcctcgaagggagacccgggacgtggggcgcggggcgggagtggccggacctccacccagtgcccccgggccccgcgactcgtgcgccgggccgccggagagggtgtacttggttctgaggctgtggtttctcctcaggctgagatggatcttgaggcggcaaagaacggaacagcctggcgccccacgagcgcggagggcgactttgaactgggcatcagcaggtacatccccagcagccactggcttttccgttacacgccaatcagcaggactaagttcacccttggaaagaagttgtaaaaatcggttgatgcctttgaagacctttgttttggaggcttctttgaagggtcttgcatccggttctgaccttggagcaaacgtgttgtgtggcctcaaagaatgtcactgaggctccttttggaacagattcaggaagaaaaggctgtcttgaaaagtgctcccttccctttgtgcaggggggattcaatgaatatctgcattgtataacattcattgtattacgtaactcttgaaacttttacaaatgactttcatatacatcatctgattgttcagacttaaagggtgtcagacatctgctgttgatggctgtgctttttgaacaagggcagtgaagcaaaaactccctcccctcctgcccatcccctgttatgtctcttcctccttgtcttacccctccccctcctctcatcgccaggcttatttgtatttctcctttctgggaggataggtggggagggggaacttctgtacatccgaatcagttttgttcaagtggtagggggaagcagcgcttcctttgccttcatgtctttctcggttcccctggcccttgttaaactcacttcacaggctttatgagcggggcagaagttcccagtcaatggcgtgtgtctttgtttcctctttcactgtgggaatagtga

SEQ ID NO: 13477 - DNA, 905 bp, Artificial sequence
  DNA replication origin
agggagggggcggtggggattttcgtaggggagacgtaggactgcaggatggaggagtgagggtcagggtcattattttcgccttttctctccactccctcctttcccggttcctgcctggaggagacgcctcattgatggagctagagaagaggaaggaaaaccgcttcgtggagcgccagagcatcgtgccactgcgcctcatctaccgctcgggcggcgaagacgaaagtcggcacgacgcgctcgacacgcgggtgcggggcgacctcggtggcccgcaggtgagaggctcggtccgggaggtggtcctccgcgcctcccggcccacccgagaccccacgattgcgctcggttgccctggagatcccatgtcttcttgggtgaaatgagttgggtcccgatgcgagtcatgcatggcgctccctgtgcaaaaaagaaggggaaaagggtacaaaaaagaaccaaaataaccacaggccgagggctttgcccgaggggagtttgtgcggggtgccttcagcagtgcggtgagctgagagaacaggcggagagccctctgacatctgtcaagcaaaagccaggcatgcacagcgagaagggaggtagtatttgggcagggtttgaatcatcattgttgttgttttactcctcaaagagacttcataagtgatttaacccaaggttgacactgtaagaaaaaattggaaaaaaacaaggctagacgttcttaagaaacccaactgtaaaaacaagctgaactttaaggttctattcgcacacatttgtggacaccagagatatgcccattcacccctaccttctagaaaaggtgtcctcctccgactttctttattggtagcagttctcttggtttaattagggctgtgctgtttgttgagcat

SEQ ID NO: 13478 - DNA, 942 bp, Artificial sequence
  DNA replication origin
tccgggaggtgaggggtgcctctgcccggccgcccctactgggaagtgaggagcccctctgcctggccagccgccccgtcctggagggaggtgggggtggtcagccccccgcccggccagccgccccatccgggaggtgaggggcgcctctgcccggccgcccctactgggaagtgaggagcccctctgcctggccagccgccccgtccgggagggaggtggggggtcagccccccgcccggccagccgccccgcccgggagggaggtgggggagtcagccccccgcccggccagccgccccatctgggagggaggtgggggggtcagccccctgcccggccagccgccccgtccgggagggaagtgggggggtcagccccccgcccggccagccgccccgtccgggagggaggtgggggggtcagccccccgcccggccagccaccccgtccgggaggtgaggggcgcctctgcccggctgcccctactgggaagtgaggagaccctctgcccggccaccaccccgtctgggaggtgtacccaacagctcattgagaacgggccatgatgacaatggcggttttgtggaatagaaatgggggaaaggtggggaaaagattgagaaatcggatggttgccgtgtctgtgtagaaagaggtagacatgggagacttttcaatttgttctgtactaagaaaaattcttctgccttgggatcctgttgatctgtgaccttacccccaaccctgtgctctctgaaacatgtgctgtgtccactcagggttaaatggattaaggggggtgcaagatgtgctttgttaaacagacgcttgaaggcagcatgctcattaagagtcatcaccactccctaatctcaagtacccagggacacaaacactgcggaaggccgcagggtcctctgcctaggaaaaccagagacc

SEQ ID NO: 13479 - DNA, 1224 bp, Artificial sequence
  DNA replication origin
gggctgacccccccacttccctcccggacggggcggctggccgggcagggggctgacccccccacctccctcccagatggggcggctggccgggcggggggctgactcccccacctccctcccgggcggggcggctggccgggcggggggctgaccccccacctccctcccggacggggcggctggccaggcagaggggctcctcacttcccagtaggggcggccgggcagaggcgcccctcacctcccggatggggcggctggccgggcggggggctgaccacccccacctccctccaggacggggcggctggccaggcagaggggctcctcacttcccagtaggggcggccgggcagaggcacccctcacctcccggagggggcggctggccgggcggggggctgatccccccacctccctcccggatggggcggctggccgggcggggggctgacccccccatctccctcccggacggggtggctgccgggcggagacgctcctcacttcccagacggggtggctgccgggcagagacgctcctcacatcccagacggggcgacagggcagaggcgctccccacatgtcagacgatgggcggccgggcagagacgctcctcacttcctagatgggatggcggccgggaagaggcgctcctcacttcctagatgggatggcggccgggaagaggcgctcctcactttctagatgggatggcggctgggcagagacgctcctcactttccaaactgggcagccaggcagaggggctcctcacatcccagacgatgggcggccaggcagagacgctcctcacttcccagacggggtggcggccgggcagaggctgcaatctcggcactttgggaggccaaggcaggctgctgggaggtggatgttgtagcgagccgagatcacgccactgcactccagcctgggcaccattgagcactgagtgaaggagactccgtctgcaatcccggcacctcgggaggccgaggctggcggatcactcgctgttaggagctggagaccagcccggccaacacaccgaaaccccgtctccacccaaaaaatacgaaaaccagtcaggcgtggcggcgcgcgcctgcaatcgcaggcactcggcaggttgaggcaggagaatcaggcagggaggttgcagtgagccgagatggcagcagtacagtccagcttcggctcggcatcagagggagac

SEQ ID NO: 13480 - DNA, 1673 bp, Artificial sequence
  DNA replication origin
atccacattgcccttgggctgctcccaggcaatgaccatgcataacagagatactagaacaaagccatcattgcctcaaaagagcttcctctaatggatcattgcctcatatgagcttcctctaatggatcattgcctcatatgagcttcctctaatgggcagcatttgcttggatgttcccactgggccagccaagaccttttcacatctgcactatgatctggatctcctcctatccaatgtttcccttgccttcatcttttgcacgtgtaagaccagcattgcaatatgaaggctccctcctcctttatcctttaagtcatttcttccaataaatctcccatcctatcttggtacctgcttcttggagaacctaactgacaaagcatcacaggcagaaaagcagcaaaataaataacttttgttaataacattagataataattatgacatttattaaccctttcactcaaatataatcctcaacagatagtttcgccaattgttatgtcctaagatgttaagcataaataagtgacaaatgtacatcacagagtgtgttagggaagcatatctctttttccaagttccaatcccctacctatgaaagagaagaaaatatgtgattcttaaggtctaaaaatacatacgaaagaaaaaaatgcatttctgtttcactgaacattatgaagctgctagtctcagagaagggctaaacatggtaaagagatagtgaagaaaagatgcttggggagcaaaagttgaaaatggctgaatctgagaaaaaggtatggatttaatccctccaccaccctgaatctgaggcagaggaacgaggattgcagaatgaagtatcccaaatgctgagagatgactcattactttagtaagacacaaagcttttagtaagaatcttcagtcaatacagtaaagttctctgagaaacacttcaaaggccatgcaaagcaaagtgactacatcgacccaactcttaacagcagtatcatgtggccagaagagccagaataaagatgtcaaccaccacaggcacagaccagaaccctcccccaccttctagccctaatcaatttctgcaccctgatttgagagaaggatgagagaaaaaaagacacaaaaattaacttaaattgaatgtgatattggctaggtgcacagtagctccacaaaaagttattctgacttacaaaattaaaaaattgtagcattccttatacctaggagttgtgccacaagtttatagaagaaaagaaaataagaattaacaaatgccaagaaagaattaggagggtcaaagagcaaacaataagaaataagaactatacttaaggaaacacacaaatagatgccacaagtgcagagtaaggaaaatggagaatggaagatggagagtagtaagtaacgaagaatggaagatggagaatagtaagtaatggaaaatggagaatagtaaggaaaacggagaatggaagatggagaatagtaagtaatggaaaatggagaatggtaaggaaactggagaacggaagatggagaatagtaagtaatggaaaatggagagtagtaaggaaaatggagaatagtaagtaatggaaaacggagaatagtaaggaaaatggagaagggaagaaaaagggtacaggaaaagtagaat

SEQ ID NO: 13481 - DNA, 1632 bp, Artificial sequence
  DNA replication origin
cttctcagtgctctatgcttccaggtgcttcagtgccttctctatactcacaggggacccatccaccaccacccatgttttcaccagagcccatcctagcagcatggctctgtatcctgatgactacatcaattgtcaggttccaatccgagctggggcctgagaggagctggtggacaggtggcaggtagctgaaagtacactcgagggactgtaggcagttgggacatggctttattctgtctctctcctacagagtcagcagtgcagttatatttctcacagacaaaagagactcaaagccagatatgagctcacacaaacaggttacattaaatggctacataaatctgattacatagagcaggggtttatgcacctgcactcgaaacctgctgtgtcatgctgtaccagatatctgcctcagcctactcctgactgaagcacaaccattttccttataccctcttggacatttttcttattctcccatattgaaaagttaccttcaaggacagctctggtgagtgactgataaagtatgttagtgggggaaggagtgaaggaagtgtgattttgtaaaaaggaaataatgggttttgtccattaacagccattgtgagttggaagaagggctaggcaggaggaagcatgagagagaggagttattgcattccctccagtggatttcctcaacctgagtacatgtgagtctcgcctacagagagaggtggggaggagatggaagaagtgggtgccaagatggaagggggggttgcagaaaatcgcagtggatttttgaaggctgaggaagatcctgttcagtgatttatttggtgattttgatgatcctgacatgggttgaaagtgagggtaaagttgtacagggatggaggtagactgcccaccagagtcccatggttggggttggagaaagatctgcaaaagcagagggggacctgaactgtgagtgatgtctgggtggaaatgaaacttccagtgggtggtctgagggaatttgcctgtattagggatagaccaggagtaaggagtcataggagggtaacggccctgagtttagagttttgaaaagaaaaaaatgtctgtggggggaaggtgtttagatggccgagggtataaaaagtttcagaaaatggaacagccttatatatgaggtgcagggtcatgctagactgagtccaggtgtgtaagtctgtggggatggcaggaaaactgttgggtttgtgtggataagcatattcagcaactagaggagaggggagactgggcttggctgaggaggtagtgcattaggttggcaaagggtgctcaactgtcaaaggttgtgggtggggacttagagcatctcacaaacaaagaagacaaagggagcaaagggagatttgagtaggagtgaaattttggaaggtgatttgcaaccatagcttctggattagtgtgagaaattgaagtggactgtttcaggacatgggaaaggggtaccaggaaagatctgaaacaagttatcaaatgaaagatttaaaattggagatggaaagtgttatgggccagggcctttagggctgacaacctctggaattcttgttaagtgcagtgatttgagggaggaag

SEQ ID NO: 13482 - DNA, 1454 bp, Artificial sequence
  DNA replication origin
tggggactgcgcgcaccaaaggcttgcaggcgctggggagggtgggggggctgtgcgtggggctgctctcaccggaagctgcacgctcggggaagcgcggaggcgggggtgctgcgcgcttgggagcacgtgggggaacacgcagggactgccggcgcgaatggcttcgaacgcatgcgccccacccgacatttcacagtcgccatgacgaccggtaggtccgcaacggctgcggggacaagaccgttgaggctgccaggcgagtcaggcctttctggacctcgcctgactcggctgggctgtgcctgaaattgacccagctctatcagggattatgaaaaaacaaggagtaagcccgaagccgctgcagtcttcccgccccagccagtctaagcggcggtgcgggcctcccccttcccccccgcctccgccccggagccggaggtagaggaggtggaaaagtcggccctaggcggcgggaggtccttccggcggaggatccgaaatgtggaaaatcgaaaaggcttggagctaaaggtggtggccaagacccttcttctcggccccttcctgttggtccgtaattccctggcgcagctccgggaagaggtgcacgaactgcaggcgtggtggttccccagcagaaccactttggacttcggtaaggagagggcaggagagctccaggaggtagccgcatggcgcttttcttgagtcttgaaggagatcagtttaacaagcaagggtttgtgggtgcctagtaggaaataaaagcaaggtccgaatagaaagaagttggccaaaaatcttgtcattgaaccaggggagagagagagatagggagtatattggtctgaagggctgtcagatcgcagagagtgttttaaggtctaggagttttaaaggctgaggggaaggatcaagggaagaggatcagattaagattccaagagaggaaataattagtggagcaagtcttggaatatttggaggggtagaattaaaggcacaaatttgagaagctaactgtggaaaagaggagagagaattccttttctgagatggcagggagtagaaaagcgaggattactatatggagaaatgttaaagtggagataaaagaagttgggagtgctggcgtctaatggtctttgtttcagtgaagtatgaggctgggtcaccttcagaggtgagactgataggatgccggggtccaggggacatgcttctgtcacagcttggaaagggcatgtgataagcccttcaagcatttagaatactggcatcgttgcaacatatcatttttttcagatgtggtatgtgggttaagggagggagtgagagacacagaaagattttgagcatctttggaaagctggatgaatttggtagtatatttgaccttttccttatatatcatctgaagagtttttgccagtgtatataattgttag

SEQ ID NO: 13483 - DNA, 1095 bp, Artificial sequence
  DNA replication origin
gcagggggcggcgctggtcgggaggctcggtctgcgcaggagcccacaggtgggggggagggtgcccaggctgcaggtcccgagccctgccccgtggggaggcggctaaggcccggcgagaaatcgagtgtagcgccacagggccggcactggtgggggaccccgcgcaccctccgcagctgctggcccggatcctaattaccctcactgccccgggcctgcggggccggctggctgctccgagtgcgggcccgccaagcccacgcccacccagaactctagctggccagcaagcgcggcgcgcagccccggttcccgcccgtgcctctccctccacacctccccgcaggctgagggagctgcctccggcctcgcccatcccaggaaggggctcccacagtgcggcggggggctgaagggctcctcaagcacggccagagtgggtgccgaggccgaggaggcgccaagaaccagcgagggctgcaagggctgccagcatgctgtcacctctcagtatctgagttaccagcgatgaatctgtacaggtctgcagcaacatcagttcttgcctcctcagaataaagaatttgatggaggggcataaagcagaaaaaaaagagacttaggcaagtttcagagcaggagtggaagtttattaagaaggcattagaacaggaaagaaaggaaagtacacttggaagagatccaatcaggcaacttgaagaacaagtgcagtgctttaccttgatcctaggactttataggctggcccctttcccatgattcttcccttagagtgggctgcctgcatgtgcagtgcactccttgtgcttgggaagtgagcgtgcgtggtgtgtttagttgtacacatgcccatctgaggcttttttcccttttctggtgctgtgcccttggaaggtcatactctgccattttgtgtcttaatgtgcatgctcagtaagttccttctctctggcatctatattcagtggacacttcagtgcagtagctgtggatcatcaggaaatggcctctcccttgcactggctaccaatttgtcacttttagagagtcaatgtgataattgctgaacca

SEQ ID NO: 13484 - DNA, 1131 bp, Artificial sequence
  DNA replication origin
gtggtgccgggggcggccgcgctcgccgccgccgtggtggccccgcgccgcgccgccgccgcccggctcattttccctcctttgtaacggagagaagcgcggccggcagggggagtggtgcggccgaaggaggaggcggggcgggccgggtacaaggtgcgggagtcgcctggcgccgagtgcgcggggcgagggcgagtgggccggcgggagaagttctcagcccagagttgcgggcgcagcgcagaaggagccgcggcgcggaaccgccagcctgacagctcctgctgccctcctgctgccgccgccacgcccctccctcgacgaaggcccctgggcgcgggatcctagcacgacctcggctccccgctcgcctcccgcgtcctccgcggccctctgtgtctggctcgcgccccggcggcgccccctcccggccgcgcccctcccggccgcccccgcgctcctcccccgccccgcccgcgcgcgggaggatcacgaagggaccggggtgggagcgggcagcgtctggggacagcgtgttgggctgtggggaggttaccgaaaggaaacgggccgagtccagttgtttgagcggttttctccttccacgagcgtgtgtgaaaaagcgcggagttcggtggagggcagctgccaggactgcctcctggactgggtgcggtaaggccttagggatgcattcagatgtagggtgccttattttgggccgagaaagctgtcaagtgaaagatccaaggggaaaggtgggcctggatttttttgttgttgtttgcggtgggttttttgtttgttttgaggtcaagtgcagaagcagcggaagcttcaactgtaaccctccagaaggcagggatcatgctgtttccctcatccttgtctctgatcttggtgacacatgtaggtgatttctgataggaatacccagttctgcagtaaatagcagacacagcccttggtctttttctattaaattcttagaatatatttctgaattgggagatttaaaggctaaacagattccgacctccttttcccccacctcaaaaacagaactttaaaaaggagtgggggaggtgtttataaaatcccaggacaaacagttccagcagcgaacac

SEQ ID NO: 13485 - DNA, 879 bp, Artificial sequence
  DNA replication origin
gttagaggagaaggcatattcaataagaaagcatgctaagtaaaattttataaaataagaataaagttgaggagcccctctgcccggccagccgccccgtccgggagggaggtgggggggtcagcccccgtccgggagggaggtgggggcgtcagccccccgcccggccagccgccccgtccggcagggaggtgggggggtcagccccctgcccggccagccgccccgtccgggaggtgaggggcgcctctgcccggccgcccctactgggaagtgaggagcccctctgcccggccagccgccccgtccgggagggaggtgggggggtcagcccccggcccagccagccgccccatccgggaggtgaggggcgcttctgcccggccgcccctactgggaagtgaggagcccctctgcccggccatgaccctgtctgggaggtctacccaacagctcattgagaacgggccatgatgacaatggcggttttgtggaatagaaaggcgggaaaagtggggaaaagattgagaaatcagatggttgccgtgtctgtatagagagaagtagacatgggagacttttcattttgttctgtactaagaaaaattcttctgccttgggatcctgttgatctgtgaccttacccccaaccctgtgctctctgaaacatgtgctgtgtccactcagggttaaatggattaagggcagtgcaagatgtgctttgttaaacagatgcttgaaggcagcatgctccttaagagtcatcaccactccctaatcttaagtacccagggacacaaacactgcggaaggccgcagggtcctctgcctaggaaaccagagacctttgttcacttgtttatctgctaaccttccatc

SEQ ID NO: 13486 - DNA, 872 bp, Artificial sequence
  DNA replication origin
cctccgtcgagcccaagccgctttcggcccgctcccccggctcctgttctgcgtaccgcagccgccgccgccgcggaaacttgcgattcatgaagcgcgggcggcggggagaacccgggtggctagggcgcgccggggtcgtgtcccgccttcctggccctcggctcgctggctcccggctggcggcgccgcgctagtggccgcggccccgtagagagcgcaactctccgcagcccagcgggctcggctcccccctgcgcctccgcctccttctccgccgccgccgcctgaccatttgtgtcaatccctcaactcgctccctctcctctgcctcgcgcgccctcggaccggtttccaggcgccccgtagtctgtctttcaccaggagggaggagccttgaaaccgacgcagaactggaggctcagggaccgtcgcccaatcgcggctccggcttcccggcgcaaagggagccggccgcctcctcgccagagcgaaagccagcggcaggagggcggggtaggaggaggcgggaggaggaggaagtagtggtggtggcactactcaggcacaaagagtaggattgctctgaagcgggacaggcttggttgcttttgctttttcagaagaaaaaggcgaggatacgtaggagaatggtcccatatgctgctggagataatgaataggagtcagaggaccgcgggacttcgcttttcttttattttatccattatcatgtttaaaaatcctgctcttaacgctggttaccaacagcaaaccgggttctgcttccagaacagatgcctttgacttaaggagcgcacggtttcctttgagtttgtgtctgtcgaggttttgtttaacatattacatta

SEQ ID NO: 13487 - DNA, 910 bp, Artificial sequence
  DNA replication origin
gaaggcgggacacgaccccggcgcgccctagccacccgggttctccccgccgcccgcgcttcatgaatcgcaagtttccgcggcggcggcggctgcggtacgcagaacaggagccgggggagcgggccgaaagcggcttgggctcgacggagggcacccgcgcagaggtctccctggccgcagggggagccgccgccggccgtgcccctggcagccccagcggagcggcgccaagagaggagccgagaaagtatggctgaggaggaggcgcctaagaagtcccgggccgccggcggtggcgcgagctgggaactttgtgccggggcgctctcggcccggctggcggaggagggcagcggggacgccggtggccgccgccgcccgccagttgacccccggcgattggcgcgccagctgctgctgctgctttggctgctggaggctccgctgctgctgggggtccgggcccaggcggcgggccaggggccaggccaggggcccgggccggggcagcaaccgccgccgccgcctcagcagcaacagagcgggcagcagtacaacggcgagcggggcatctccgtcccggaccacggctattgccagcccatctccatcccgctgtgcacggacatcgcgtacaaccagaccatcatgcccaacctgctgggccacacgaaccaggaggacgcgggcctggaggtgcaccagttctaccctctagtgaaagtgcagtgttccgctgagctcaagttcttcctgtgctccatgtacgcgcccgtgtgcaccgtgctagagcaggcgctgccgccctgccgctccctgtgcgagcgcgcgcgccagggctgcgaggcgctcatgaacaagttcggcttccagtggccagacacgctcaagtgtgagaagttcccgg

SEQ ID NO: 13488 - DNA, 1371 bp, Artificial sequence
  DNA replication origin
acacaggctatttacaatcataaaagcgaacagtcctggtaccagagtgtgagggcaagaggtctgtccatcctccctctggcagtcgggccctcgtgtccttttgcctcagggacggaagcttttgcaggagctgagttgttcaaaggagcctgcgaaagagagttgtctagtgaggaaacctcgagatgtcaggattggcacgaactccacggcgctggctttgggggatcgctgcgccccggccgaggcctgggcatgggctgagccccgggtctcagactgtagtctccccttgtttgctgttggtgagcctcgtgtagaacttcctccaggagttgagggtcttgccggaccagatccagaagcccgacgtgatgcccacgatcagcgtcataaggtacttaatcatgaagaccgtgaagtccgggctcatgggcgggtgcggcggggcgcctccgcccgcctggaggtgagggcaggggatagcgtagctcttgcagctctgggccacccagctgcgttcccactggtcccggaaggcctgctcgtagaagtagcaggcgatgacgatggtggctggcacagtgtacagcacgctgaagacgccaatgcgcaccatgagcttctccagcttctcggtcttggtgccatcgtgcttcatgatggtgcggatgcggaagagcgacacaaagccggccagcagaaaggacgtgccgataaacaggtacacgaagaggggcgccagcacgaagccacgcagcgcgtccacgttgttaagccccacgaagcacactccgctcagcacatcgccgtccacctggcccagcgccaggatggtgatggtcttgatggccggcacagcccaggcggccaggtgaaaatactgtgagttggcttcgatggcctcgtggccccacttcatgccagccgccaggaaccaggtgagcgacaggatcacccaccagatggagctggccatgctgaagaagtagagcatcatgaagaggatggtgcagccctccttcttggtgccctgcgccacagtgcgtgccccgtcctcggcgaacttgtcattacacaccactcggtcttccaggaggaagccggcgatgtaggccacggccacggccgtgtaacagccggacaagaagatgatgggccgctccgggtagctgaagcgccgcatgtccaccaggtacgtaagcaccgtgaagagcgtggaggcgcagcacagcactgaccaaatgccaatccaggtgcgcgagaagcgcagctcctcgggcccgaagtacatgagcccatacaccttggtcggctcacaaggtgcgccgcagtccttctcccccaggaagtggtagttgaggtagg

SEQ ID NO: 13489 - DNA, 1156 bp, Artificial sequence
  DNA replication origin
ttagtatcattattttaaattatttttcaggcatttcataaatgtccatttttttggtatctgttactggttaattattgtgttcctttggaggtgtcttgtttccttgctttttcatgttttttcatgtttcttgtataaggatagaagatttccttgctttttcatgtttcttatataaggatacaagatgttgatatctgcatatctggtataacagttgtctctaccaattttatggattggttttcttaggtaaagactttttcctgtagatgtatctatattgttagttgggcatggtgatttggctttgattgtgggttggcacagcattatcatttctatatgatttcttcatttgtaatcagtgttagtggtgtttgtcagttcttcagtgacttaggctgtgattgttagtagaggctgtggcaaagctttgctgggggtggggattccaagtggttcagtcttgggtaccagtggtggaagtggcaggttgggtgtgcagatccatggcccccaggtgatgtaccaggtgccagtggtggtgtgtctaggtgggctggtccttggggtcccaggcagcttgcttgggtgctagtagtgggccaggcaggtgggtgggtcctcaggccccttggcagtgtgtgttgggtcagtgatagtagcggcagtggtgagctaatactcaggcccttgaatatcatgcacaggtgacagtagtggcatgagagggctgggtgggccagtttccaggaccccatgtggtacatgcaggtgggtgccagcaatggtggcagcagcaggctgagtgggccagtacttgagtttttgggaggcaggcatagtcaccagcaatagaaggatgggtctatcttcaggccactggacagagtacatgggcagctgtagtggtgtggtgggcctattctcaggctactgtaaagcgtgcatgggtgccagtggtggatggcaggagttgatctctcaactcttggataatgtgctgggccccagaagtagtggcagtgctggtgggcagggtgagtttgccctcaggccctcagacggtgtgtgtggattccagcagtggcaacggggatgagttgatccccaggcctctggatgacatgtgcaggtacctgtggtggtg

SEQ ID NO: 13490 - DNA, 1067 bp, Artificial sequence
  DNA replication origin
ctcactttccagacggggcagctgccgggcagaggcgctcctcacctctcagacggggcggccgggcagaggcgctcctcacatcccagacagggtggcggctgggaagaggtgctcctcactttccagacagggcggccgggcagaggtgctccccacttcctagacggggtggcggctgggcagaggcgctccccacatcccagacagggtggccgggcagaggcgctcctcacttcccagacggggcggccgggcagaggcgctcctcacatcccagatggggcggccgggcagaggcgctccccacttcccagatggggtggcggccgggcagaggcgctcctcagttgccagatggggctgccagtcagaggcgctccttgcctcccaggcggggtggcggccgggcagaggcgctcctcacatcccagatggggcggccgggcagaggcgctcctcacttcccagacagggcggccaggcagaggcggtcctcacttcccatttggggcagctgggcagaggcactcctcacttcccagacagggcggccgggcagaggcgctcctcacatcccagatgatgggtggccaggcagagacgctcctcacttcctagacgggttggcggctgggcagaggcgctcctcacttcctagacggggcagctgggcagaggggctcctcatatcccagacgatgggcggtcaggcagagacgctgctcacttcctagacggggtggcgggcaggcagaggctataatcttagcactttgggatgccaaggcaggcggctgggaggtggaggttgtagcgagctgagatcacaccactgcactccagcctggacaacattgagcgttgagtgagcgagactccgtctgcaatcccagcacctcgggaggctgaggggggcagatcacccgaggccaggagctggagaccagcccggtcaacacagtgaaaccccgtctccaccaaaaatacaaaaatcagtcagaagtggtggtgcgtgcctggaatcccaggcactcagcaggccgaggcaggagaatcatgggagc

SEQ ID NO: 13491 - DNA, 883 bp, Artificial sequence
  DNA replication origin
atctgccagcttctctcgttccgtcgattgggaggagcggtggcgacctcggccttcagtgtttccgacggagtgaatggcggcggcggctgggatgctgctgctgggcttgctgcaggcgggtgggtcggtgctgggccaggcgatggagaaggtgacaggcggcaacctcttgtccatgctgctgatcgcctgcgccttcaccctcagcctggtctacctgatccgtctggccgccggccacctggtccagctgcccgcaggggtggtacgtacattctttagggtctgagtggggcgcgcgccgcagctgaggcggccgaagggctggcgtgggcggctccgtggccccgaccggctcagtggatggcaagggcgggggcgactgcggccatgcttggcgtggctttggtggcaggcgcgctgggggctggagtagtggctgcggcggcggcactgctgctggtggcgctggctgtagcacccgccattgccttgtgttggggggcggtgctggcctccccggctgtgtatctgatcctagacggggtcgtggttgcggcatttgtggttgtagcggtctgtactgaccgcagcagtggtgcccctagtggcggtggctggattggcggctgtgggtttgaacgacccggtggtcgttggggcccttggtgggggtcctgacggagatgctgttggcagctggcccgtcatcctggaggctgccctgtgtggttcagtgttctgtgggctgtagcagtgcccctaatggtggtttatacccatattaaggaggatgtgtagagtgtggtaatggtagtgactggagtgtggtaagggccttcctctgatgctaataatgtaacagtttctcggccgggag

SEQ ID NO: 13492 - DNA, 1800 bp, Artificial sequence
  DNA replication origin
atctgtaccgcgaagctgagacttacggttacttctctcgctgagggtaagggtcggtggacccagcaactccgcagttccgcctccgccgcccctgcctctacagccgagctggtgacctcaggtacccagcccgccccacccacccggacggttgccccttcctcgccggcccgggtgcacccgccaggcggaggctgatgtggccgagggtgcgcactggcggcccgcgggaagcgctgcgtgagccgaaggcgcccgcggcgaggctcagactgggtgggcgccccccatccctctccggccgctgcgccgcctcactcgggggaggggaagagggggcggtggctcttgcctccgcctcgcggtcaagcccggctcatgttccagccttgcgcgctcgcagccccggccgccctcttcccctcccccgcctccggctccggctccggctcagccgctggcacccccaccgccaccaccctagtctcctagtcgcctgccaccagcccctgagagactgcaggtccagtgaaaaggagcaggaacggcagcagcccggccgccgacccggaagctctttcaccgccaaccgcgaggctgcaaagggtgtgaacccggaagcgatttcatagccacggtaacggcggggtggaaagctaaggcctttgaagacctgggaccccgtagtttcgggagagggtgaggggtgaatggtgctgaggtgcgaggagagggaaggacagtaaagagcaggtgggcaggagggtctccgactccagagacctgagcttttggggcgcgggtgggagcgcgggggaaccctcaagacggctttcttttggcgactgagggtttttctgccacaggaagctgggccgggctgctgtgcctgggaggagggaaggaggaatgagaaagcggtgacggtccctgccccccctcgccaggtgactgtcccacccatttagttgaatgtagcggccagagaggcactcgcggcagcccgtacgggtgggacctctcggtgtccttcgggaaacaggaggagcaagttcgactccagcgagggaaaacggaggtgggagactgaaccatctccacatctagttgccccaggcaaggagtttatttttcacatgtagttacagagaaaccatagccactttttgggtggaaactctttgagcaaagaggcttacgtttttccccagtagtggacgttgacgggtggtggcgcaggaaaaaacctcccaggcagagtgattacgtatttttgtcattgcagggaaagggattcacagcttgtcattctaactcacttctccccctgtaactcacttctcgcctctacacttttctccaccttttaaggtttttggctttcatcgctttttctacatgtttttagcctcaccagaagtctttcatctcggtggtccaactcaggatctcagcctcattattttcttacccttctggagtgcatatgtgcctttacagtttctgtttgcaaacgctgtctagcatactaagaggatgttagcaaacctgttccatggacactaaatggcagttgtacatctcccctcatcagtcatagtgacaaccagaaatgccctccatattttccagtgatcccaggtaggtgccacccccctaattaaggaccacttccactgctttatttataagatcttattacttagggagcatattatcatttgtgcctaacattttccagaatggagtgagccatataacaaaatgccacgtttcctgtacttattcacttgaacc

SEQ ID NO: 13493 - DNA, 1078 bp, Artificial sequence
  DNA replication origin
ctcgcggttggcggtgaaagagcttccgggtcggcggccgggctgctgccgttcctgctccttttcactggacctgcagtctctcaggggctggtggcaggcgactaggagactagggtggtggcggtgggggtgccagcggctgagccggagccggagccggaggcgggggaggggaagagggcggccggggctgcgagcgcgcaaggctggaacatgagccgggcttgaccgcgaggcggaggcaagagccaccgccccctcttcccctcccccgagtgaggcggcgcagcggccggagagggatggggggcgcccacccagtctgagcctcgccgcgggcgccttcggctcacgcagcgcttcccgcgggccgccagtgcgcaccctcggccacatcagcctccgcctggcgggtgcacccgggccggcgaggaaggggcaaccgtccgggtgggtggggcgggctgggtacctgaggtcaccagctcggctgtagaggcaggggcggcggaggcggaactgcggagttgctgggtccaccgacccttaccctcagcgagagaagtaaccgtaagtctcagcttcgcggtacagatgtgtttgaggctgcctctacccatttgtggctccgagttcagagctacctacttcacaccctcccggatctactaggagtgtgtctgtcgcctgttttggagcattgttgttctgtctgtccccatccctgaacaggcagcattctctgccctacagggcttttctcccagcgaatttgcaagcctccgggtctccgtgacgcgtcccatcctccccatctggatgcatctccttgtccctctgtcctcaaaggatctgtgtccttcctcgcagcctcccccccacccccatcctttgagacgtggaaagccacgggttctgccgacctcgggggctagagagagtcttgagaagcggatgggtaaaagtgctctgcagggctgtgatgggtggggataggtgcagatggctccagtgaacctttatttttgcagcttctgccaccaaaacaaaagaatggagcgctcccctgtattct

SEQ ID NO: 13494 - DNA, 1050 bp, Artificial sequence
  DNA replication origin
tcacctgcttgccgcccccgcccccgttgctctgcggaggggtggcggaggtgctggcgaaggtcgccgcgccgaagccgccgccgccgctgcccccagtccctccagccgcccccgagcctgcgcccccgctgcccgcgccgccccggccagtgcaatgatggcagaggatctccccctgcgctcccttcttccacatggaggacgacgtggtcttgcatacgctgcaggtgggcttcaggcccagcggcatggtggccggctcgggcggcccccgcgggcgcagagacacgggaatggcggacggtagcccggccgccccctggtcggcccgccactcccggcgataggaagagcggtgagagcgtcggcacggagctgccggtgaaaggaccaggccgctggcgctgccccgtggaggcgggaagcgggttccgccggctccgcaggcggaggccaggattccctggcccgaggcactgggaagcaggactgggaaagggatctggccggggtgggggggacgcggagacttccggcggtgagctggccccagggccccgcagcccgaccgcctgaccggaagtgcagcacccggaattactgggagcttgctgcagttccgcttgctgtcgcctaggggcagggttctcaaactttttggtctcaggcctagaatttgccgggtaaaatacaggacgcccaattaaatgtgactttcaggtaaacgacgaacaatttttttagcgtgagtgtatcccatgcaataatggtttatccgagaggcgtttaactgggggtcctgtatttttatgtgctaaatctggcaatccaggtctggcgtggtggctcacgcctgcaatcccagcactttgggagaccaaggccggcggattacttgagctcaggagttcgagatcagcctggccaacgtggtgaaaccccttctctaataaatatacaaaaattagccgggctcagtggcgggctctggggtaatcccagctaccctggaggctgcggcagaagaatctcttgagcgcgggaggt

SEQ ID NO: 13495 - DNA, 1255 bp, Artificial sequence
  DNA replication origin
ttccgcagtgtttgtgtccctgggtacttgagattagggagtggtgatgactcttaaggagcatgctgccttcaagcatctgtttaacaaagcacatcttgcaccgcccttaatccatttaaccctgagtggacacagcacatgtttcagagagcaaggggttgggggtaaggccatagattaacagcatcccaaggcagaagaatttttcttagtacagaacaaaatggagtctcccatgtctacttctttctacacagacacagcaacaatctgatttctctttcctttccccacacttcccccacttccactcgacaaaactgccatcgtcatcatggcccgttctcaatgagctgctgggtacacctcccagacggggtggcggccgggcagaggcgcccccgacctcccggacggggcggctgccaggcgggggctgtcacccacctcctggagggggcggctgctgggcggagacgctcctcacttcccagacggggcagctgccgggtggaggggctcctcacttctcagacggggcggccaggcagagacgctcctcacctcccagacggggtggcggtcgggcagagacactcctgttcccagacggggtcgcggccgggcaggggcgctcctcacatcccagacggggcggcggggcagaggtgctccccacacctcagacgatgggcggccgggcagagaccctcctcacttcctagacgggttggcggctgggaagaggcgctcctcacttcccagactgggcggccgggcagaggggctcttcacatcccagatgatgggcggccaggcagagacgctcctcgcttaccagacggggtggcggccgggcagtggctgcaatctgggcactttgggaggccaaggcaggcggctgggaggtggaggttgtagcgagccgagatcacgccactgcactccagcctgggcaacattgagcactgagtgagcgagactccatctgcaatctgggcacatcgggaggccgaggctagcagatcagtcgcggttaggagctggagaccagcccggccaacacggcgaaaccccgtctccaccaaaaaaatacgaaaaccagtcaggcgtggcggcgcgcgcctgcaatcccaggcactcggcaggctgaggcaggagaatcaggcagggaggttgcagtgagccgagatggcggcattacagtccagcctcctctcggcatcagagggagaccgtggagagagaggga

SEQ ID NO: 13496 - DNA, 958 bp, Artificial sequence
  DNA replication origin
cccgcggggaggtctctccatccagcttctgcagcggcgaaagccccagcgcccgagcgcctgagccggcggggagcaagtaaagctagaccgatctccggggagccccggagtaggcgagcggcggccgccagctagttgagcgcaccccccgcccgccccagcggcgccgcggcgggcggcgtccaggcggcatggagaaggacggcctgtgccgcgctgaccagcagtacgaatgcgtggcggagatcggggagggcgcctatgggaaggtgttcaaggcccgcgacttgaagaacggaggccgtttcgtggcgttgaagcgcgtgcgggtgcagaccggcgaggagggcatgccgctctccaccatccgcgaggtggcggtgctgaggcacctggagaccttcgagcaccccaacgtggtcaggtgagccagggagctgcgccctcgccatctggggcctcgcgcgcgcggggagggccgagccgggaatcctcaggcccagaaaggtgcggggcagagggcgactggggaggtcctgcgcgacctgttggtcttacagagtgagagttaagttttgtcgacagagccgcgagccagagccggtgaccttgccagacagcgagccgaaagacaagtcaaaaaaacatgacctgagcaggcttccctgcagctgtgcaacttagaagcgttttctccctgcccaccctgaaggagggtctgggggaagtgggtgcgttttagggacaggataagccaacctgagacatgccccgctagcccccgcatatttttcgtggccatgccgttggggaatttttgaaagacagagtaggtgagactggagaatgaggatgccgtgtgataatcagtgggaactttatgggtggagccaagtgtaaatcaggttaacaagatgcagaaacatcataatatttttgccagtcatactctcag

SEQ ID NO: 13497 - DNA, 714 bp, Artificial sequence
  DNA replication origin
ggtctccaggtgcctcagcaccgccacctcgcggatggtggagagcggcatgccctcctcgccggtctgcacccgcacgcgcttcaacgccacgaaacggcctccgttcttcaagtcgcgggccttgaacaccttcccataggcgccctccccgatctccgccacgcattcgtactgctggtcagcgcggcacaggccgtccttctccatgccgcctggacgccgcccgccgcggcgccgctggggcgggcggggggtgcgctcaactagctggcggccgccgctcgcctactccggggctccccggagatcggtctagctttacttgctccccgccggctcaggcgctcgggcgctggggctttcgccgctgcagaagctggatggagagacctccccgcggggctggcgtaaccctggtgccgccgccgcgaaactccgcctgcagagtcgccgccgccgccgccgccggaggagcgagccgatccctcctcttccctcctcgaagcgaagtcctcaacacagacacgattacatagcctctgcccaagcgcgtctcagtccagaatcattgcacctaaaggaggagacgggaggataagaagaaagtgcaatcagacagcccagaagccttcctcggggttcctccagactcccctcctcctcctttacgaagcctccatcgctaccctccgcgcgctcctgccctctccc

SEQ ID NO: 13498 - DNA, 911 bp, Artificial sequence
  DNA replication origin
tctccgccgaagccgaccgtctggggggcgagtggggggagagccagggcagtgcggggcccggcgggggcagcaggcgcagttccctgcgggggtgggacgtccccgacgcttccttcgctgcggagcccggggctagactcgagcgggagggggttggggggatgcaggacaggcgggttgggcggccggcggcggctccccggctacctgtgtggccctcgacctggctcagacccccgggcagtccctgggggctctttcctcggcttttaaggaaagttctgaatgtagtgagtgccagaagctctgctctcgccgcggtccgctccacccgctcatcgtgggggtcgcgccgtttgtttaattcctggcaaaaggcgagcgggccagcggttgcgaggcaggtaattccgaggtgccccgggaattccggacatgcggccgtcgtggtgaaagtcctgccgaggccgcggcggccctggaggagggaggccccctaggtcccagatagctgctgaatggggagggaaagttagggtaccctactctggcgctttgttgtgcagagggctccgggggcgtccggctgcagactggaccgggcctttagccggagggggaatggggcagccacctctgctacctacagcggggaggtcctgggaatgggaaaaggttcgcgagtccgggccccgaggacagagaccttctctctcacccctggaggcgcaggatttaaccccccaccccccaccctttgaaagggaggttgagttttgctcaggtcgaaatcagtttaaaacttaaggacgaggcgcgattatgctatccccttcctgaagttattctttaaggagacgacaagcgaaattgtggcgaacacccctttctcccacccttgggatccc

SEQ ID NO: 13499 - DNA, 605 bp, Artificial sequence
  DNA replication origin
gcccccagccccgccggggggtgggtctccggcagagttggcttcgcgggtccctgcccccaccccgcacggtcgccccagctgcctccccggctggggcccccagcgccggccggagcccagcggcccccgtccgcccccagcgagcggcgcgggcggcgccctccgccgtccctccgccctccgccgctgtgcccaccccctcgccggagagagtgctggtaactccttccccagagtctgattacctgctccgcgaggccgcggacacgtgcggagagccgactgacactcgcagccccctcgggaggcccgacgcgactgggcccctcaggtgaggagctgtgcgctcgggtgggtgggctgcggggtggggggtcccgggggagatctgggggattggccggggtccgaggcagaactgtgggtggggtaagtggagggtggcggggggtgggggggacctgtgtttccttggaatcggctttggttaaccccttacgaactgagacgggattggttatgggggccagttttggggagctagaggattctccttatctgatgagagggggagatcccagcctagggacacccgcgacacc

SEQ ID NO: 13500 - DNA, 1144 bp, Artificial sequence
  DNA replication origin
cacccgagcgcacagctcctcacctgaggggcccagtcgcgtcgggcctcccgagggggctgcgagtgtcagtcggctctccgcacgtgtccgcggcctcgcggagcaggtaatcagactctggggaaggagttaccagcactctctccggcgagggggtgggcacagcggcggagggcggagggacggcggagggcgccgcccgcgccgctcgctgggggcggacgggggccgctgggctccggccggcgctgggggccccagccggggaggcagctggggcgaccgtgcggggtgggggcagggacccgcgaagccaactctgccggagacccaccccccggcggggctgggggctcgtggcgcagtggcaagaaagtgtgcaaattaaagccttccggagagaaatgaggcggccgagtcccggcagtgctccgagctccgggctccctagctcccttctacgagtcgggggctagaagggcgcggtgggggtgggggtgggggggagagttaaatgaaaatttccggctttcgctgaaactgtagtagggggatcctgcgactaaaataagcggcattagtgggagagagtgggacgtgtcgtcgggagtcggcggagtttccaaacccagggtcgcccagagttggggttttgacagggtgaagcggggggcatcctcactgtgtgacgtggacggatgggaaaaacacaaaacaaccaacaataattatgagcggccaatgggggtggtaaataccaatactttccaagaaactgaaaaatcagaccaaaaaataactcttctcttaaaaaaataaagaaaaagtttggcaggatgccttgcagaaaagaaaatactaatctatccaagcacttttcactttcagcatgagctacatttgttttgttttccttcgcttcctttctgcctcacaaagccctatcttttccttttagacagaggatatggtttggaaattgtcaggcactcttatggttaacgatctacttgaaggggctggcgggctcacaattattaagtggttagtaactgctgagggttcactaacgtatttcagaggagctaaaaagactaaaatttagtgtaaataatagaactgcagatagtagatacataca

SEQ ID NO: 13501 - DNA, 1043 bp, Artificial sequence
  DNA replication origin
agggtgatgttttaatgtgctgcagatgacctagggatcttgctaaaatgcagattctgattttcatgtcaagagtggggcctgagattccgcatttctaatgagctgtcatgctggtgaaatgttcatgggtcgtcttttaagtaacaaggctttagaatcattccctgcaaatatgcatatcatcttttaaactttattcttttaaaatttggaaatatactttagtctataaaatacgttactgcatgactatggaaagtaggactaattctggttttctttctctcagaaatatcttctcaactatctgtactgggaatatggtggacatgtactgggacattccatgtactgggagagaggtggacatgccccttgcgatgtatgaagttgggaaataaattaatttgtgggggattttatgggtgtgctttatttttcctggaaggagatttgattttaaaagaactaatatccctgagagacagaagggagtattggtggtggagatggttggcattagtggtgagattggtggtactggtgcacaggtggtaatgttgatggtggtggtggtagtaatggaaaaagtggtgtggtggtgatggtggttgtggtgttagttatggtgatggtggtggtgcaatggtggcagtggagatggttgtggtgctggcagcaatggcagtactggtagtggaagtagtgatgatttgatggtgattgttcctagtaagatagtgatggtggtggtcgtgcagttgttctggtattgctgttggtgggatgatgacagtggtggtagcagacataatggtagcagtggtggtgatagtgatagtgatgaagctgcaggtggtagtattgatgtttgtggtgatttgatggtgctggtggtagtcatgctgatagtcatggtaggggtaatagtgttggagactgtggttgtactaatcataaagtaatggtggtagtgctaatggttgtgatggtggcagtgattcttgagatgtgggtagaggtggtagttgtggcattag

SEQ ID NO: 13502 - DNA, 923 bp, Artificial sequence
  DNA replication origin
atctccgcccggcagtcaccccgtccgggagggaggtgggggtcagcccccgccaggccagccaccccatccgggagggaggtgggggggtcagccccccgcccggccagccaccccgtccgggagggaggtgggggggtcagccccccgcccggccagccgccccatccgggaggtgaggggtgcctctgcccggccgcccctactgggaagtgaggagcccctctgcccggccagccgccccatccgggagggaggtgggggggtcagcccaccgcccagccagccgccccatccgggaggtgaggggtgcctatgcccagccgcccctactgggaagtgaggagcccctctgcccagccagccgccccgtccgggaaggaggtgggggggtcagccccccgcccgggaggtgaggggcacctctgcccggctgcccctaatgggaagtgaggagcccctctgcccggccaccaccccgtctgggaggtgtacccaacagctcattgagaacaggccatgatgacaatggcggttttgtggaatagaaaggggggaaaggtggggaaaagattgagaaatcggatggttgccgtgtctgtgtagaaagaggtagacatgggagacttttcattttgttctgtactaagaaaaattcttatcctgttgatctgtgaccttacccccaaccctgtgctctctgaaacatgtgctgtgtccactcagggttaaatggattaagggcggtgcaagatgtgctttgttaaacagatgcttgaaggtagcatgctcgttaagagtcatcaccactccctaatctcaaggacccagggacacaaacactgcggaaggccgcagggtcctctgcctaggaaaaccagagacctttgttcacttgtttatctgctgaccttcccgccact

SEQ ID NO: 13503 - DNA, 965 bp, Artificial sequence
  DNA replication origin
ggctggctgggcggtgggctgacccccccacctccctcccggatggggcggctggccgggcagaggggctcctcacttcccagtaggggcggccgggcagaggcacccctcacctcccggatggggcggctggccgggcggggggctgacccccccacctccctcccggacggggtggctggccgggcggggggctgacccccccacctccctcccggatggggtggctggcctggcgggggctgacccccacctccctcccggacggggtgactgccgggcggagatgctcctcacttcccagacggggcggctgccaggcggaggggctcctcacttctcagacggggcggctgccgggcggaggggctcctcacttctcagacggggcggctgccgggcggaggggctcctcgcttctcagacggggcggccgggcagagatgctcctcacctcccagacagggtcgcggccgggtagaggcgctcctcacatcccagacggggtggcggggcagaggcgctccccacatctcagacgatgggcggccaggcagagacgctcctcacttcctagatgggatggcggccgggaagaggcgctcctcacttcctagatgggatggcagccgggcagagacgctcctctctttccagactgggcagccaggcagaggggctcctcacgtcccagacgatgggcggccaggcagagacgctcctcacttcccaaacggagtggcggccgggcagaggctgcaatctctgcactttgggaggccaaggcaggcggctgggaggtggaggttgtagcgagccgagatcacgccactgcattccagcctgggcaccattgagcactgagtgaaccagactccatctgcaatcccggcacctcgggaggccgaggctggtggatcactcgtggttaggagctggagaccagcctggccaacacctgaatt

SEQ ID NO: 13504 - DNA, 939 bp, Artificial sequence
  DNA replication origin
gcacggccaccagcgccagcaccttggcgctcctcacgctgaagtagtggttgatctcccgcttgcccaggttgtaggccagagccgccatcttggttcctccatgacaacagtgcgcggcggagcgggaaaggggcgccgcacaggggcagcactggggctgccgccgctgcagccaggcgaggagcggccgccagctccccaggccgccacctgcgcctcccgccggggaacctgaccccgcggccgcggcgcccccgacctccgcctgcccctcctcggccgcggccgactcggcggcctccccccagccccgccgccgctgctccgccgtgccggttccccaggcgccctggacgcctgtctcctccccttcctcctcctctttagcctcctgccttaatagcggctgcgcctgcgaggggggtccggatgcccagtgctccggggtcaccgggtcacgcgccccggcgggcggcggcggctgcggcagagccatgggggtgtggggagagagtactaggggtacccgcctggcccggacgcgagccttagggctgtctcctagtttactggccgctacctgagcccaggttggggcaatagaactacagttccgggagaaaagtacacatcgtcccattccttccttccccaacactcccctttctcagccttctactgccagaacccgcccagcgggatgcgaaggacaccctaaggtcgtttattgtctggctatccgtggcctggctggtcagtctggctgcccctgggtgctggccagattggattgatggatccagttgatggtgctggccgatggattgctggcatccaacccaggagtgaaaccagtcttaacacttaactcaccgctctggccagtttctcttaaaccgtttttttaatgtcctcagtttgcccagttctggtggg

SEQ ID NO: 13505 - DNA, 1659 bp, Artificial sequence
  DNA replication origin
gccgggctccctctctctgcggccctagagttaatcccatcagccgaggtgaggcacctgttaccccggccttcctcacccccgcggcctctcctccattacaccgcggccgccgaaacggcccggcgtggcgaccgcacgtgggccaaaccccttccccggccggcacccctggccccaggccggcccgagcgtgcgggcgcgtcgctgctcgggccgccgcccgcccgcaatggcgttggggagcgcagcgcgcctcccggggccgcccgccgcgggcagggagcgcctgggggccgacgcgcgagtggaagcggccgccgcagccgccctacgcgctgcgccgtgaggagcgggttgcggtgtacccagcgggccggcgccgagccgagccgccgcgtccaccgtggggcggggggcgcctgcgaggagggggtgggagccgcggcggcccgaccctccccgcccgcggcgctcccgctcgggtaagggggaggctgagcgcggggcgaggagttggggagggtggagaggaggaaaaaatcggcttgtacaaaggctgagttgcaggctgggggtgggggtgggttgtggtggaggagcaataggttgaagatcggaggcattatcagtgggatctattgtttcctggcacattgggaggaaaaacaaagggatttattttcattaccctgtaattttttttcttttctatttttttaaatgtggccagggagctcgtctctctccgtgtcacagtgggatccgcctggcagccgccgggagctgcagccaatgtgttaggacttcaggtgcttcttggcacaaagctagactgcgacctcctaccatagcgcttggcgtcacctgctctcccggtcctgccccagggccgagggattgcgtcccgaaccgggcttgggaatcggctgcctctcaagttggtgttatttatgtttgtcttttgtgagggcaggttttgaatcccccggcggccccatctcccccgcccccgcctccttgggttggaattggcgggggagggaatggggggtgtgtgtaggggagaggggagggtgtttgtggctttaaaaagaatggtcagggtaaaaggagattgtcgatgctttacaaaaaaagaaaaaaacaggcaccacactccaaagcctttcttgtttgtctgcatgggccatgcatgcgtgctgggccaggagccgagtttggagacggtttaagtgaaagtgtgtgcctcctcagctgattgtgcgtgagggtgatgtggctcggtctaatatcaaaacaaaacaaaaataaaatgaaaaatctttagaactgcctgcattgtctgctcctcagcatatcttgaagtatttgattgctggcttattgatataaaatcctgctgtgggcttaaagagaccagcaagcatgcattgcgttgcgtgttgaactgtagtaagttagaggcaagaaagaataaacaaatcagggctgtgaaaaggggtgtcacagtatatttgctttctgattgtcacattcttacgcatttattcccttggtagtctgcatcccactccataattaataataaccactgttaggaaacttccaaatacttgttataactgaacttagtgaaacttattgctattcaggaac

SEQ ID NO: 13506 - DNA, 890 bp, Artificial sequence
  DNA replication origin
gcctgtttctaccaggaagaaagagctaactgtgattccaggagcgcgtgtgggcgcggtcctcgccgcgacgccgcgcgcgggtcaggctcaactgcgaaccttgccaccgagctttcccgcgggaggcttcgaatataaccttgcctatttctcgcctactgagatttctttccagaaaaggacattctcctgctccgaggagatggatccctgaggtccccatgcccgcacagggtgtcctggaggagtttagaggacactcctggggcccttccctgtgtagtacgcttattcccgaggtgggggctgagaatcgaagagcagcgccccccacactgggattgggggtggtcgaggggctacagatgcccgcattgggcttcttagcggcctaggctgatgcctggaggtaggggggattgggtttggctggcgactagctttaatgcccatcgagttcctgggacacccaagttcagcacttctgcatgaaaccgaaacggccagggaggggcggagtgggccgaggctgagggagcggcggtgttgacgccctcttcccacccaggatcgatcgatcggtagggaattttttatctttgggaaggagaggtgaggaagcggacctaaaacgaggggaaaattcgaatttaatatcctgtataggaggtcaaaagaaaaaaaatgatggcgaggaatgcagagggccctaaatggaccctaagatgaagtacgggtggtggctggagagctgggactggaaggtggggctgggggagacgggtaagcagcttgctttggtgaggagctcccacgctgagaacggtgggaggagggaatgatggggaaacctttgtttaatgaggaaacctaattattgcgcatct

SEQ ID NO: 13507 - DNA, 1141 bp, Artificial sequence
  DNA replication origin
gcgaattcacaccagtgcggaaggctaattcatattcaagatgtagcctgtaattcaagttgtttgaaaacgccggccggggcaacgtgcagctagctctgcttgctacctgcccaagcgccggtggactccagaatcctgcgcttggaacagccgccacctccccacccccaaccccgcccccgccacgctcagctgtcagctgccctccggtgcacaggcttgggttagctcccaggagagagagggagagagtaggagaggaagagagacagagagagagagagagagagatcccaggagagagagggagagagtaggagaggaagagagacagagagagagagagagagagagagagggagggagggagggggagagggagagagagggagagaggggaaagcttcctggagcacatttagtgtcattaaaataactcccgcaaggcgggggtgtgggggctaggcacgcgggacccactgggggagcaagtaggggcagatggaaaagataccttctggaggcttagtgggactgatgagggtccccagcctcctagcctccttcttgcctcctggctgacccatgctagaggaaagggaatcccctgaagctacctctaattctaatgaccccaaacatggggggtgggatgggggattgttccgcccatctgatttgtgggcacagctctgaatcctcaggaaaaggcagactctgcactgtagactgcatgtctgcagtcattgtcctcaataatttccctctttaacctcctttgctgtttcctattaatttgaccagtcttaaatcagaggggctttgctacatgggaaggaaatgctcccagctcagtgtgtgaatatatgtatatagttttttaatcaactagccttgctggcatagggtgctgagggccagccgtgacagtggggaatgagaaggagccaatgggaagtcagcacaaatgtgagacaaagagactttgcagggcagtctaggtgggagttgaagatgcctgtgaacagcagctccagagcctgaagttgtggccaatgatgggttcctggtcactgtccagagcccacactgcagtgtccctctctagaccccccagcctgctgatctttccttcttc

SEQ ID NO: 13508 - DNA, 1064 bp, Artificial sequence
  DNA replication origin
ctgcactgcctgcactcggcggcggcggcggcagcggccggctcgcaccaccaccaccaccaccagcaccaccaccacggctcgccctacgcgtcgggcggagggaactcctacaaccaccgctcgctcgccgcctacccctacatgagccactcgcagcacagcccttacctccagtcctaccacaacagcagcgcagccgcccagacgcgaggggacgacacaggtgagaggccgctggggcagctcgcttctcccgcctcccgactgccccctaccccgcccgcccgctcacttcctcgacgcccgggcctccgccggccccctcccccaggcggccccgcgcgcccttggccgggccccgtgcgcgcccgctcgcctggcgcctgcctgccggcctctcccagccgggccccttcccgccgccgcggaccctcagcttccgacgcgcagttcgggctgagtcccgggcccggcgcaggcttcgttcgacgagttagtccacactgcgctctccagcctcctgggtctgtgcgcccttttccttgctccttccctccaggctgtaacccacgtttgacccggctggggacatttctgggccggaactggggagcgtgttttgcttcccagcccacgctgggcaggcagtggcctactttgcgtggggcgccccgtgctcctcagtgactcggagggaagctggcctggctttcgctctggttaaactagtaacagtcaggctctttccagtgggctttaaagtgtccctcaccttcatccctgaccgggccccctatctagcttttcgctacagtgttggctgctcctttgttcgtggaggggaagcaaagaacctcgggctgatggttctcagcacccgagggggacaaagttgccgtgagaggcgcagcctgctcgtgggctggtctgagctgttggttgtgttttgtttgaggatttggtcctcctcaggagagtcatttcaaaacatgccgaggatgcttgatgcactgagcttggagctggtgacatcaagtcaactggccgcgtaaacacctggg

SEQ ID NO: 13509 - DNA, 1612 bp, Artificial sequence
  DNA replication origin
agcggcgggagcctccaccggctactgtgggagggggtgcttaagggtggaggagctgggtgaccgcaggcggatccgccggcgtggcgagcttcccagaggtgcccgagggcgtctgccctctgggtgtgcctccgggagggctagagagctctaggttggcaagatcccagtgaccattgggaggcgcgcgatccaaggggttgcagggatggggcggagaggaggggcggttgggtagcctaaaggtccctctcccagaatacaaggaagcgctaagaaggaggatgtgggggcagtgttccagcaggcatcccaggctcttccggctggagagctcaggagactgagcggtgtcaaggctggagtgagctatagggtgcgctgggaggaggtgagcgcagcctggctttggcgcgctgtgggtgactcccaggacggcgcggccaggacgccgcgagccgtggggcgtccggtgggatcaaaggaaccagaggaggccagccgacgcgtctgggattgtgggataaggggcgggagagaggagattgacatgggcggggagatcctggcctggcctgtgtcaccggagggggttgtgtgcgtttgtgtctttgtgcggatcaacgctctcgggcctgaggccgtgccctgggtggatccgagtgtgagtggacaggctcccgggtgggtgcccagacgggagggagagcgagcgagcgagatcaagggcagcgaggtctgcgggttcctctgtgtgtgtgtctcaggccctgtggctcagcactggagccgcctggcacccacaggaatgcggcttctctcggatccccaggccgccccttgtcccacaaggaggtggccgccaggaaaaaggggggaaaaggggcagaaatccgcctagctcaacccgagcctcaaacaaaggccaatttatctgatctcttacaggatggcccaggaggtggtctgggcaccgaagaatcgcgctggccctgaccgcatgccccagccttcctggggtttgtgaggagctctgaaggtgggggtgaggtgttgtaagtaaggggtggggagtatgaagacgcccactgaaaagaacattaatcttagaaaggacttgattcgtcttgggagcactatactgagagctaggcaagtggaaaccggaaggggcaggcagaggggtcacccagtgcgatgtcaagagtggggccggctggtccgggaatatgctggggagtggagcacgtttatattcgacgtaggaaaaacaatggagaggaagagaaggtggaagggagggcaagggagagaaacatcacatagatatttttagactttgctgaagatctgttatttttacatccttgggctcgggacggcagggagttaaattcccctgagagaatccccatggggccagggaaagcccgctgcagactggtttaccagaatatttttgtccacggctcccagaccaagctaaaaaataaaaaccgcacgagagaaaaggcctttgcgagtggaagaagtgaggttggcacaagggaaggaatcctgaaaccaagtctgtgtccgcgcggcgttggtctgggccacctcgcaatga

SEQ ID NO: 13510 - DNA, 1048 bp, Artificial sequence
  DNA replication origin
actaggacgctgggggcgcgagatggggtggtagattgggggtcacagcggttcacggcagtgggggcgcacgcggcagaagggagtaggactcagaccctccaacaaagagagtttctcgggccagcattttagggatttttagtaggagagccctgtggaggttcgaactagcgtctctcccctccggcaccttccaaggcccttcagtcgctgaattcccagcttgcccggccaggaagccggctaggctggaaaggggataggggtggagagaagaaagaatcaagcagctcctggcgtttgcgtaacaaagagaaggttacttgggaattttggtaagcgtgctgggttggtgcgagtgggaatagaaggctgcctcaaaaactcagtcaggattagtttgagagccgccacaagctagcacggtgcgggtgccctgagcacgctgggtgggggtgggggggttaaggagttgtagccagccagagaagagcgcgccgagagttttgcggtttatccaggcatttccaaaaacaaaaagccatttaaaggtggaggagggttgctgaggggtcacgttgtaggatagatttttttttctgtctccataggcgcccacaatttgtctttccgtcctcctttttcgtccgctttgaaacttacttagagagtttaagagggttagtgagcttgggcggtaagagaaaggcatgaggctcggcggagaggttttattggtaaggtttgatctcttcccaccagcacattaataatcctgctaatattagcatcccctactctggcagaattgagaccacagccctcatcctccacacttctccctggaacttgacacacacacacacacacacacacacacacacacacaccctggagaggttctccgtcagttccagaggggtggtagttttgaggaaggggagttgtagccccagggcaggtttgtacaacacgcgtttggcaatccctccccctcccgcccaaacccatactcatgacagtgagaatctcatcctgacctgcc

SEQ ID NO: 13511 - DNA, 1036 bp, Artificial sequence
  DNA replication origin
cttgggcagtcgatgggaccaggcgctggggagtagggggcggctcccctctaggggaggcttggccatccgtggtggcgggggggccctcgggcatggcgggctgcaggtccagagccctgccccgcagggaggtggctgaggcccagcgagaattcgagcacagcgcaggcgggcaggcagtgctgggggacccagtgcaccctccgcagctgctggcccgggtgctaagcccttcactgcccggggccagcggcgccagccggctgctcagagtgcgggcccaccgagcctgcacccacctggaactcgcgctggcctgtgagcaccatgtgcagccctggttcccgctggcgcctctccctccacaccaaccagcaagcagagggagccggcccctgctttgcccagcccagagaggggctcccacagtgcagcagcaggctgaagggcgcctcaagcgcggccagagtggatgcggaggctgagagcgagcgaaagctgctagcacattgtcacctctcactttcgcattgctacaaaggaatacctgacactaggtaactgataaagaaaagaggtttatttggctgacagttctgcaggctgtacaagcatggcaccagcatctgctaggcttctggggagacctcagggaacttttgctcacagcagaagacaaaggaaaagcaggcaggtcacatggccagagagggagcaaagagtgggggcaggggtggggggagagtctagattcttttaaacaaccagatctcatgtgaactaactgagcaagaactcactcatcaacaaggggatggcactaagccattcattcgtaagagatctgaccccatgacccaaatacatcccactaggcccacctccaacattggaggtcacatttcaacataattttggaggggacaaacatctaaaccatattactgcccaaagaagaactcacatttccccccctttcccagtggcccttcccaacccttgctttctcctgtattcactatttctgctaggg

SEQ ID NO: 13512 - DNA, 1263 bp, Artificial sequence
  DNA replication origin
agagggcgccagagagccaggagcggcccgcagaggagcccgcgccggccccggtgcccacctccgcgccgcgcggaccctccgagcccgcgctcagacgccccagctccgccgagaggccgcttgcgccgggtccttcttccccaaatgcaggcagagcccccggagccatggccagcccttccggcagctccaaagccactggcaagccccgaggcagggatggccggcccaggagggaggaggacgacgtccctcccgaagagaagaggctgcggctcttgctggaggggggaagcgcacagccccaggactgcgaggacggggaggacgcgccgcggccgggcagggaggagaccggcacccagacaggtggcgacggcagaggagtaagtgacgcgggcgcgggggtccgggggtgccgggagcgcgggggtgctggggacgcggggtaggggcggcgggaggctccgtggcctgccccgggttaaagctgggagggcggccttcattctgaacacatttaggcagcacgggcagccctcctcgccgtgggctgcatcagagcccccctgcccagtcttggggttgctcccggatgctgtctgggaggcttgctcatggtgacatcctcatctccccgtgcacgttactgcattcagagcttgggtcacctggacactgaactctgagtgaattttctctgagatcccgggagaaggaggacagttctctggaaggttttccagggccgatcacggaaaggatgagaagggagaggttctggtcggggacacaattacggtggcagtgtaacatcaggaaactttattgcgtgaagtccctctcactccctctacctccttcttttacgtggactctgccaaagaccaggataccagaatgcactgcagtgaccaaacgtagtgggaccttgggaacgcgagtctggagccaggcggctggggtttgcatcctggttctgcccctccttagctggctgacatggcacaagccacttaccctctctgagccttactgtcttcagtggcaaatggatctgtcaacaggccccattgcctggggttgttactgctgagattaagggatgctcgtccatagaaagacttagcgttgtgcctggcacatagtgtatggtggataaatgggacttaggactaaaactcatgccttggtgtgtttttgcagtgatgttttgttctggggtgcatcacaagagacaaggttcttggccgggcatgg

SEQ ID NO: 13513 - DNA, 1755 bp, Artificial sequence
  DNA replication origin
tccctgcccggccgcggcgcgtcctccccgtcctcgcagtcctggggctgtgcgcttcccccctccagcaagagccgcagcctcttctcttcgggagggacgtcgtcctcctccctcctgggccggccatccctgcctcggggcttgccagtggctttggagctgccggaagggctggccatggctccgggggctctgcctgcatttggggaagaaggacccggcgcaagcggcctctcggcggagctggggcgtctgagcgcgggctcggagggtccgcgcggcgcggaggtgggcaccggggccggcgcgggctcctctgcgggccgctcctggctctctggcgccctctgctggccgctcacgcgcacctccgccacgccgggcccgggcctgcgccgctctcacctgtcctggcccgggggtcgctgtcccttgcccgtggccaggcccgctctggccaggccctgcacctcctccccgccccaaccaggttgcaccccgatggtctccctgctcaaggaggagagaagagaagggacgccccgagagggtggacatcggccacagccaccttgtctttgctcttaccctgtgtcttgcatgatttggaggtggtgggaaaaccgaggctgctcaaaactcgtggagaattccgcctgcaggatgacatgaatgcaccttcacattgcctaccaacagatcttttttgagcatcactgtggaccagtcgtggtgatgggggaggggatattgtggtgaacatgacaggcattgccttcacccagtggggctcagcgctgggtgagaaggcattgagaatggacattgtcaattgggccaaaggaggccaaggagaagtgctggggacatgggaactaaaaaagacaggaggctcagcaggtcttggagctgggagagtgacagcagcagcggctgttccaaaggaagcaacagctgagagaggtctcagagagttgttctcagcccagtggagggtgttcaggcagagggaacagcgtgtgcaaaagcccagaggctgggaaagaagcagaaagaggactgtggtgctggagcgtggtggacaaggtgagagaggtgtggtgggcggacagatggcctgggacccagccgtgcaggggcagaggatataggggatccttgcaggcccccagccggggctgaggcacagagacaatgcaggtgggcaaagggaggagacgtggagaaatattttggaggcatgccctgatgaatgagcccaggatgcacccttagtgtcagtgtggagctcctgccttggctgtgtgatgacctgaacccgggggtattttctggacatcgaagtgctacacccagagtccaggacaggctaagtgagcaccagcagctcctggcccacctcaaaagcaggagagacaggggagactggggaggccggggcggaaggggaagccaggaaggcaggagaggccagggaagcagaggaggccagggaggcagaggaggcaggagaggctggggaggctgtgtcctttccatgattctgcccaggatcctaggtccctgtactccctgaacttctccaccccaagcgctggaaacatgttgcacaatggtctccccactaagctcctgatggcagcccctgccctgctgtgctccctatttcaaccctaacagctctcacagtgggcagcacatagtaggtgctcaggaaacactggtgggagagcacatgggtctgctcagcac

SEQ ID NO: 13514 - DNA, 888 bp, Artificial sequence
  DNA replication origin
agcactttgggatgccgaggcgggtggatcacttgaggtcaggagttgaagaccagcctggccaacgtggagaaaccccgtctctactaaaaatacaaaaattagctgggcgtggtggtgcatgcctgtaatcccagctactcgggaggctgaggcaggagaatcgcttgaacccgggaggcggaggttgcggtgagccgagatcatctcgctccattgcacgccagcctgggcagcaagagcgaaactccgtctcaaaaacaaacaaacaaacaaaacaggcgttcccaaggactgcacacctgcccaaggagccccccacccccaccccaactcgggctccgcccccagcccgtaggagccccaggttcccctaaacatcccgggcggcggggcgggggatcccctgggagatgcccgcgttttcgcggagcggctcgtcccggagtgctcctgggacttgggatctgtgtgctgagcctgaatcggggctgcccctccttccggcggctcccagagacctgtttcccattggcggaatgggcccgggccccgccacgagtggagaggccgggcaaggaggatcgcgggaggcatggatgcgggggtgctgtgtcagggggagggtcggggaaagcgggcggggggaggctgtctcgggcacggatatggggtaggcgggtgggaaaggcgcgagtggaaattgagggggaggatggggaaaagcaggttgtggggaggctgtcgggggacgggagtaggggaggtggggacgcaggctgtcttgggggggctgtagcgggagaatggggagagacgaatggggggaagctatctcggggcggttggggggctgtcgggggaggatggggagaagcgtgtggggga

SEQ ID NO: 13515 - DNA, 918 bp, Artificial sequence
  DNA replication origin
gcccgccgggacacccggaccccggccccgccccggccccgccccgagggctcatttgcatgcgtccgcggcccctcccggggcggctaaagcgacgtgtccttgtcccccgtgggcagcctcggcgcgtgtggccgcggatccccaggtaacccgggagctgggaactcgggtggggccgcggggaggggacccaggggcaggacctggcggtggggttgtgggggttgtgggggctgtggggaaacccgggtgggggacttctggtctgtctggaggctccacggggcccatccacgtggtgggattgggggctgccgccaggccctggccattgccgacctctgacctccacggctgccccatgtccgcagcggttctggccccagtgctgtcccatgtccgcagcggttctggccccagtgctgtccctgcacgtgtcacgtccagcggggcaggacagtgagagcctggtggctggagtcactgcccgcccacgggatgaagtcagtgccgcctccggcagaggcgccccctaagctagggtgggggacgcattctaggcaaagtgtcaaaggtcaccgagctcaggaggcactctgggggcagtgaggggcatgagccagaggaagatctaggggtcaggatgagtcatcctgggggaagggggacgcagggacagggacagattccagaggtctgtttgaggtaaagcaagggcgtgggtgtgtgtggggtcagcccagggctaagcgtgtgaacagaaggacctccagtcgcagagcgccaacccctgcccctggtaccattgctgtcagcaaggaggaggctgccagggacggcaccccagcgggtcccctgcccatgtggggtgaccacagagtgtcctgtgttctggatttcagctccaagggcctc

SEQ ID NO: 13516 - DNA, 754 bp, Artificial sequence
  DNA replication origin
gaaaacctgcaggtaaaccttttcctgggatctccccttgcccagaagtcagggtgaagagacgttagttccaaggctaaggaggcctttcaactcgggctgagactgcctggctcaatgaaaaatcaggatccaactgggccctacctagaggtttgggcctcacgccgctgtccagggccacagccgcaactaggccactcgctggtccccagcggggcaggaaaaattgctccagggaagtggctgaatgttcgggggaaaatggaaccgctgaggccgtgtccttgtggggtgtcaccgcccatctggggctcgtggcttggagggactggggctgggaggagcaggccaggcagctgcggccaccgccacccccacccaggactgggcgctaggtgccctctcggaagctgtggatctgcgtggagtacctctgcaggtggccctggggctgggcctccgtggcccccaacgcacccccagccacctgctgctgctgctggtagtgctggtagagcttggggcccggcccctccaggcctgggaggcggctgctggacatggtcaggatggtggccgtcagcgatttgatgtagttcttggccagcgtgagcgtctcgatcttggagagcttcttgtccgcgcgcacgtgggggatgacttcacgcagggcctggaaggcgttatttagcttgtgcatccgctgccgctccctctcgttgctctccagccgccgctggatgctgctgtc

SEQ ID NO: 13517 - DNA, 1721 bp, Artificial sequence
  DNA replication origin
ccggtgcaggacacagaggccacccccggggaggggacgcccgacgggtccctgccgaacccggggccagagccggccaagggtctgcggagccggccggcccgggccgcagcaagggctccgggcgagggcaggcgcaggcggccaggaccctccgggcccggtggccgtcgtgacagcagcatccagcggcggctggagagcaacgagagggagcggcagcggatgcacaagctaaataacgccttccaggccctgcgtgaagtcatcccccacgtgcgcgcggacaagaagctctccaagatcgagacgctcacgctggccaagaactacatcaaatcgctgacggccaccatcctgaccatgtccagcagccgcctcccaggcctggaggggccgggccccaagctctaccagcactaccagcagcagcagcaggtggctgggggtgcgttgggggccacggaggcccagccccagggccacctgcagaggtactccacgcagatccacagcttccgagagggcacctagcgcccagtcctgggtgggggtggcggtggccgcagctgcctggcctgctcctcccagccccagtccctccaagccacgagccccagatgggcggtgacaccccacaaggacacggcctcagcggttccattttcccccgaacattcagccacttccctggagcaatttttcctgccccgctggggaccagcgagtggcctagttgcggctgtggccctggacagcggcgtgaggcccaaacctctaggtagggcccagttggatcctgatttttcattgagccaggcagtctcagcccgagttgaaaggcctccttagccttggaactaacgtctcttcaccctgacttctgggcaaggggagatcccaggaaaaggtttacctgcaggttttccaaggccaaagccccagcaaggaccccctctccaacctttgttatagggctacatggggcctgggctcagcatcctcatttggggtaaactgaggcccgggacaagcccggcagagcctaaggctgctcggggagtggggccaatcagagatgattggagctgccagaaactctaatcagatgacctccaattcatccttaaaagttgaatggtggggaggggctggagtctcttcctccctcctcccaagttggggctcctggatgtgttgactccaggctgtgcctggttgtggagggtctggggcagggtgtgaggggtgctgtggaactggagcaggagacagggctgggtgttcctggtgcagcccttctgggcatgggagagaagccccaaggccctgggttgctccccaagagcagctctgaggcctcctgctcagccctggcctgtgtggggagcgagtgtgccccccacccagcccctgccaccgccgttacttattctcactgatgtggggttatcatataattggcaccatgctgtctgtaggacattatgacgtgcttgggttctggtttgagttggcagcccgttgggtctctctgcctggtggagccttggggtggcaggtacgtcccttcccccgcccaggtgcttcatcctcatggccaggcctggtggcttggcacgtctctgctgccccaagcccagcttccttctgctgggcgttcctgccccactggctctgccggacttggctactggactctcccctccctcatgcctctg

SEQ ID NO: 13518 - DNA, 924 bp, Artificial sequence
  DNA replication origin
gccgaatctgagtaaatgtcagcccaggaaatgcccgcaggctcccggtgctctctggtttcagaatagtttgttttcatgaacaaataagagaaatgtcactggcacactccacctgtgagcgggacagagaacggggcctggctggggctgggggtgggggtgggggcctggctgggcctggatgggggtgggggtggggaggaggccacctctgggcccctctttctacccgccccggggttggctgctttcctcctcctggctccagaggcagaggccctggagcctggtggtcaccttggggtccctgggctgtgtcccctctccactgtacagaaaatgcaagctggtgaccagtgggccctggctggaggtgccccccatcgccctcagggacgtgtccatcatcccggagagcccgggtgccgaggggagtgggcacagcatcgccctctgggccgtcagcgacaagggggatgtgctgtgccgcctgggcgtgtcggagctcaaccctgcggtgagtgccggggccagacagattcttcttgaaatgagacctttgctctggagtccggcagggctcagaccctgctcaggacaagcccctaggaccagtggacactgcctgtggtccgagtgggtccctgtgccctggggcagttggcccaggaatgaggcgggtggggcgggggtgacagaggtgggccaaggggacactgcggctctttggcacccagtccttggtggtcagcaccccggtgaggtgcacacgcccacgggggcgctttccctgctcgcaggaggatgagatgcgcccaggatttcaacaagcaccgagatcaggccgggtggggctgtgtgactcccggctgtcccccagccacctatgctgcccacgcgctaggcccatttctgctggtc

SEQ ID NO: 13519 - DNA, 860 bp, Artificial sequence
  DNA replication origin
ccatcacctgcaagggggacatcttcgtgagcgagcccagcccagacctggaggcccacgagcaccccctgccctgcgaccagatgtgagtgagccgcactctgggtggggtctggggcctggcctcaccccgagctcgtggttacagaagggggatccagaggactggagtccacgcagggtcaagcttctcgctgaccaggcagaggcacggccactggttcccaggcccccaagtccccctgggcctgtccaaagactccaagagggggaaccagaagccccactgggcccagggtgggtcagtgccgcccagcagcctctgagcatcgggaggaatgtggagtgtgggtgaggggcacaattctccaccccagggggcttccaggctgtagcaaagcagccacgtctctccacctgcccagggcacagacccggtgctcagccgcctccagctccagctgagcccctgctgcatgggcggcccggggcctgggggcagagaggagagagccgctgtgggaggagagtttgggggcgtggtcaaggcagagttggtagggtttgaagtccagcaggagtgggcagagagaggacttgacgtttggcactgggaaatgctggtggagactggacctgggggacgtggggtagccaggctggagtggggtgagggcagggctgggcgcacaagcctaggagacattgttctgttggggacattgagagccacaaggtggggctaggcaggttggctcacgcctgcaatctcatcactctgggaggctgaggtaggaggatcacttgaggtcagaagttcaagaccagcctgggcaacatagctagactcgtctctacaa

SEQ ID NO: 13520 - DNA, 1066 bp, Artificial sequence
  DNA replication origin
tagcacaggggaggggctgcagacaggggaaggggcactggccaccgtgcttccaggtcctgacagcctcgggctggtctctggaggccacagaggagcgcaatgcctggctcagagctgctgagcacagtgaggcgtccagggaggacagcaggcctgcccgagccccctgaccccggcctcctcccacaccccacacccccagggcacctggccatgtggatgcccccaggccctgcaggagcccttacccgcctggacagtgaaccatctgggcatggcacatgcctccaccacgcagccgcctcccgacacccaggcccacagcgggtggtcatccaccccatacggctcctccaagcccagtgggaggagccccagagaggagaggctggtggtctcggggaagccagcggccgagtggctgggcactttcttggcctccttgaggtcaatattggtccagggcagctcggccggggtgggggccgggccggggtgcgtgttgggtctggcctccctgctgccctcggctgggcaggcatcttccacggtatcttctgcggtcctgccagcccccaggcctgaggctgagttccctgtggcattcttggaatcgtctagaggttctgcagggagaatctggccaggccctggtctctcgacttccgaggaggcatcggtgtcgctgggggcagactcgccactacccctcacctcatcaccgaagaagcagccggcactggggacaaatcagggcagacccatcactcccttgcaggggaacaggcgctgtcaggcaggcccagctccagcgtgctccaccatgactgcctgtggaaacttgggcaagtcagaacctctctgaactcctgtctcttcctctgtgcaaggtatacatcagcacctgcttccagggagctgacacctgggccaccctgcagaccaatcacatccacatatctgagagtgaagatctagaattagtatttcttctttttttgagacggagtctcactgtcatccaggctggggtgcaggggcacaatctcagctcactgcaacc

SEQ ID NO: 13521 - DNA, 1996 bp, Artificial sequence
  DNA replication origin
gctgcaggctgggctgaagaatggaagtccggatggcaggcgggcgggaggtgggtgcatgcccaggtgcccactgggcgctgactgctaccatttctcacttccttccttcagatcccctcgaaggatgaccccaaggagctgcccgaccccttcaacgacctctctgtagggggctgggagatcacggaggagcctgtgggccgcctgtcagtgtgggctgtgtctctgcagggcaaggtaaggccaacccctctccctgccctggctccccacgatcccacctcctgtgggtcctgtcctgtgcaccccctgggtcttgctcctccccggagccccggcccccccaccccatgcctgctcctggcctttctctcctccgagcccccagcgtgctgatcagtgcccagcctcagctcaggcacatcaatgcggcctcctcaagacagtttctgagctccctgctggtgcctcccacagtcttcaggaatagtgtgggggtgggtgtgtgggtgacagaaggtgtgccactggacggatgggtggtgtgtgggcagaaggatggataggtgggtgtgtggatggatgggtggatgggtgggtgtgtgggcagatggatggataggtgggtgtgtggatggatgggtggatgggtgggtgtgtgggcagaaggatggataggtgggtgtgtggatggatgggtggatgggtgggtggatggatggatgggtgtgggtggatgtgtggatggatgggtgggtgggtgtgtggatgggcggatgggtgtgtggatgggtgggtgagtgggtgggtgggtgtatgggtagatggataggtgggtatatgtgtggatgaatggaaggtatgtgcagatggacagatgggtgggtgtgcggatggatggatgggtggatggatggatggatgggtgggtgggtggatgggtgggtgggtgtgtagatggatggatgggtgtgtgcatggatggatggctgtgtgggtgggtgggtgagtgggtgagtgggtgtatggatagatggataggtgggtatatgtgtggatgaatggaaggtatgtgcagatggacagatgggtgggtgtgcggatggatggatagatgggtggatggatgggtgggtgggtgtgtggatggatggatgggtgtgtaggtgggtgggtgagtgggtgagtgggtgtatggatagatggataggtggttatatgtgtggatggatggaaggtgtgtgcaggtggacagatgtgtggatggatggatggatgggtgggtgggtaggtgggtagtggatctgtggctgtttagagagaggcaatcctgtctcaaggagtttgtgaactaagcagaggaatcgaagcagcccctgagggcagcagaggccccgagggtcctgaactcagggcgctgacactcgagtcatggctttctgttgcacagcaggattcttcagtcgctctcaccacgcattgaccacagctccccagtgggcttagcagttattcagaagttgccagttttgtcgcagcccccctctgcggccacgttggcctgggaacaggcgaacacagttgcttcctcagccctgctgaagggcggtggcgaggggccgggcagagtgagggagctgccccaggactgagcccccatcggggggccatggccatctggatgcaaagagagagaggggagaacaggggctgcagagcagcgtttgtgtcctggaatgtcggccgtgagctggtgctgcctgcaccacacctgtggtccatgagaggtggcaccaggacctgggcttctgtagaagctggggagacagatgggccacctgctagccgaagggaggctcctaggcctggtcctgcagggcctgctgtagggggatggtggcaggattgggaggctgggtcccctgtctgaagacagccctatggggagggtcccttgccctttctggatcacgaagtgacatgtagtctcccc

SEQ ID NO: 13522 - DNA, 1766 bp, Artificial sequence
  DNA replication origin
cccacaccctgctcctcctgacgccgcacagccacgcacccaggtaccctctccgccaccccttctcctcgcctgcaggcggtgtccacaccgccctctccgctcctgcagaccgggtcctggagggcggccgggcggtccacgggccggtgtcgcgccgccagagagaacgcggcaactcgcttcagccgactctggactcctgacctggcgcgaccccggaagtgggcgggcgcgcgacctcgaagccagcaccgacgcggcgcaccgcagccaatcgcacgtcccaggtcgcagcgtcctggcgaggctggccaatgggcacggggcctgatgccgcttccggcccaccctcttgcccggtccccgggagggccggtccgctcctcccggacgccgaggacctaccaccgcgacttcgccccgcccggcgcgggcccaggtgagtgcagagtggcgccccagctgcagcggcggccagggccgtgggaaagaatggggcgatgaagggctgggcacgccgccttccccaccacccccaggctgtttgctcgcggggagggaggaaggagggaccgcacttgtcatctcgcctgcacacctggaaggtgccgcccccgtcccctgccctggaacgcccacaggctagcgaagttgcctggtgcaggtgacgcccccattccagcctttggactggagccataggagaagcggatcgcgggatcctggttgttttcgagaatcacgcagcaaggggcctgcctatccctctccctgggtattgatgggagcaaatctgcttgtcgtaagattagctttggcagatggtcagggcccagagctccgacatatgctactggtggcagtgcaggggccccacctgtcacccaagtgcacagcactgggctgaacgccaggctgactcaggacacctcctgcccggtggggctgggcggaccctattcttcaggaaagaatcaactaccatgcaagttctgctgctttttcccaccttttaggaccctgatgtcgcttttgaacagcccctgcacctggcagccagcgagctactgtagtaggcattgccgactgtttgcataccggatgggagtgacagtgtaatagaaaaacaagcaagaaaccttttaggtaggactcctaaggctcagaggaagtaagtgcttgcggagcgttctttgtactgtgtcttttcctctaccacatctctgtccccgcctctcttgggtgctttttttggtctctgaaaggatctgtgaataaactgagacagaaaggcagatggctttgagggtggcgagcagaccttcttcgtggaaagactgaaggttcaactcaaattcatcttgtagaaattcttggtgaattcgaggctgctgatttggaagattttcctccatccctctaaccctacaaaacaaacaagtcccaggatccctgaatcatggggcttcatgttccaacccccctttcaagagtcctctgacccagtgaccctgtgtaagttgcctgatcagctcacagccagaaagtggcccatgaggagctagggggagcctcttggcagaggcagaaagaaagtgtggctgaccaaggatggttaccggatgtcaactgtagctaggaagtgacgacaggtgcctgggtctctactctgaagggagtttgtaaatacagcaaccccccacccctccctttcactgtagcagagtcttctcccattaactgcccagaagattcaatgatgt

SEQ ID NO: 13523 - DNA, 1443 bp, Artificial sequence
  DNA replication origin
ctgggggtggtggggaaggcggcgtgcccagcccttcatcgccccattctttcccacggccctggccgccgctgcagctggggcgccactctgcactcacctgggcccgcgccgggcggggcgaagtcgcggtggtaggtcctcggcgtccgggaggagcggaccggccctcccggggaccgggcaagagggtgggccggaagcggcatcaggccccgtgcccattggccagcctcgccaggacgctgcgacctgggacgtgcgattggctgcggtgcgccgcgtcggtgctggcttcgaggtcgcgcgcccgcccacttccggggtcgcgccaggtcaggagtccagagtcggctgaagcgagttgccgcgttctctctggcggcgcgacaccggcccgtggaccgcccggccgccctccaggacccggtctgcaggagcggagagggcggtgtggacaccgcctgcaggcgaggagaaggggtggcggagagggtacctgggtgcgtggctgtgcggcgtcaggaggagcagggtgtgggcgcccggcctggggcgtggagaggacgcagggaacaggtgtcttcctggtatccatcgaactgaaacgtagcccttgagcacacactacacttaaagctttactctttcgaggaggagtcctggaagcatatgtgattttgtgactatagcatggtgtggtgtcagtaacaggccctggattgctcaaactctattgtcagtgacaaaacccagtgtaagctggcctaatatattaatagtaatatgcgagtcctcccggggtggcgggcactgacgtaagtgctttacttgggtcttctcatttcatcctcccagcaacccaaagagctggcggcgtcattcccattttacaaatgcgaacacgggctcagagatggagcgactcacgttgtaagcgatggaactgggatttgaaaacactgtatcccgcctggcagaaaactggcaaggttaggatggagaaaggagaaaaaagaaagatgtcggccaggtgcggcggttcatacctgtaatcccagcactttgggaggccaaggcgggcggatcacttgaggtcaggggtttgagaccagcctggccaagatggtgaaaccccgtctctagtaaaaatgcaaaattagccaggggtggtggcgcatgcctgtaatctcagctactcgggagactgaggcaggaaaatcgcttgaactggggaggtggaggttgcagtgagctgagatcgtgccactgtgccaccgcactacagcctgggcgacaagagcaaaactccttctcaaaaaagaaaaaaaagggcatctgatggaaggctagatactacccgacattgagctaaaccaatgtcacctggttggacctagggacctattcctgctccccctctagttctgtctcatttctggg

SEQ ID NO: 13524 - DNA, 958 bp, Artificial sequence
  DNA replication origin
cggggcgggcgcgagccgcgggcttcccccgccctcccgggcccagtcacaagaccggggtcacgtgggcggcgggaggcggggctcgggggcggggccggcggggcgtcttaaaggggccgcgccctcccgaagccgccccgccggcggcgcctctgcactccgccccgccccgccgccgctgctctctagacctcccgtggcggggagacccccccccccgcccatcccccacgacgacccagagacgccccatagggtcatgacctttagggctcgcggatgcacccccacctccccctacgccccgatctcccaggccggccgaggtccccctaccggtggaggagggggagggcggggcctgagagggggcggggccgggtgggtcccaggccgccccaacgccagccctctgcccctatgatcgccagcgcttccagcaatacaaagggcacacccgggtgtgcacctcagctgcggcctgcgcggtgctcagctgcggcgcattccctccgtttgcctttttttggacaattaggtgattgacgggggtagtagccagtgcttacaaataactcccccgtttggggacaaaactataaatactgggcacctgccgcgtctcctcagtttccctaatcttcaggcagccctgccaggtgttttgcttacccctggaggacaacacgggatcgggctcagaagggggagggatttggctgtggcaggtgcgggtcagagcccgtatctaaacctgggtgttttctggcctcggggactgcgtcaggcgccctcgttgaaacatttcctcatacaaggcttcacgggttggccaggacaactttaaaacgaacgattggaacgttcaggattgcttgcgtccttagcgcctctgcaccttttcaggggcacctgtatccgttactgtattctgtctccagttttctcacctgca

SEQ ID NO: 13525 - DNA, 1436 bp, Artificial sequence
  DNA replication origin
agaggggcccgagccacccggtccgccgcgtccccgccgccgccgccgcgtcccccgccggggccgaccgagccgagccgggccggagcggcgggcgcggccgggccgccatggaccacaagccgctgctgcaggagcggccgcccgcctacaacctggaggccggccagggcgactacgcgtgcggcccgcacggctacggcgccatccccgccgcgcccccgccgccgccctacccctacctcgtcacaggtgggcccgtaaccaactttccccgccggcggcttccgaggtggcaagcccggtcgggggacgtgggtccggaggcgggtggggcccgcccgggggtccttcctggagctggaggtccccgggctggcttcgggacccggcgccgccgagggccagcctcccccccggggctctagtcctcgggcccgtcgtaacccggcggggccggatccctgccccagatgaactttgtgtcacgaggcgctcgctgttggcagattagcgccgaatcaggcccgcggtggccgtcccgagggtggaaaagaccgggggcttttttagcggggtggaggttgaggggacaggatgagtagtccccgtggcggtccgatttctcctccctgcaccctaatgacctgctttcccgcccacagggatacccacccaccatcccagggtctacaacatccacagccggaccgtcacccgctatcctgccaactctatcgtggtcgtaggaggctgtcctgtctgcaggtgagtgggtctgcagcctggggactggccctggaagctctgaggacccccgccctaacccccaggacctcacagctctgcttgtgggagtgggtccggcttgacttggatcttgaccagagccctttatgggagggacagacaggctgcccgaatgcggtgtgggagagtgcgggtccgctcacccttggctctgaacacattttgtgggggcaaaagggtggattccttttcctagatcttggggcattgcaccccaagtgattgggatgtagaaatggtaacaacgggactcgtggtcctttcgtctttgttctgggacttgcaaggaatcaggtgtctgctttttccttcactttccgcaagtttactctgcagttgatcgtcgaaggtggtggaaggtttcattttcccggaaggggcatttggaagtaagtgcaccagcaggacagacctcagtgggagaagcgacggccgtaagagctgctttatccaaagttggcttgaaacgctcttccacgagctggaccaggatggaaaccccgtgtttctttgaggcaggagttatttttttcatatcctcgcattggacctgcacacgctttttggtttttatagggccccgaggtgcagctagaggcttgttttgtggaggttttgaggattca

SEQ ID NO: 13526 - DNA, 1706 bp, Artificial sequence
  DNA replication origin
atagtagcaatctcaatacaaatgtaggaatttctcaaatttcgaatttctcaaatttctaaagatcgccctctatgaaggcaacacacgaatagaagagtttttggtcacagtgactgagcatcaaaaacgctgtgtcaactgtgtctactctccctacctgtaaggcataatttatatgtgacagtatacactttgtgtgttaagataaacggaacggatctcttggatttcaatacataacaaaaatgttcatgttcttctcttactttcattcaacaaaagttaatagactcctctgattttaggaattcagaccttgaaaacccagaaactaaaattttaggtttaaaaaagtctatcaaaatgactaaacttcctgattcaagcaccagggacagaaaaaagataaaacacaccaaccaaccaaccgaccaaccatttatttataaccttaaacatgcctatacatgaacttagagaacgttaaagtttcaagggttcgaagcgcctaggctgaattaaaacaaaagttgttttgtgttctattaatagcagatgattaacagatatcttatttcacctggaattcatttgtaagtatgtaaactaaacaggccactaatcctaagtctctgtctgtgtctggaaaaattctctcctaatacatgcaagttaagagaccggctatcaacgcattccttaaggttaggtcaatttcattaaaacctcggttgttctttgacttcaagaacctcaccaaataacccatatataaaagccaagttcaactgaaaggtgggagaggaagggtctaaggaggagggcgtttcccgggagaacgcccagagctcggctcacctggcgatcctaattacaggggagtttcacccccacattcttgggcgctttcttttcttagaggaaactcgagcttgtgtctttggtcccggagggcttaagcccggcagccaggacagcacgggtcactgattccaagaagttgggaggaggacgtgggccccaccgacgcacaacagacccctccccaacttaagtgcactagttgtaaaatgtgtagctggtcaggggatggggggtggtctccagagctctgagggtcagggaagaggagaagggacggggaggagaagggacaggggaggcggagaagggccaggagaggagggggagacacacggggaaggaggaagaaccaagaggagggggagggggagggggagggagggggatagactggggagaagaagggacaggggaggagggggagacacacgggggagaaggaagaaccaggaggaggggagggacagtgtcgaggggcaggggaggagggagagtgaacggggagcggaggggcagagggagaggtacagcggggcgggaaagagagacagggaagaagcacagggaggaggggagggaaggaggaggaaaagtaggggggaggggatggggagggactgggaggaaggagagggccaggggaggaagaagaggggctgtggagggccaggggaggagtgggagagaccgggagaggtggaaggacgcgggggaggggagctggagggagggaaagtaccttcccgcgtaaagtccccttctgaaccccgaggtggaaagccctgacctccctgagccccgggccctgggcttacccggtaggtgctctccgtgagccg

SEQ ID NO: 13527 - DNA, 864 bp, Artificial sequence
  DNA replication origin
gggaggacgcggctgggcctcgtggccgccggactccgggcagcgggagggccggggcgcgactaaggggctctggagggtcggccgccgccgcagccgtcggcccgagagtgcccgcgcgcgtctccgctgcgaaaatgtcaaaacttgcggcagcgccgccctggccttcttcgaggagcagaggagaagcggccggacgccgccagaggaagctgggcgggccgggcggccccacctgaggcgggcggggcagacgggggcggggccgcagggccggaggggcgtggcgtacccacctgaggcggcctggtgagcggggcccggccggggtgggcggggaggaggcggggccaggcagctggaatgggcgtggccagagggaagcgggccccccgagtgggcggggtcaccccacctgtggcggacagggcagcgaggccacggtgcgccccctcgcggctctcccagagctccggcgacgtagggcccgagaccctggagtggggaccggtgtggagtgggctgctcgctttgctgttttgctagggcaagggcagcctgggggtgtttagactgtggtcctggagcccttgtttgcctcgcgtggtgctggccccggggaccccgaggcccacttcctccatgagggcttccttcaagccctgcgttttggggaccaagggaaggggccacattccccagttgtattgatttccctgattgatctcttcttgccccgccgctcactgaccccaaaagttagagggacccgtgggggcatcggccctcctaggtggagaaaacgggctgccacttgcagttttgaaagctcctgatatatcaaaaaattaataaatgcca

SEQ ID NO: 13528 - DNA, 1562 bp, Artificial sequence
  DNA replication origin
tctgcctcccaaactgctgggattacaggcgtgagccaccatgcctggcctttgtagactaattctattaccccaaaaggttgccgggcgggaccgccacaatgaatgacaaccctgactcaggggagtttgggatggccccaaacaggtgggtgctgactgttctcagaggagtctcttcctcttttcctcactggattctcaggtaatgcacagacaaaagtgcagaaggaagtgtcactggctctggtttattttaatttttttttttccaaagagctttgattaatagaactaaaaaagaacagagtatagccaggaccaaaattggaggtaacaaatccaaactgtatccaggctgagtgttggctcgggaaaacccacttcatggagaagaggcgccttgagggtggacagggaacctgtcagctttccatgggcggggcctggcttgaggggcggggctctggatgagagtgggcggggctctggatggggatgcacaggccctggctggcaatgggtggagctctgatggggtgggtggggctctgaataagaatgggtggggctctggctgggagtgggtgcggatctggatggggatgcacaaggccctgaatggggatgggtggagctctgggtggggtgagcggggctctgaatgagaatgggtggggctctgaatggggtgggcagggctctggatgagaattggtggcactttgaaaggagttgggcggggccctggatgagaatgggcgtggctctgattggggatgcacagggcctggctggattgggtggggtgctggatgagagtgggtggggctctggatgagagtggatggggctctggatgattgtgggtggggctctggctgggggtgggcggggctctggctgggggtgggcagggctctggatgataattgatggtgctttgggaggagttgggtggcgccctggatgggggtgtgcaggtctctggacatgcatgggtgtagatctgaacctgtcagcagtggttggaagaggggtaatgggaggataaaagcaggctgtgggaaaaggtatggttcgggagagaccatggcctctggacctagaatctagctctgctgcttgtctgctgcataagatggacaagtcctttgccccagtctcctcatcagcaacagtcacctcatgcagatcaaatgggaaggtgcctgtgaggcactcacatggtgcctggcacgtggtgggctctaggactgggttcccgtttttccttcctctgggtttcccatcgtcttccctgcagagggggtcaaggcacatgagtgtgtgtgcatacctgtcccctcccaagacttctatgagactcagtgcacctggacgtgtcttccccttggggaacatttaatgcaacagaaaccaggagaccgagttctggtttcagccatgccactcactggccatgtgaccctcagctttctagacacagtcgtcccatctgaaaacgacaggtttgagacaagagaagttatctccagcttccctacaaagcctccaaagtc

SEQ ID NO: 13529 - DNA, 1002 bp, Artificial sequence
  DNA replication origin
agcagcgaaggcgcctcccgcggagcgccccgacggcgcccgctcgcccatgccgagctgagcgcggcagcggcggcgggatgctggcgctgctggccgccagcgtggcgctcgccgtggccgctggggcccaggacagcccggcgcccggtagccgcttcgtgtgcacggcactgcccccagaggcggtgcacgccggctgcccgctgcccgcgatgcccatgcagggcggcgcgcagagtcccgaggaggagctgagggccgcggtgctgcagctgcgcgagaccgtcgtgcagcagaaggagacgctgggcgcgcagcgcgaggccatccgcgagctcacgggcaagctagcgcgctgcgaggggctggcgggcggcaaggcgcgcggcgcgggggccacgggcaaggacactatgggcgacctgccgcgggaccccggccacgtcgtggagcagctcagccgctcgctgcagaccctcaaggaccgcctggagagcctcgaggtagcggcccgcggggagcgcgggggacctggaatggggacgctcccgagtcgggggcggaagactcgggaggatggggaaagggggcctggccctggggagggtgtgatcgtccgtgggggtgagctggacttgagggtgaaaggcggggatctagatcctgctcgggaactcccctgcgtggtatcccttcccacaccgctgctcttgctggaaggaaacgtttaaattccacccccgcgcgtcgggactgccagcgggatccgccgagcacttcccgaggtccgggctagcgaacccagacggccaagccgcgggcgccaaatacccggggacgcggtagcctctatcctcttgcaaatctccaaatctccgcgagccgggatgcgctcccgcaggccgtgcgggttgctgcgaggctgccgcgggaggtcagctgccccgggcatgtggtgtttctttctttaaatcaggtcaggctgagctagagggggcg

SEQ ID NO: 13530 - DNA, 1060 bp, Artificial sequence
  DNA replication origin
ggagagaaggaagagaaagagagggaagtagaggcagggagggagggagagaaagagggaagaagagaagaaaggaaggagagaaaggagaaagagggagaggcagggagggagagaggaaggaatgggggaagagaaagggaaggagagaaggaaggaagagagagagggagagaaggaaggaaggggagagagagaaagggagggagagagggaagtgtagaaggaaggaaggagagagaaaaagaaaaagagagggctgggcacgttgcctcacacctgtaatcccagcactttgggaggctggggcaggtggatcacaaggtgaggagttcaagaccagcctggccaagatggtgaaaccccatctctactaaaaatacaaaaattaggcaggcatggtggtgggcgcctgtaaccccagctactcaggaagctgaggcaaataattgcttgaacctgggaggcagaggttgcagtgagccaagatcgtgccactgcactgcagcctgggcaacagagcaggactctgtcagaaaagaaaagaaaagaaagaaaatgttcagacagtccccacttcacagtggctcaacttataatttttcaactttgcagtggtgtgaaagggaaacctattcggtagaatccatactttgaatttcgatctcgtctgggtctagtgctatgcagtccaatactctctcaacgctgagcagctgcagctcccaggaagccatgtgatcaccagggtagacaaccaataccctacagtgttctgtgtcgccaggtaattttgccaactggaggctaaggtaagtgttctgggcacttttaaggtaggcaaggctaagtggcgatgtctggtagattaacatgtattaaatgcatcttctgtttatggctttttcaatttatgatgggcttactggagcatgaccccacctaagtcaaagagcatctgtgtatcacaaactctaggggaaccactaagaaaacaaaattaagtataaatgagatgctgtgagagtaaacaaaaggaaataataaaatgcttaattaa

SEQ ID NO: 13531 - DNA, 1306 bp, Artificial sequence
  DNA replication origin
ttggtccccgctcgtcccttgggtggggacactccctgtgctctgcctgcccttctgcatctccacagaagccctgaccactgtcccatgctgccatctgctgacccccagggcccttccctcaatgctctgcacgccaggggctggggggcggtgacttctcatgcagattgtagcccctggggatgcacctgctgaggctggctgtcagtcattcactcagcaactgtcctgcatctgcagtgtacccagctgtcttgggtactgcagatggcagcgaggaaaacattgtttctcctcctgcaggaactccatcctcatgggctgggaggggcgggagaggggaaaggggaaggttgtgtccggtagtgctatgtgccacattagggtaggaaggtggcatcaggagtggtcagggaagaccattctgtgcgggggggggggcgggggggggcgggggggggcgcggttcatgagctgaattgcatccctcccaattcataggttcaagtcttaacccccagtacttcagaatgtggctgcatttgcagatacaatccttaaggggataattaagtttcattgggggtcatcagggtgggctctaatccaacaggactggtgtcattataagaggtgaggacatagacacacatagagggatgaccatatgaggacacagagaagacggctgtccacaagccaaggacagacacacaagtcctgttgtatcaatcttgaatttctggcctccagaatggtgagactaaacatttctgttgtttaagccccgcagtttgtaggactttgtaagggcggccccaggaaaccaacacagggatctctgagtacaggctctgggcaatgggagaatgagcctgggggctgcctgggaagtgttccgggctaaggcctgaggtgggagctgctggggtgttccgggaccagccaggaggtgactgaggctggagctggagtcaggctgcagggaggggggtggaggctgtgacctgcctgatgggttcctggcacctcaggattgcaggggccaggacccaagcagagggatgcagtccagcaagtgggtgaggtgggcggggctcagacaccagaccaaattgaggactacctaaaacaggtcctgggcggaagccgctttctataagacatgcccatccctgtgccatgtcagtttaccgttgctatggcaacaccaggaagttactgcccctttccatggcaacagtcctgacaaccaggaagttgccacccctttcctagaaatctctgcataaactgcccctta

SEQ ID NO: 13532 - DNA, 991 bp, Artificial sequence
  DNA replication origin
cccagagagctgtgggggatgccgtctccagggtggagaaagaaagaaaggaatccttgcctcctgggtggcttttctgcagacgtgaatgcctatctctgctaaccaggggtgactgaccaccagcatccgtaacaatgcggaacagattatagtgtatggagctctgcctccaggcaggaaaatatagagaaactgaggctcagaaaggaaaccaggtggcttcaatgtcacccaacaaggcagggcagagctggaggcagattcagctgtcctaacttccagaccagcctactgttacttttccagtgaaatcatctagtgagattttcttaaatccccctgcccaggtctcacccaacaccaaagaaatcagagtgtctggcagtggtggtggtggtgtggtggtgggtggtggtggtggctggtggtggtgggtggtggaggtggtggtggttggcagaggtggtggaggtggcggtggtggtggttgttggtagtggtgatggtggtagtggtggtggtggtggtggttggtagtggtgatagtggtggtggtggtgacggtgatggtggtagtggtggtggttgatagtggtgatagtggtaatggtggtggtggtggtagtggttggtagtggttggtagtggtgatggtggtggtgatagtggtggtggtggtggtggtgatggtgatggtggtggtggtggtggtagtggtggtggtgatggtggtggtggtggtagtagtggtggtgatggtggtggtggtggtagtggtggtggttggtagtggtgatggtggtagtggtggtggttggtagtggtgatagtggtgatggtggtagtggtggtggttggtagtggtgatagtggtaatggtggtggtggtggtagtggttggtagtggtgatggtggtggtgatggtagtgggtggtggtggtggtggtgatggtggtgatggttggtggtggtggtggtggtggtggt

SEQ ID NO: 13533 - DNA, 885 bp, Artificial sequence
  DNA replication origin
gtagctaggactacaggtgcatgcaacgatgtctgggtacatttatttttcttttttgtagagatgggtgggggagggtctcactatgttgcccaggctggtcttgaactcttggcctcaaatgatccttctgccttggcctcccaaagcactgggattataggcatgagccattatgccaggccctctgggttgtttctgggaggatggagggatccagtgtcttaggggaggaagttgagggccacctggagcagggctggaagggggcatagtccttgctgatggggaagattacgttagagatgggggtggggagtgggggagggggttagcaaccccctgatgggccattctgatgaaaagtggagtgttaagaccaggtcctgagggggtaggagaaggggtcagggacagctctcagaggcaggattggctgagggacgtccagggccaggtggccttgtttcagtttaaaggtgtccagggctgtgctggagcccggaaaaagccgcctacaggcagcgttgagtccctgaagctctgtggatgtgacgtctggccgagaaggacggctggcacagggcactccctgtagcagggcagatggagaattcagcgagagccagaactgagtgccagatgggcctggagccgtgtcagcctgctgagaatccccggagagccgacgggcaccaagcccagtgttgttgaaatgtggcaggacaaggtgaccccagatggccggcaggcttgagggtgaggaagaggctggcagatgggccaatggtgggagaaagtctgtgctgtgatttcagctgggttccccaaactcgcccccgtgcttgcacacggccagcaggtacgcacacctgtgtaggtgtg

SEQ ID NO: 13534 - DNA, 1007 bp, Artificial sequence
  DNA replication origin
tttttagtagagacaggttttgccatgttggccaggctggtctcaaactcttggcctcaagtgatccacccacctcggcctctcaaagtgctgcaattacaggcacgagccaccgcatctgtcctatttttatatcttttgtagagacagagttttgccacgttgcccaggctggtctcagactcctgggttcaatcagtccacccgcctcagcctcccagagtcctgggagccaccatgcctagcccaggcatccttattaacaatatgcaatgccttctccctgcaagactcactacaacactgtgagttgagtagagttactgttggggatgctggttttagcagtggcaactgctggggcaggggtgatggtgatgagggagggaacactgcaatcatggtggctcatttggcgcaaaagtgtttgtgctggggacgtgtggtcttggaaatatgtgggagaagacattggcatggttgctttcggtccacaaagctggcattggggcaggtggtggcatgggcttatagatgtgggtagggtcggggtcattgaggtgacttggtgagaatgcttatagagtcgttagtggtggcaatggtggtcctggaagagttgtcaggaaagcatatggtaatggtggtagctgagttggttacagttgttagtggtgctggtgttgatggtggtgctggtagaatcgatgggtgccatattggggttgacagagttggttgctggtgggattggagagtttggtggtggtggtattggcagttggccagcgctgatgttggcggtcactggagtcagtggggttatggatggtgctgatgctagcgggctttgttgctgaggaccttggtaaggctggctggtaggagcgtattggtggtggtggcaggatggacaggcttgtgctgcccatgtggcactggagcagaaggcgaggtgtcacttactggagggccacacctggatcttgtggtactgatgtgtcttg

SEQ ID NO: 13535 - DNA, 1232 bp, Artificial sequence
  DNA replication origin
agggggcgcggccgtgggaagagacccggagagggaggacgcggccgtggagagggacgcgggagcaaggggcggcgggaggaggaggagggcgcgcggcgcggctgacgtgggccggggtcgcgcagcgggctgtgggcggcggcggcggcgcgcagcgacagagcgtcccccggcgaggacgagcgagcacggcgcccgcacctccccgcaccgcccgcgctgcgcgcccggaggagcgaccgccgcagttctcgagctccagctgcattccctccgcgtccgccccacgcttctcccgctccgggccccgcaatggcccaggcagtgtggtcgcgcctcggccgcatcctctggcttgcctgcctcctgccctgggccccggcaggggtggccgcaggtaaggcgctgggcaatccggcctccctgcagccgcagcccgcccggggcctggaaccgtctcagcgggcgagtgggcccgggagcagggattgcggaggtggcaccgtgcgccctgcgcgcatctccctcctcggctgaggccactgcagcgccctttcccctctcctttcatccttgttccccaaagtcgcctgggcactggagggggctccccgcaccccctggattcctgcttccacccccccaggctggccctgccctggaaaccgcgcgggggtggccggcgcatccgtcgatgcctggggaccatgcacccgctaagggaggggaggacgaggcagggaggcggggatgcgccagggtccgtcatcgcgccacaattccccagtcccccagggagcacgggatgggcaacgtttttgccttaaaatgtcgcctcatctagaggggtttcccaccgtgttggtgctggctttggggagatgcgaatttagagcccaggaggccaggctgccatttcctctctggtggtgatttccaaaatggacccggagctgacaggttcctggggtgtgtgtgtgggtgggggagtgggggaagcagggttgtgtgtctactgcccccacttccccaccgccagaaagccagcacccacctctctgccacattttgggaaccataaaaggacccagatttaagactattcgagggacagatgggacgtgggcagctaagaaggttgaatactatccaccacttttcaccccctcccccctcataaaagagcggtggagagagagagcaagggatctaatgaaaatttgtgaaag

SEQ ID NO: 13536 - DNA, 1436 bp, Artificial sequence
  DNA replication origin
cacagctgtcccagagccaggggccctttagaccagtagtccccaacctttttggcaccaaagacaatgtttccacgaatgaggggttggagggatggtttcgggatgattcaagcgcattacttttattgtatactttatttctattatgattacatactcaccatcatgtagaatcagtgggagccctgagcttgctttcttgcaactagatggtcccatctggggatgatgggaaacagtgacagaacatcaggcattagattctcataaggagcacgcaaccttgatccctcacgtgagcagttcacagtagggtttgcgctcctatgagaatctaatgccctgctgatctgccaggaggtggagctcagcgtggctcacaggccctgctcacctcctgctgtgcagccagttcctaacaggctatggactggtactggcggccaggggcttggagacccctgctttagacgccttgatgtcaatgcactgggtggtgcagtgatggtccatccgtgctccacgggccagagaggaggtcaaaggccctcactgtgtgggaggatccctcgcccaggtagccgtagcaaagcggaagcatagctgggaccagaacccaccgggcttccagcgtttaaggccagccaggcccctccagcttctaggagagcccagccctgctcctctaaggcaaatggcagtaactgtgtaggctggtcacccctcaccgcagtagcctgactcccacaaggccctcagtgacaaagaagttgccctgggcccagatacgagcaggagccccatcttaacagcagctgtgagagggtaaaccgggggatgacatcaagcccacggcaggggccgggtgctcaggcccctctatcaagaaggggcaagaggctgggcacagtggcttacacctgtaatcccaacattttgggaggctgaggcgagaggatcacttgaggccaggagtttgagaccaacctggccaacatggtgaaaccccgtctctactaaaaatacaaaaattagccaggcctggtggcgggcacctgtaatcccatcttactagggaggctgaggcaggagaatcgcttgaacccgggaggcggaggttgcagtgagccgagatcgcgccattctgggacagagcgagactctgtctcaagattaaaaaaaaaaaaaaaagaaaagaggaagcagcagcagcagcagcagcaagaggaatttcgaggcctttcgcccaacgcctggcgcaccttaagctctcaacagttcttgaatgaggagtagcatctcggagccacgagcgtgcagagagaaggcacctggaggagagccccaagggacctgcaggcggcttgcagcgcagcgcacgcccctggggacgctgagtcagagccggcggcatcggatccagggcggggagg

SEQ ID NO: 13537 - DNA, 1363 bp, Artificial sequence
  DNA replication origin
ccccgcagccccaggtgggctctggctggggcctaggggatcccggggcgctcggagcccccagctccatccctccgcggagccgccgcgccgcagaggcctccccgcgcctgagggccgcgcgcacctcccggggccgttcggacgcccgcccgccaacttaccccgacctcggcggcccggctcctgcaggcccggcccgcgaccccggcgacccccagccgagccctcgtcgcaaccgctcggccgcgcgcagtcccgcccccgcttaaagcggcagcacccgccgaccgagcaccaggccccggcgcgccgcccccaagtgggtgcggcctgcgcgggcacggggaggggcgtccgccgtccgggtgggtcccggccctttaaatccccgacagccttgacggggccgggccggcgcccaggttctaggagctcctttttccctgagtctcctcccaggagccaggcctcggggaatgcccgggtaccctgggggcggtgggcacctgggggggggcgcggcttcccgagttggcagctatggggtccaggtattgtccaccactggactgaaggtggcaggcagggtagggtttgccacccccactcctcgctcccggtccccgctgctctcctggggttcttctcggcccgcagaatggagaggaggccaggagggtctttgggaaggtgacggctggagatggaccgagaccctgttagtaaaagaaagtccgggtgggctttctggaagtggccgcccaggtgcagaaaggccccattgattctgcagctgctttacctccgaggctggatccacatggcaggcagagctacctccatcaaaactggatggagagaggcctcaggccaggccagagcaatgaagggatagagtgggatggagccaggggaggtggcatgggccggaccaaaaggtgtctccaagggaaaggtacagtcaggcgccatggttaccatgttacagggacagagtgtggaagcatgacatgaacttggccacctccaggccctggttccacctcctacaccttccttcacctaccccccaccctcaccccatttatcactaacccaccaagatcattatgttcccttcctagacacatttcacaccctgcaataaataaatgtttcagtgcccgtggataccctggaggggaggtgctcttttctgaaacaagctccttgctcgtttaatgttgccactcgagaacaaggccacagctgaaatgctgggattgtgaatggatgtttttagtaccagttaattctgccccaggagaaacaaaatggctcagaatagcccttccatcacggaagaggttgcctgtttgca

SEQ ID NO: 13538 - DNA, 1564 bp, Artificial sequence
  DNA replication origin
ccgggatcccctaggccccagccagagcccacctggggctgcggggccgatggcgtttgcggccgagctgagaggaagctgtgggaggcgcagcgctcgcgggcgcgggaattggcgctcggcgctcgccgtagctcggcctgggacgcggtcacggagcgcccgggacggcgaccaaaggagggaaccggagggccgtttgtgagctgagaggtcgggtgggacgttgggggcctgtccctccggaggcgccccccggccaacctggcacctccgggcctctacgccggcactggactcgttaggcccggcgcggggagcgaaggtagcggcgaccacagcgccccctctggcccggcggcgccgcctcaggccgggcttggcggggtctgggggcggcggggcagtttgtccccaggagtaggagcaggcccggcgccagcccggcctgggccttcggcgtccggggtggtgaagttgcttttcctcagacacgcagaatgggggcgtttccccccggccagggccccccaggctccgcgggaccccgggaaatggaagagttgacgacttccgtgggaagggggaagtttggacaggactagggaggttcttaggcagggagaggccgtgaccccgagtcttgggtcccctgggatggggatgggcagggagaggccgtgacttccgagtcttgggtaccctgggatggggatgggcaaggagagaccgtaaccccgagtcttgggtcccctcggatggggatggatagggagagaccgtgatcccgagtcctgggtcccctcggatggggatgggcagggagagtccgtgacccccatgccttgggccgatggagatggggaagggggtgtcacctgaaacaggcagttgccaggtcccctagcagggcttgacaaactcccccgccttggtttccttcttggcttttcctacccggagccagagggctggggcttctggtgggcttgttgtgggacacctgtgggcatgctctctgcatggaagaagggtttttggtgtctaggagagagtggccggaaggagctctctagtgtcacctgtgtcagctgcaaagcagtgtatccggtaggcctgcaaaggaggtcctggtgtgtctgttgaaagaaaacgaagccatgaaaccacctgttagtgcagagcaggattatgcaaggaggaggggtgaaagcaacttatttcaccagcttctcgggatactttgtgacacctgttaaaatagaaaccaagtctccatctgtgtgtcagctgggagcagccactgagtgcctgctgcctggcagctacaaacagaatttatagtttcccgtgcccgtcacgtaaccacagtctggaggggtgctgcttgggagcccacctttggcacttggggattttgatgtccgctgaagtttggaaaccagtcacacgtacgaccaaggttgccccaatccagcctgctgcctgcgttttgttgttgttgttgtttttttttttttttttccgagactgaaccttgctctattgcccaggatggagtgca

SEQ ID NO: 13539 - DNA, 1202 bp, Artificial sequence
  DNA replication origin
catattttgttttaaccagatagtttcatgcacttccattcaggacattttgtataaaaattgaagttaatttaaagaataagttgaagataagaaatgaaaattaaaatgatttgttctacaattttaaaaatgcagtaattaagcttttaaatgtgaatgatttaatctttctttcatctctgggaaactgtaccagacaaatctcgttttcacacagcaatcactcatgtgctgcaatcactcatgtgctgacacttgagagatgaaggcttggggaagttactcaggcagctgaagccacatcctgggaccaggagctctcagtgagaacctggcaagagagcccgccacgcgcttctctactagggagcccgcaggtaagtgggatggaggctgaatgaggagtaagaagcaacgtgttccagacagcacgagaagcagctgtgcctgtgcgcaccgcggtggatgtgggtgtgcacaatgggatgtggatgcgcagatgtgatgtgggtgtgtagatgggacacagtgcatacgcggggacacgcgtgtgtaaatgggatgtaggtgtgtatgatgggatgagggtaagtagatgggacgttggtgtgtagatgggacatgaggatgaggggacgcaggtaagtggatggggtgtgtggactagacgggggagtgtgaatgggacaggggtgagtagatgggacgggggtgcatggatgggatgggggtatgaggatgggatggggatgcgaggatgggacgggagtgtgaggacgggatggggatgcgaggatgggacgcgggtgtgtagatgggacaggggtgtgtatgatgggacatgcgtgtgtaaatgggatgtaggtgtctatgatgggacaagagtaagtagatgggacgcgggtgtgtagatgggacatgggagtgatgggatgcaggtgataggatacaggtgagtggatggggtgcatggacgggacgtgggtgcgtagatgggacatgtgtgtgtatgatgggatgggggtgcaaggatggaacaggggtgtgtagatggtgggggggggatactgtggggtgaggatccctgtttgacagaggaagaaacctgggctgaaggaaattggactcctttcctcacatcacaacataagaggcagagccaggagttaagctgtgagcctaggaaaacgcattaatct

SEQ ID NO: 13540 - DNA, 2432 bp, Artificial sequence
  DNA replication origin
tttaacaagataactgaaaccaatctgatgtcaattacagactgagctgtaaatcagaaccaagttaaaagctttacaagtattacaatctcaaaaatgttacttttatcttaccacataaataaaaatgtatctacattgtatctacaaagtgagaagcgtttcctatcagccctggcataaagaaatgtatttccccagaagcaaagatcccagaggaaactacctcctacgttacaaaaccagggtctgggtttgggtccaaatcattatttgatatctttatacaaaaaaacaaaaccttctcttaagacaaaagttgggccatgcaacaactatgggctctcaaagtaaattttagtttaaaaaaattacctattgtttgcatggattttaccgatgactttatggctgcgcatctgccataaagtgttcaaaacgctcattctctctttgaaaggacctgaccaaaccaggactttggagttctcacccgactgagccactgaacagaaaaatccaggggaaaatccctgacggggattagaatgaactttttagtttccttccagagctggaaatattcgagtttggaaagtcccggagcagagccgcatttgcaacacggccatcctgctttagggatgaattgaaactggaaagagagtagtaccaatgagagtgagaaagggaagacgaggatgcagcctggtccagaacctctggagcccggggggaaacaggttggcatcacatccgcgccaccaagtcgcaggcccgcggcagagcgttgcgctcacccttgaaggtggcactacagagccacccaggaaacacggacttttcattgaagacaaaatgaatcaaggagcctgcgtgtgggcagcttccaaagcctccagtgagtgtgggagtagggatcagagcctcacggcgctctgggttgctgagtgtgggggtgatggtgaaacaaaatgcagaaaaggtaaaaattgaagaagcagagttaaaagtagctagcggtctggcctaagagacaggaagtggcccagactgagactgaagagggctggaccagggggaagtgaagagagcaggactgggagcagctacaagataggattgaggaatttcaggctgaaggaaagaaagggtggaggcctcgccagacagcagcgagggggcggggctaggcaggaatgagggcggggcttgaaagtgaggggcggggctaggggaagaagggaggaggacggtgtgggggggtgagggagaaacgaaagaggatgggggagtgagaagagggtgggtgggggcaggaggggagaagcaagggggcaagtggaaggggaggtagcaaaatagcttggaagtggtgggaaagaccaggaggatgaggggagggagcaggtgggagggaaaacaggaaagcaagagagatgatgggaaagtggtgagaagtgagggatgggaccaggggaacagaggcaaggccaggagggaaaagcgagggggcaggtgggcggagaggatgggaagcgaggagaaggagggagggggtaaaaacggcggaggagaaaaaaaggagagaagcaagggggcgggaccaggaagaagtgagggccgatgctaggaaagaagtgaggaggcgggaccaggaagaagtgagggcccaggctaggaaagaagtgaggaggcgggaccagagagaagcgagggagctggacgcagggagaagcgagggggcggggacagaaagttaggaggcgggagcagagaggagcgagggggtggggccagagagatgggcggggtcaggtttggggaggaaaggtggggaagagaaaggaccacagggatggaggtgaaaggcaagggggcggggcctggggggagaagcgaggggtcaggtgctagggagaggaagggaagcgagaggcaaggggccgagccggggagaggtgaggggaaagggcctggaaggagatgcaaggggcggggccaggaaaagagaagcgaggggcggggccagggaaggagatgcaaggggcgtggccatgaatggaaatgagaggggcggggccaggacggagatgcgagggggcaggtgcgggggaacgggagggaacgcgagaccgagggggcgcgagcggccagggggcggggccgggcaacggcgagggggcggggccaggagggagaagcgaggggcgcacgccgaagggggtgacgaggtcctgggacaacggccggcgtgggggagggccgcttccaagggcgccctgcggggaattccggggcgggcgagggggcgccggggcgcgggtgggcctcccgccggccgtacctgtcagacggatcttgatgctggagccgttcctgcgtgtcccggggttcgacatctcccgccaacgatcgggcagccgcggatc

SEQ ID NO: 13541 - DNA, 1331 bp, Artificial sequence
  DNA replication origin
tcccgccaacgatcgggcagccgcggatccagcgccaccgccccccagcccggcccggcccggccccgccgccgccgcctcaaggttacggctccgggctgggcgccggggtccgagccgggacacaaactccgcggcccaggcgtccgggcggcaggcggatggtcgagccgggagatcggcgcttgctgcggcgctctgaccctcgctgcttccagccgagcccagtcccgagccgccgccgcctccgccgccgcctccgccgcctccaccacctcagagccggacgcccgccgccctcgccgcttccgccgctgccgccgcctctccgagccgcgcgcgcgcccgccgccgtgccggcccggccctgcgcgcccccgcgcctgcgtgcgtgcgcgcccccgccacgtacgctggggcggggcggggtgcgctgctacgtcgcccgcacgcctgcctcgggcgcgcggggcccggatcccgcgggttggggtcttcacccttcctgtggtcggtgggtgggagggtctggccccgagcccgggaagggagagcagagctggccccgggacccagcgcgcggtcgccctctgtcttgacccctgtctctgcgaggctctgggctcctgagtgactgaagagtggtttgcatgaaaccgtgggctgtgtccacaccaagctccttgcacacaggcgtgcaataccagtttttttcagttaagagctttcgatcgtgcaagttcaagggagggacttctcaaagagacaaagcccttaggtgtgttctgtgcaacgggtgtgctccactgacccataacaaagttgccagaatcgcagaagtgccatatacggacaaggaaaacgagatgagagggagggataaagttgagaggcggatgtttgttattatccattctgcatacaattttaccaaacaagaaagtggcattgtggtttgtgttcccatgtcttctgctaaatttccccttctcccggggttgcaggttagaaccaaaagctcatggctgggtacggtggctgtagcctgtaatcccagcactttgggaggccgaggcgggcggatcacttgagcccaggactttgaggccagcctgggcaacatagggagactccatctctacaaaaaatacaaaaattagctgggcatggtggtgcgcgcctgtagtcccaggtactgggaggctgaggtgggaggatcacttgagccccagagttcatggctgcagtgagctatgatcaggccactgcactacagcctgggtgacagagctagacactgtctcaaaacacacacacacacacacacacac

SEQ ID NO: 13542 - DNA, 985 bp, Artificial sequence
  DNA replication origin
agtaaatcggataaaggggcagtcactaatagttcagggtggggagtggctgtagctgtctttatagagacagagacagagaaagacagacggagagagagacacagacggagagagagacacagacggagagagagacacagacggagagagagacacagacggagagagagacacagacggagagagagacacagacggagagagagacacagacggagagagagagagagacacagatggagagagagacacagacggagagagagagagagacacacacagagagacacacacacagagagagagagacagacggggagagagagacacagacggggagagagagagatggggagagagagagacacagacggggagagagagagagacacagacggggagagagagatggggagagagagagacacagacggggagagagagagagacacagacggggagagagagagagacagacggggagagagagagacacagacggggagagagagagagacacagacggggagagagagagagacacagacggggagagagagagagacacggggagagagagagacacagacggagagagagagagacacagacagagacacagacggggagagagacacacacacagatggggagagagagacagagacggagagagagacggggagagagagatggggagagagacagagacggagagacggagagatggacagagacagatggacagagacagagacagacggagacagacggagacagagagatagagacacagagagagagagacagacagagataggatctctgctctgccaccgaggttggagtgctgtgatcctcgctcactgcagccttgatctcctgggctcaagcaatcctcccacctcagccacctgaatcactggcactacagccagatgccaccacacctggccaatgtttgtatttttagtagagacag

SEQ ID NO: 13543 - DNA, 1070 bp, Artificial sequence
  DNA replication origin
aaaaaaaaaaaattagccagggatggtggcatgtgcctgtagtccaagctacttgggaggctgaggcaggagaatcacttgaaactgggaggcagaggttacagtgagctgagatcgcaccactgcactccagtctgggtgacagagcaagaccctatctcaaaaaaaaacaaaaaacaaaaacaaaaacaaaaaaactagccagttgtggtggtgtgcacctgtagtcccagctacttgggaggctgaggagggagaatcgcttgagcccaggaggtggaggctgcagtgagcagagatcacgccactgcaatccagcctggataacaaagagagaccctgtttcaaaggaaagaggggaggggaggtagggaaggggaggggaggtaggggaggggaggggaggtaggggaggggaggggaggtaggggaggggaggggaggtaggggaggggaggggaggtaggggaggggaggggagggagggaaggcaggccaccactatgggtggcacttaacacatggggtgagatgttagaaaggaggaaagcccatttcatgcaacagaaacaatagaggccacttctgaaatacctgctctagctgccaccttgttgctacgcttcacatgttgccaatggcacaattatctcagttaatgagactgagcatgcatgaggaagaggccagtttggtacaaggggctgcaatcctgcctctgggaaaacccaagacagcactcagctctaagaccattgccaagggaactgctcatccttctgccacaacctggaagccatggctattagaaactcggcgcggtggctcatgcctgtaattccagcactttgggaggctgaggtgggtggatcacaaggtcaggagttcgagaccagcttggtcaacatggtgaaaccccgtctctactaaaaatacaaaaattagctgggcgtggtggtgggcgcctgtaatctcagctactcgggaggctgaggcactggaatcgcttgaacccgggaggcagaggttgcagtgagctgagatggtgccactgcactccagcctgggca

SEQ ID NO: 13544 - DNA, 1022 bp, Artificial sequence
  DNA replication origin
tggcacaattatctcagttaatgagactgagcatgcatgaggaagaggccagtttggtacaaggggctgcaatcctgcctctgggaaaacccaagacagcactcagctctaagaccattgccaagggaactgctcatccttctgccacaacctggaagccatggctattagaaactcggcgcggtggctcatgcctgtaattccagcactttgggaggctgaggtgggtggatcacaaggtcaggagttcgagaccagcttggtcaacatggtgaaaccccgtctctactaaaaatacaaaaattagctgggcgtggtggtgggcgcctgtaatctcagctactcgggaggctgaggcactggaatcgcttgaacccgggaggcagaggttgcagtgagctgagatggtgccactgcactccagcctgggcaacagagcgagactgtctcaaaaaaaaaaaaaaaaaaaaaaaaaaaggcatttgccaccttccttcaaaccaaatatcacaggaaatggcttgaagccgagaaagctcagctgcagatgagacagggtcctccccactccttgaggtatctttagggagagggttgaaggttatagagctagcagatcacttcgtgtagggacattctgcaaacccagcggcagagcagatccctgttgcttctccaggcttctctggtcacagctcggattccgcttctttcccttcacatggctgttggcagcgaccaggagagctgggtgccctgtcgttctttacttaagaaagtgttgacagccaggcagaggctcatgcccgtaatcccagcagtttgggaggattatttgagaccaggagttcaagacttggggcaacacagtgagaccccatctctacaaataaatgaaaaaaatatatagccaggtggttgctgtacaactgcagtcccagctactcaggaggctaaggcaggaggatcacttgagcccagtaggttgaggctgcagcagcgagttatgattgcaccactac

SEQ ID NO: 13545 - DNA, 2116 bp, Artificial sequence
  DNA replication origin
ttttttttttttttgagaaggagtctcgctctttcatccaggctggagtgcagtggcgtgatcttgactcactgcaatctccgcctcctgggttcaagtgattttcctgccttagcctctggagtagctgagattacaggcgcgcgccaccacgcccggctaagttttgtatttttagtagagacagggtttcaccatgttggtcaggctggtctcgaactcctgacctcaaacgatccgcctgccttggcttcccaaagtgttaggattacaggcatgagccaccgcacccagcctataaaaattttaaaaattagccaggtgtgatggtgcacacctgtagtcccaagtgctcgagaagctaaggcgggaggatcacttgagcccaggagctggaggcttcagtgagctgtgattgcgtcactacattccagcctgggtaaaagagggagaccctgtctctaaaacatattaattaattaagcggataacttggctcacatatctgaatctttggaggcaggttgggctcagaccttccagtcagaggtgaccagagctccggttacttctctgaccttctctcggctctgcactctccctgcagcttcccttgttgctgttccacttccgcgttccacttacgagtccagattcctgcagctcgctcagaaggggctttgtgcgctggatcatcagctgaagtcctgggctttgctttgattgggtcatcttaggtcacaagtgcagcaggacagggaacaccgtgagctgatttagaccactcagggccacttggggtcattccctgggcatctacaaagcggcagaagagtaggatggaagccagggaagcagcaacagggtcacctcagttaccctacacttgtccctgtgggaagagggctgccggtacagaccccttgaagctttgtatctgcttgaactaaaaccaccgcctgtgtttgctgaggttgccgacatctgtctgagaaaatacgcaggagcagcaaggttgggggggctcagaaaagttcgagcacttcctgtgtgcacactgtatgacccgattcacacacctggacacatttaatcctcccaactaccctagggggtcgaattcagtggaaaagagagcggcggctaagggcacctccaatggggagggtgtcggggcaaagcgacctgagacccccagccacatactgcaggacaaaccaatgtcggcaggtgaggacagggtgggaatagtgttccaggcagaaggaacagcgagtgtcaaagcctctaagcctgacagggtgggagtctggcctcggatctccagagatccaggaagaccctgcacaaatactagagagaggggtctgaaggagagaagaggagggaaggtttttgttgttgtttgagaggaagtctcgctctgttgccaggctggcgtgcaggggccccatcttggctcactgcagcctctgcccccggggttcaagcaattctcgtgcctcagcctcccgagtagctgggattacagcagcgctccatcacgccatggggctccttgcagctaattttttttttttttgaaacagagtctcactctgtcgcccaggctggagtgtaatggcgcgatctcggctcactgcaacctctgcctcctagattcaagcgattcttctacctcagcctcccgagtagctgggattacaggcatgcgccaccacgcctggctaatttttgtattgtttagtagagacgaggtttcaccgtgatagccaggatggtctcgatctgagctcgtgatcctcccgcctcggcctcccaaagtgctgagattacaggcgtgagccaccgcgaccggccgaggtaaggttttcactggggtctcttccatctgcctggccgccaggccacgtatccactgaagaggcagagggtcaggatgggaagactccggggaccacctagcccaagacccgcaatcaggcggctctgcaaggctaaccgggtaacttaaagaagtgaagccgattgacgtaaaacagaaaggaaagaagttaactggccggccagcgtcagcaggggcggccagtgtcaccctgcccggggacagcacccc

SEQ ID NO: 13546 - DNA, 1219 bp, Artificial sequence
  DNA replication origin
ctgggattggagggggcgcgggggtggccgcagggccagactgtggaaacgcgggctcccagcgcaccgggcgccctcggggcgtccccagcccccggccccaagcttccgcctcgtgccttccgcccctgctccccggcccccatccccagccttgccccgcggtcggtcggtgtagccccgttacttcgggccggcggggccccacacccagtcacttcccctccatccccggagccttccgggttgcagccgccgggaaatgagctggcgtctcctgccgccccgcccctgccctcctggccgctcccgctgctcccacccgcctcccccgggccaggtccgaggggtcccgtacggggcgggcctggctggcggggtcccggaacgcaccccctcagctgcagggctccgcggccagggcagatccgagcagcccctccctttccggaggcgctgggagagcagccaggccgcctagggcggggcggggccgggctgcacccgcgggcagtgaagggatcaggagtgcaagcctggggagtcagacctccccctgcctcctctgccaatgcagcccggaggctaccaccacccatcccggccgggcgcggtggctcacacatagaatcctagcattttgagaggcccaggcgggaggatcgcttgaggccaggagttggaggccagcatggacagcattgcgagaccctttctctattaaaataaataaataaaatgtagccaggcgctgtggctcatgcctgtaatcccaacactttgggagtcgaggtggacggatcacttgaggtcaggagttcgagactagcctgaccgacatggtgaaaccctgtctctactaaaaatacaaaaattacccaggcatggtggcacgcacctgtaatcccagctactcaggaggctgaggcaggagaattgcttgaacccgggaggcagaggttgcagtgagccgagatcacgccattgcactccagcctgggcaacagagcaagactccgtctcaaaaaaaaaaaaaaaagccacgtaacatgcctgtaatcccagctacttaggaggatgaggcaagagaattgcttgaacctgccttggcagtgagccaagactgtaccactgcactgcagccttggcaacagagccagactccgtctctaaataaataaataaaatcttagggacctaggtaggagtgccagcttct

SEQ ID NO: 13547 - DNA, 1001 bp, Artificial sequence
  DNA replication origin
tgggctccatgtggctgtcccctggcctcacccctgggtcttccagctgaccaggggcctcctgggttaaagtttaaggagggaatgggccagttgcggtagctcatgcctgtaatcccggcactttgggaggctgaggtgggtggatcacttgaggtcaggagttccagaccagcttgggcaacatggtgaaaccctgtctctactaaaaatacaaaaattacctgggcgtggtggtgggtgtctgtaatcccagctactcggggggctgaggcacgagaattgcttgaacccaggaggcggaggttgcagtgagtcgagattgcaccactgcactccagcctgggcaacaaagcgagactctgtctcaaaaaaaaaaaaagagagaaagaaagaaagaaaaagtgaccaagaaaaagcctttcggaggagatgacattttgacatttacccagagacccagagggggagaggaagggaactgtgccccagctggggaggggctggcaggtgcaggggccctgaggtgtcagcaggagcagcgaagggttcctggttggccagagcaatagggtggggagaggtcccagggttcattgctgcgagtaaaggacagccagttccaggagaagacagggtggcctagcagggcctgaaggacttcagggggcccctgcaaggcagaagaggagagactgagtcatgaaaggtgaggtgttgttgcctaggtgcactgtgtagtgtgtcctggcagagggcagtcatggagagggcccctcaatctccctccatctccccttcagagattgccatctgccccaacaaccatgaggtgcatatctatgaaaagagcggtgccaaatggaccaaggtgcacgagctcaaggagcacaacgggcaggtgacaggtatgtcagggtggctgggaccaccgtcctgaaaggaggtggtgggttgggggggtggtgcaaggcagggcatggccactcattgtggagcat

SEQ ID NO: 13548 - DNA, 1528 bp, Artificial sequence
  DNA replication origin
gagtctaggcccgcgcccgcagccgtgccaccctcggagctcgccttcttgtccaggttctggaagcgctcgcgggccgtcaagccacgctgcgagctctgcttaggaacgtccagccgcccgccgaagctcagcatccccgcggcggcgtcataggtgaacagcaccgggaagcagtcgtggccctgcgcggagggcgggggccattggagcgccgcggaggggaaaccgaggccggagggaaggccaggcgggcgtctggccgcccgggaggcagatgccagctcaaggatacagacgggccacagcgagggaggcccgaattgcaggtgtatcaaaaccgggggtgatgctgggggctgccacctcccccagcaaggccagcgttgggactccctgggagctcaggcgccttctgtcctgcccagccagttacacctgctctaggggagacccctgcagctgtttgcttttctaggcaaaaagcaagcctgacctggccctggcacccccattatgtttgcagaggggtgaaaagggacttgacagatgtgggcggaggggagggagagcagtgcccttcctggacacctggaggaaccgcacaccccgaactctcgccctttgcattaggcgtggccttgccattgcacctgccaataaaatgtgggcagaaatgttaagacccagggcatgattccgcaggttccggctccctcgtggcatctgggacagcatgctggggacagcttccatcagagcacctcacaacacccacactggacataaaatgtgagcaagaagtaaatatctttttttttctgtttttgagatggagtctcggtggctcacccttggctcactgcaacttctgcctctgggttcaagcaattctcctgcctcagcctcccgagcagctgggaccatgggcgcccaccaccacacccggctaatttttgtatttttagtagagatggggttttgccatgttggccaggttggtcttgaacccctgacctcaggtgatctgccctccttggcctcccaaattgctgggattacaggtgtgagccaccgggcctggctcttttttttttttttttgagacaggttttgtgtcgccgaggctgaagtgcagaggtacgaccatagctcagttcagaagcctcgacctcccatgcttaagttatcctcctgcctcagcctcccaagtaactgggattatgagattacaggtgcaccaccacacccagctaatttcttaactttttgtagagacaagggtctcacactgtgttgcccgggctggtctcaaactcgtggcctccagtgatacttccacctcaacctcgcaaagtgctgggattttaagtgtgagccaccgcacctggccaaatctttactctgttaagcaactgcagccagggacttttggttactgcagcataacccaacctgttctgcccaattctggtacatgagagaatgcaaggaagaaaaaaaggagggaggcaggagaaaggaggga

SEQ ID NO: 13549 - DNA, 1585 bp, Artificial sequence
  DNA replication origin
ctcggtttcccctccgcggcgctccaatggcccccgccctccgcgcagggccacgactgcttcccggtgctgttcacctatgacgccgccgcggggatgctgagcttcggcgggcggctggacgttcctaagcagagctcgcagcgtggcttgacggcccgcgagcgcttccagaacctggacaagaaggcgagctccgagggtggcacggctgcgggcgcgggcctagactcgctgcacaagaacagcgtcaggtgagagcgggagccgggccggcgggtgggcggggcctcggctcgcccagaaacagcgtcgggtgaggaaggggcctggagtcttcctcctggggcattgtgctgggaccttgaggactggggacccggagggagggtaggcgtgccctcaactcgctgcgccggaacggcgtctgatgagcggcgggcccggacacgaggggacggggccgatttgtgggcggggccttggcgccgtactaaaaccgcgtggggcggaggccggcagaggtcgcgtagcgggcccagggtagggagtggctttgactcgctgcggaataacatcgttagttgtgggcggggcccatcttgatctcaccatagcagcccaggtgctagtggagcctgggagggacacggtgcgaccgacataagacggggtcgacctctttaggttgcataaaaatagcatcagatggggctgagcagctagcctcgctctgcatttccgggacttaggtggggactgtcgtagggctggcccctacggttctctggggtggccaggcagtgaccagcgggcttcctgggcggggtcacagctggggcgggtctattgctagcacttagcgaggtgggggcggagctgagggtctctccgcagccttctatggatctagggtgggatggggaagaggctcttcaaagcccaaaagctgccagccacacgtgtccaccccgcggcgaatcagagggagcgggagctgtatggcaagactggccaagcccttcggtctgtaaaacctcctgtgtccgccagatccgatggcttcctcagatgaaacacctttgtccagctatcagcttagtccctggctgcccccacccccatctccttttttgtcctgtccagctgcactgctggcactgtgtacactccgcagacacacgtgtctttcctgcctcccaggacttgagtgtcctgtcccatttgcctgcacctcgcatgccactgtccccaaggcagaactgacttctaagcccactacaccccctcggtacttctcactaaagcccgctccccaagaagtctgggagcgcctggtggacagggtgggcctgagcccagcgccagcacaggttgaattcataagctcctcttcctctttgcagccagatctcggtgctcagcggcggcaaggccaagtgctcgcagttctgcaccactggcatggatggcggcatgagtatctgggatgtgaaggtgaggcttgcccctcctggcttcccgccatgcctcccaggtcaaccctttccccccatccccactccctggagatgacccccatcct

SEQ ID NO: 13550 - DNA, 928 bp, Artificial sequence
  DNA replication origin
cgctgtcccctcagcccgtgcgcgtctctgagagcagcgcagagggaggctgtccgcaccggctgagagccaggcctgggcctcgacgcccaattgtcccgatggggaaactgaggactgtggtgtcccagagtcactccgtcagtggtctgaggagtttcggaagctctgggtcctcgccggcctagaaagccggatctaggatgcgcttctccgggtctaggggttctggaatttatcccactctttggctggctaggaactgagtcaccgcgtcccgcgcttgtgccgggcccgcctgcctctcgcgtaaaacgtgggctttttctggcttcggttcagccaggcctgcctaggaggacttaaggagatgcccatgagccttccagacctggtttcgactcccccgttcggtagcggctcggtgtgttcctttgagccagtcgctccacctcctgtgtctccgttttctcatttgccaatgggaataacgattgtacctacctcttagtactgttgggaggcttcaactaggtaatccacgtggagtgcgcagtacagtgccaggcagtcgttaaaagtgcccagtgaagcagtaactattcttatttttaaggctttgccagctcttgatcttgtaagtaggttcatgactgcccagtccattgtagcccgtcctctatcttctagcccgttctctatcctgtttccccctttagaatcgatagtccccagtttgaatcccagctatgtcacgtctaattctgtggccctgaacaagttaacctcttcctcatctgaaacactgggctaatccttagcttgttgaattggggccggggtggtaaaattatagcgctcataaagtgcctggccacctcctggcacagaacaaatatatttgtgttggtagctcatgtgttatatt

SEQ ID NO: 13551 - DNA, 1070 bp, Artificial sequence
  DNA replication origin
gggctcctcacttcccagtaggggcagccgggcagaggtgcccctcacctcccggacggggcggctggccgggcagggggctgaccacccccacctccctcccggacggggcggctggccgggtggggggctgacccccacctccctcccggacggggcggctggcctggcgggggctgacccccacctccctcccggacggggtggctgccgggcggagacgctcctcacttcccagacagggtgactcccgggcggaggggctcctcacttctcagacggggcggctgccaggcggaggggctcctcacttctcagatggggcggttgccaggcagagggtctcctcatttctcagacggggcggccgggcagagacgctcctcacctcccagacggggtcgcggccgggcagaggcgctcctcacatcccagacggggcggcggggcagaggcgctccccacatctcagacgatgggcggccgggcagagatgctcctcacttcctagatgggatggcggccgggaagaggcgctcctcacttcctagatgggatggcggctgggcagagacgctcctcactttccagactgggcagccaggcagaggggctcctcacatcccagacgatgggcggccaggcagagacgctcctcacttcccagacggggtggcggccgtcttggcactttgggaggccaaggcaggcggctgggaggtggaggttgtagcgagccgagatcacgccactgcactccagcctgggcaccattgagcactgagtgaacgagactccgtctgcaatcccggcacctcgggaggccgaggttggtggatcactcgcggttaggagctggagaccagcctggccaacacagcgaaaccccgtctccaccaaaataatacaaaaaccagtcaggcgtggtggcgcgcgcctgcaatcgcaggtactcggcaggctgaggcaggagaatcaggcagggaggttgcagtgagccgagatggcagcagttacagtccagcttcagctgggcatcagagggagactgtggaaagagggagagggag

SEQ ID NO: 13552 - DNA, 1203 bp, Artificial sequence
  DNA replication origin
ccccgtccgggagggaggtgggggtcagccccccacccggccagccgccccgtccgggagggaggtgggggtggtcagccccctgcccggccagccgccccgtccgggaggtgaggggcacctctgcccggctgcccctactgggaagtgaggagcccctctgcccggctagcaccccgtccaggagggaggtgggggggtcagccccccgcccggccagccgccccgtccgggagggaggtggggggtcagccccccgcccggccagccgccccgtccgggaggtgaggggcgcctctgcccggccgcccctactgggaagtgaggagcccctctgccaggccagccgccccgtccgggagggaggtggggggggtcagccccccgcccagccagccgccccgtccgggaggtgagcggcgcctctgcccggccgcccctgctgggaagtgaggagcccctctgcccggccaccaccccgtctgggaggtgtgcccagcggctcattgagaacgggccatgatgacagtggcggttttgtggaatagaaaggggggaaaggtggggaaaagattgagaaatcggatggttgccgtgtctgtgtagaaagaagtagacatgggagacttttcattttgttctgtactaagaaaaattcttctgccttgggatcctgttgatctgtgaccttacccccaaccctgtgctctctgaaacatgtgctgtgtccactcagggttaaatggattaagggtggtgcaagatgtgctttgttaaacagatgcttgaaggcagcatgctccttaagagtcatcaccactccctaatctcaagtacccaggggcacaaacactgcagaaggccgcagggtcgtctgcctaggaaaaccagagacctttgttcacttgtttatctgctgaccttccctccactattgtcctatgaccctgccaaatctccctctgcaagaaacacccaagaatgatcaataaaaaaaaaaaaaaaattggccgggcgcggtggctcacgcctgtaatactagcattttgggagagcaaggcgccggatcacgaggtaggagagcgagaccatccaggctaacatggtgaaactctgtctctactaaaaatacaaaaacaaaattagctgggcatggtggtgggcgcctatagtcccagctactcaggaggctgagacgggaga

SEQ ID NO: 13553 - DNA, 1708 bp, Artificial sequence
  DNA replication origin
gccgggggaggtctcaggaccgaggcgagggagtcccgggatcacagaggagcgggtcccgggttcgagtcgctcttgccctcccgcccgggccccgcgctcactgtccatgccggggaagggcagcggctgcgcccccagctgctgctccaccgcgatctccaagtcaaacttgatgtggtccacgctggcgatgatttcctgcatggcggcggcggcggccccaccggcccggctccccctcggtctcctgcagccttctcgcctttacccgccgccggccccgccgcacacactcctccttcgcttcgcctcgccgccgccgccgccgccgcccgagggatgccgggagcgcccggagcccgcgccggcccttgcgcctgtccaggcactgccaatcgagactccgccgttccgctagtcccagctagccgccagccgaacaccggcctcgccagaaacctgaaaccagccgcgtgagtcggcgacgcggattgcgcctgcgcgcttggggagagggggacccgaggaagagactggttcgccgcggggaccgggcagggctccccgtcggagtgcactgcgccggacacttcaagtgagttcctgtgtgatcctcgcaggagccccgggacccgggccaagacacgccagaggggaaggaagtgcccgagccgggattggagccgggggcgtctgaggagggaaactgaggctgcagaagtccgtgtggagaggggtcggcgttggcctgagggtccgggtgggcctctgaggaggggcgggtctctccgaggaaggacggccgcagcgtgtctctaattcagggttttttctcgctctgtggcccaggctggagtacaggggtacgatcatagctcactgcagtcaacttctcagactcaagcgatcctcccacctcagcctcccgagtagctggaactacagacgctgcaccaccacacttggctaatttttaaaattttatttttaatttttgtagagacggcggggttgggggggcgggtggcgggtcttgctatgttgcccaggctggtctcgaactcctggccccaagcccaaagcgatcctcctgcctgggcctcccaaagtgctggaattgcaggcatgagccactatacagcctaattcagggttttttttaaccagggtggggtaatgagcttgtgtaggaacaaaatgcacccctatttttctctatgtgaagtatagcatttcctttcctgattgctggagcagccttagcagtgcctgaaactgtgagggtgagtgtaaatgatagttccagataacagtttgtgcagggccaggcatggtggctcacacctgtaacctcagcactttgggagtctgaggcgagaggatcacgtgaggtcaggagttcgagaccagcctggacaggatggcaaaaccccgtccctactgaaaatataaaaattggcctggagtagtggcgcgttcctgtaatcccagctacttgggaggctgaggcatgagcatggcttaaacccgggaggcagaggttgcattgagccgagattgtaccaccccactccagcctggtgacagagtgagacgcaaaaaaacccagtttgtgcagcaactacaaggtggtatcttaagctgtcacttacatttattactgctttgaaattatgatagagtcggccgggcgcggtggctcacg

SEQ ID NO: 13554 - DNA, 1446 bp, Artificial sequence
  DNA replication origin
tctttaccttgggtagtttcctttagcttgtcataattaacagccttgtatgctgcttttttgaaccccttgactaggcaggagaccatgtaatctcacctagctatacctggggagtccatcttgtactgccaatggggatgctcttggggaactgccctgatgccttcttgaaggtctggctcatggcactggtgggtgtcagtgtgagattgggctagggtatcaactctttcctgctcatctggggagaggggggaggtcaggatgacatttcagtcactccaggttaaatcgcaggactgagttaaatattggaattcctgtatatatttagtggggtctgatgaaaaagagcctaaacgctgactgatctgggagaggtcgatagagaaaaaggcacatgtaccttgactatgccttcagctccagccacctgactaagagaaaattgttgggcaggtggaggagggctagtctcggaatgaaactgtaaggtggagtgggtgtgaggaggggaggtgatacttctattatagggtgggggagcagaggatgaggaagaattgggacctggcttggcctggtgaggagcagcctggtggggaggggagaggtcagatgggttcatagaaaaggaggattcaaaggactcagagcttagggtggagactgaagaaagagacaggagagaaagaagaaagatttgggatgagtcacactgggagcagagactagggagagactgatgtataaaagaatgcctggatgtcaggcacctcagaccatttgcccatttttcaacaaaaatcatccaggtcttataagatcgagaaatcaaaagtgtcattttctggctatttggaaccattgtccagtttgtattgaggccaagcggtattgcagaagaaaataaggcatttaggttttaggtcaggtgttagtcaaagggggttttaggttttgaagaacacaggctaagggagaagaagagggagtggaggctggaaggttgcccatagtgaagggggcaagcccagagaaaagagaaggtagagacatggagagaggggagatggtacttgccacccagggaaggtggtgcttgccacccagggaaggtggtacttgccacccagggaaggtgatacttgtgacccaggggaggtggtacttgtgccaaggtgaatgatcaaggcaggcatccccacagtgatcagatacctctgaaatgtgggtgaataaccaggcaggtgtcctggcagtgatttagacaccaagggaagactgttcccgagtccatgactggcaccagagttttgagttcatggataaaacgtatctcctccgtctctaccagaaagggaaagaaactgaaattaaggaagggagagattgaagggtggagggatagcaagagaggttggagaagagaataaaaagagg

SEQ ID NO: 13555 - DNA, 949 bp, Artificial sequence
  DNA replication origin
cccgcccggccagccgccccgtccgggagggaggtgggggggtcagccccccgcccggccagccgcctcgtccgggaggtgaggggcgcctctgcccggccgcccctactgggaagtgaggagcccctctgcccggccagccgccccatccgggagggaggtggggggtcagccccctgcccagccagtcgccccgtccgggagggaggtgggggggtcagccccccgcccggccagccgccttgtccgggaggtgaggggcgcctctgcccggccgcccctactgggaagtgaggagcccctctgcccggccagccaccccgtccgggagggaggtgggggggtcagccccccgcccggccagccgcccggtccgggagggaggtggggggttcagccccccacccggccagccgccctgtccgggaggtgaggggcgcctctgcccggccgcccctactgggaagtgaggagcccctctgcccagccaccaccccgtctgggaggtgtgcccaacagctcattgagaacgggccatgatgacaatggtggttttgtggaatagaaaggggggaaaggtggggaaaagattagaaatcggatggttgccgtgtctgtgtggaaagaagtagacatgggagactttttattttgttctgtactaagaaaaattcttctgccttgggatcctgttgatctgtgaccttaccccgaaaccctgtgctctctgaaacatgtgctgtgtccactcagggttaaatggattaagggcagtgcaagatgtgctttgtgaaacagatgcttgaaggcagcatgctccttaagagtcatcaccactccctaatctcaagtacccagggacacaaacactgcggaaggcctcagggtcctctgcctaggaaaaccagagacctttgttcacttgtttatctgctgaccttccctccac

SEQ ID NO: 13556 - DNA, 1173 bp, Artificial sequence
  DNA replication origin
cggggggctgacccccccacctccctcccggacggggtggctggccgggcagaggggctcctcacttcccagtaggggcggccgggcagaggcgcccctcacctcccggacaaggcggctggccgggcggggggctgacccccccacctccctcccggacggggcgactggctgggcagggggctgaccccccacctccctcccggatggggcggctggccgggcagaggggctcctcacttcccagtaggggcggccgggcagaggcgcccctcacctcccggacgaggcggctggccgggcggggggctgacccccccacctccctcccggacggggcggctggccgggcggggggctgacccccctacctccctcccggacggggcggctggctgggcggggggctgacccccccacctccctcccggacgggtcggctgccgggcggagaagctcctcacttcccagacggggtggctgccgggcggaggggctcctcacttctcagacggggcggctgctgggcggagggtctcctcccttctcagatggggcggccgggcagagacgctcctcacctcccagacggggtcgtggctgggcagaggcgctcctcacatcccagacggggtggcggggcaaaggcgctccccacatctcagacgatgggcggctggacagagacgctcctcgcttcctagatgggatggtggccgggaagaggcgctcctcactttccagactgggcagccaggcagaggggctcctcacatcccagacgatgggcggccaggcagagacgctcctcacttcctagacagggtggcggccgggcagaggctgcactctgggcactttgggaggccaaggcaggcagctgggaggtggaggttgtagcgagccgagatcacgccactgcactccagcctgggcaccattgagcactgagtgaaccagacccgtctgcaatcctggcacctccggaggccaaggctggcagatcactcgcggttaggagctggagaccagcccggccaacacagcgaaaccccgtctccaccaaaaaaatacgaaaaccaatcaggcgtggcggcgcgcgcctgcaatcgcaggcactcggcaggctgaggcaggagaatcaggcagggaggttgcagtgagccgagatgg

SEQ ID NO: 13557 - DNA, 1107 bp, Artificial sequence
  DNA replication origin
cactgcactccagcctgggcaccattgagcactgagtgaaccagacccgtctgcaatcctggcacctccggaggccaaggctggcagatcactcgcggttaggagctggagaccagcccggccaacacagcgaaaccccgtctccaccaaaaaaatacgaaaaccaatcaggcgtggcggcgcgcgcctgcaatcgcaggcactcggcaggctgaggcaggagaatcaggcagggaggttgcagtgagccgagatggcagcagtacagtccagcttcggctcggcatcagagggagaccgtggaaagagagggagagggagaacgtggggagagggagaccgtggggagagggagagggagagggacagggagagggagagggacttggttggctttttaaacaaaaatgaacacctaggtcccatcccatacctgatgagaccagaggggtcaatatcaagactcaagcacagagacaaagaattgtgaagaataagaagggtaggggaaaagaattttttctctgttgaagatgcaagttctttgcaatcgtatgaagggggactcatgaaggcttaaaaggaaaagtttggaatcattgccaccaaagacgttaaaacaagtcaagtgataaaaaaagtttaccatgcagctcaaagggcccacttgaaggcagagagcaaggatttatagcagaatcaatcaacctttcaatagccagaaggaagagaggagggaaggtactgatgagtttccaaaggattagctattagtaagacaggcactgaaggacgtcctgaagggcaagtgtagtcatcatttcctaaggtggccataacaaactgggtggcttaaaacaatggaaatttactgtctaacctcagttttggcagttagaaatcagaaaccaaagtgttgatggggccatgctcccttcaaagcttctaggggaagattcttcctggcttcccccagcttctggtagccccaggttccttggcttgtgacagcataactccaatccaatctctgcctccatcttccagagcctctttcacgttgtttccatctggcatttttctgtgtgtgtgtgggcatgagtgtgt

SEQ ID NO: 13558 - DNA, 1096 bp, Artificial sequence
  DNA replication origin
cacctcccgggttcaagcaattctcctgcctcaggctcctgagtagctgggattacaggcgcctgccaccacgcctggctaatttttgtatttttagtagagatggggtttcaccatgttggctaggctcgtctcaaactgctgacctcaagtgattgtctggcctcggtctcccaaaatgctggtattacaggtgtgagccaccatgcctggccttgtggggttattttcgaaagtccttgagataattcctatctcagacatgcaagcatgagaccttctccttggtgttctcatggctccaatttgtttggacctgacaatgtgattttgtcctggtatctgcaactttcacaagatggagcaactaactcaacaccagattccacccctaattattccttcattcactcaaaaagtatctaggctccaatgtgtcaggcaccgtgttggtcacaggggataccatgatgaacaagagaaggaaccacaggcttttgaatgggaaactaaagcatgtgaaaaacacacggagagctgggtgcggtggctcatgcctgtaatcccagtgctttgggaggctgaggatggaggatctcttctgcccgggagttggagaccagcctggacaacctagtgagacccccgtctctatcaaaataaaaacaaataataaaattagctgggtgcggtggggtgcgcctgtagtcccagctactcgggaggctgaactgggaggatcacttgagcccaggagtttgagggtgcagtgagctgacatcaggccactgcactccagcctgggcgacagagcgagaccctgtctcaaacaaaacaaaacaaaccaccaccaccaccagacatgagggccagtgcagctgaagcctgaagatcaagggctagaagaggccaggccggggccagatcaggcagggccttgcaggttgtggttagttgtttggattttattgtgagggaaataacacgacatgtcattccttctgcaacagccttaagaactaggcgttcttatcccaatttcacagacgaggacgatcaagtcgttaatttgtcaaaggtcacccgcaggcgacag

SEQ ID NO: 13559 - DNA, 1506 bp, Artificial sequence
  DNA replication origin
aagatcaagggctagaagaggccaggccggggccagatcaggcagggccttgcaggttgtggttagttgtttggattttattgtgagggaaataacacgacatgtcattccttctgcaacagccttaagaactaggcgttcttatcccaatttcacagacgaggacgatcaagtcgttaatttgtcaaaggtcacccgcaggcgacaggcggggacagggtctgggaaaacccgctaggcaccgaggcccagagggcgtcgggcgtccccgcaccgagtgccgcccgccgcgacccgggaactgcctgctccccggacgccaggcccgccgcacgccgcggggacaccgaacatgcgccgctcgccttacggaagccgggaaggaagggggcggggccgaggctggcgggcgcggggaaaatggcggcggcggcggcggcggctgcagctacgaacgggaccggaggaagcagcgggatggaggtggatgcagcaggtaacgggccgtgcgggggtggcttccggagacctccttcaggggttcgttgaggcctccctgtgctcccgggagaagggaggagggcggagcagcaacatctttccctgggataagttacgggaggaaagtgtggcccgggctccgccgtcccccactgccatctccagggaagaacgtggggcccggactctcaccctctctcctttccctccacccttagtagtccccagcgtgatggcctgcggagtgactgggagtgtttccgtcgctctccatccccttgtcattctcaacatctcagaccactggatccgcatgcgctcccaggaggggcggcctgtgcagggtgagtgttgggcatagactccagtctcttctccttgctcacctcccccaggcagtggtcttttccccttcctctactggagccaattccccctcccccaaatcatcgtttccccaatacatggttcccactgatctcagaccctcaggtcatagaagtttctttaccctcaccttttccatgtcattctctttcccagtgattggggctctgattggcaagcaggagggccgaaatatcgaggtgatgaactcctttgagctgctgtcccacaccgtggaagagaagattatcattgacaaggaatattattacaccaaggaggagcagtgtgagagtggaatagatgtggggaagaggagtgggagttaaaaaaaaaatgtacagggtggggaagatggagagggttggaaagaaacaggagaggagaccaagaacaggggagaaaaagtgaagagtagctggagagatctcagaaaaagaaaacgttcagagttctttctcaaaagaaagcaaaggatgagaggagacaggatagaagggagtagttattctaaactgagccaggatttgaggagggaggagagaagctggtgaaaatacaccaggagcttcacattgaggaaggatggtttaaagaattactatgtcaggccgggct

SEQ ID NO: 13560 - DNA, 2462 bp, Artificial sequence
  DNA replication origin
acctgttggtgtgagctggggtcttgggggaccggggtcggcgggttctggggtgcgcgaggccagaggcagggtcgagctgcggcctggctaaggcccacggggcctgggaagcgtgcggggggccatcgatgttgaagaaaagctagtaatcccacctggtaaaggtgttagggtcgtggggttgggggcttgggggcgcgctaacccggctgggggctgcacagggaaaagtcgcgcccaggacctcaggagagtcttaagggctctgggctcccgtgcccgctttccttcgcgcttttgggcattcccaggttcccgcgccctccccaggcgcgcgtaggccccgggggcgggcaggccggggccgctgcgcgccgggattggccgtttgaggccgccctccgagcggaagtggagccgggcggaagtggcgcgaggaggctggagggagtgtcgtgtaaacagtgtccttccgcgcggcggccgcggagagagctgcggcccgggggggcgtgcctgggatccggagcttcgctcgggcccgggaaaggcggcagtgggctgggatcgcggtgtctctgggtgtgatggccaatggctggactggctcccgccctgggcggaggaatcccgagctgtgaagcggctggaatccgggcccatgtgcttctttgtttactaagagcggaagcgatggcgggagcgggggtggggtgcggtggcggggtgcggtggcggaggtcccggtgaaatcaggggctaaggggacccaaagaaggcgggggatcataggggtggaaagaaagctgagaaccttgagaccggagtgtgaggggccaacggggaagggcgctagaattttaaactaaagtagggaccggaattcccctggggagatgttggatggccctgtgcactgccacgggctctttattcttcgctggttagaaacagacttgtgaaaaagagttatgcccactttggggagacttcggtaggtttatttaaatgctcatattattaattagttcataggtcgtgttttaagcgaaaatgggtatctaagatttgtcttaaagtttgtgtcttacggttttacatttcatgttacagaaaaggttaagaagttcttacaagagttctaccaggatgatgaactcgggaagaagcagttcaagtatgggaaccagttggtaagtctaagattgggtaaagggaatggggagcggggtgcttaaggagccataagcagcagcttggcttgttttattaaagacataacaattagagggtttgagggctgaaaagcgagtatcgctctgtgtggcgctgcgttctcccctgtggatgcccagagcctgtgctgagttctcagtgatgcattttcacatatgaacactggtgagcaaagtgaatgtggctctgaggtgtttctgtctcttccccacttgaggttcggctggctcatcgggaacaggtggctctgtatgtggacctggacgacgtagccgaggatgaccccgagttggtggactcaatttgtgagaatgccaggcgctacgcgaagctctttgctgatgccgtacaagagctgctgcctcagtacaaggagagggaagtgagtggttagagaacaatggcaaacaaagggcgaggcgtttaagcttctgtagagaggctgctcagatactgatgttttctgagcaggcagaaaggaggggcacttctgcctggtgttctctgtgctctcctttccccatcctgttgctcttttttttttttttttttgttcttctcctttaggtggtaaataaagatgtcctggacgtttacattgagcatcggctaatgatggagcagcggagtcgggaccctgggatggtccgaagcccccagaaccagtaccctgctgaactcatgcgcagattgtgagtggtctctgtcgggaaagatgtagggattggttctccaggatcttgtttgtgactgttttctccccttagtgagctgtattttcaaggccctagcagcaacaagcctcgtgtgatccgggaagtgcgggctgactctgtggggaagttggtaactgtgcgtggaatcgtcactcgtgtctctgaagtcaaacccaagatggtggtggccacttacacttgtgaccagtgtggggcagagacctaccagccggtacgtgtggagcaagaagcaggaaagcacttacccattagttgttttgtagagattaatttgatcctgtgatgcctattgttttatttggttgtaaaagttgcctgtgtgttcgcctttcattcttgggtatgtagtggtctttctacctattttctgggtgtttgttgttgacccagagtaagttcagagggttcttgacacttacaagatgtctgccatgaagagaaaatgtgattcaaaggaccgacccaatggggctcttttccttctga

SEQ ID NO: 13561 - DNA, 1003 bp, Artificial sequence
  DNA replication origin
caccctcctctttccctctactgaccaagccaacgctgctgaggtcaaagaggctgaagggcttgctgaccacagcttccgtctggatgaaattcctcagcatctccgtggatgtggtctgtacatagccatagtcctagtggtaaaggaaggacagtctgagtgatcagtggagggaaggggtaaagagggggagtggggccaggcatggtgactcactcctgtactctcagcgctttggaaggccgagacgtaggagaatggcttgaggccatgagttcaagaccagcctgggcaacacagtgagactctagtctctacaaaaaataaacaattagctaggcacaggggaggctggggcaggaggacggcttgagcccaggagttccaggctgcagtgagctataactgcaccactgcagtccagcctgggcaacagagcaagaccctgtctctaaaagcaaaaaaaaaaaaaaaaaaaaaggtagacttggcctcctaaccacggcatcccacagtagaagagcagatgtatcttcaggggaattgggtaggggccacagaaggggattgttgattctcaccagcacttcatccaggagttcgtataccagagccacattgcgggagatggtcccctcgcccagggagccacagtaatcgcccagaagggtggccaacctgaggaaacacttggagcgtgtattttctcctcctctcagacccctcctagctaccaggtgcccagcccaaccctcctcacctggagagcagttctaggaggctgaagggagaaacgttttctgaagttgtgaccaccaaatagaggccgctgtgtctgatgtgaatgaaatgacggccatggtgatgctgagacacaggcagggagaagagaggcgttaaaaaaagggaggtggagtgatcagaacccaggagacctgagctcggatcccgatgcctcttactagtcacaacagcagtgcctttgggagatacatgacat

SEQ ID NO: 13562 - DNA, 1323 bp, Artificial sequence
  DNA replication origin
tgctggtgcccggcgacccctactctgtggtggttctgctgcagggctacgcggagccagagggtgtgggcgatgccgtgcgcgccgacggctccgtgaccctggtcctaccccagacccggggcccggcctccagccaccgagagtccccgcgcgggagtggcggcgcagaggccgccctggaggaggcggcccgtggccccatcctggtggacaccgggggcccctgggctcgggaggcgctgctgggggcgctggcggggcagggcgtggccccgggagacgtgacgctagtggtggggacccacgggcactcggatcacatcgggaacttggggctgttcccaggcgcggctctgctggtctcgcacgacttctgccttcccggaggccgctacctgccccacgggctgggtgaggggcagcccctgcgcctgggcccggggctcgaggtgtgggccacgccgggccacgggggccagcgcgacgtgagcgtggtggtggccggcacggctctgggcaccgtggtggtggcgggagatgtgtttgagcgagatggggacgaggattcgtggcaggcactgagtgaagaccccgcagcccaggagcggagccggaagagggtcctggtcgttgccgacgtggtcgtacctggtcacgggcccccctttcgagtgttaagggaagcctcgcagcccgagacggagggtggagggaacagccagcaggagccggtggtcggagacgaggagcccgccctgcactaatcagcctcgagagggactgcactcttgtcagggaagccctaacagcgaagagctgctggagacagagtcagagcagtcaagggtgggagcttccagcccttccaggaggccagttttctagtgaagacagagtgcacctgacactgccatcacatcgtcagtatcactgcctgtctctgccaccaaactaagatcaaaggaggggctcagctccctgtgcattctccctgggcctcagtaaaatgggagaaggttcgtgggaggggcctccaaaataaaaatggaaactgcattgaaaatcatagtgccctagtgtaaatgtgaagcattgacaatgataatcgtgcaaacatggtaatctacaactacagcagaggcatactttggccaattgcccctttcttataggatggaggttgctgagagaaggtacagggcataaagatgaccccttagtcacctgacttatgtatttgttcatatttttttgtcacacaggctagagtgcagttgtgcagtcatagctcactgcagcctccagcttaagccatccacc

SEQ ID NO: 13563 - DNA, 975 bp, Artificial sequence
  DNA replication origin
cccagatcctcccctcctcggacgctcccgcgtcttcctctcgctcaggcactgaggggcggggagatgggtgttaaagaggggatatcaccaatcaacgtgcgcctccgggaaacagcgcttcgcactggctggttgggtctgacgacgtggccactgtccaatcctcatgctagaggcggggctaaaggccagtggcgcaagcagaaggaggagcgcagcggctgcaagcacgtgaccggggcctgaagccggaagctacctatctggtagggagctcccccagcaccgaagactgcgatggtgagtgaggacgcatgcgcgagaggacccgccgggggttcagcgtctctgctccccagtctgtgtggtttccccctggtgggcctgcgctccaccctcacctcctatccgctcggggaggaagaggggatggaaatgggagggatggcgacgagaatgctggggaggggtctgtgggagggtgttctggggctgcgggtagtctgcaggtcgggcggagacgaagggaggtgaagagagggtctgggggcaggggccagtggggcagcaaaggccccttggggtagcaaaggtgggatgtggaaggccaggggagcccgggggcgagagtgggggcagatggaggctcgggaagatcagtattgaggaccatgtaggggggagggggccgggaagggacctggctggggaatgagaaaacctggggccatcgtcaacccagagacttgggtttgcaggtgaagggtatcgggccgtccatccctctagcatgcttctcacgacttgcatctttacccactagacttctgcgctgacccaggggctggagcgaatcccagaccagctcggctacctggtactgagtgaaggtgcagtgctggcggtgcgttctgggaaagggagggggtcccttagtgcacacagcccggtaaccccttctaatattggccc

SEQ ID NO: 13564 - DNA, 1269 bp, Artificial sequence
  DNA replication origin
cagccatctgtctttcctcttgacagattgtagtgactgtgtggaagcgggagattgaggcaccagaggtcagagatcaaggctacctgcgattgctgcagacccgatctcctggggagacattccggggcgagcagagcgctttcaaggcccaaggtgggcagggcagcgcagaggcaaagggctagagtctgggaattgggggacagaggggaggggtcacactggaaagtggctaatgggctctgagaagaggaaggtgagaattctgggttggaggtgaggtcagcctccagaccatcacttcttgcccccaccccctcccgcagtgagcacgctgctgactctgctgccccctccggttctgagatgccggcagttcactgtggctggaaaacacttgaccgtgctcaagggtaagcagggctgccggctccagcctccgggagcaacaagggaactgattggatgcagttcctctgggcaggctggtggggtaggtccggttttttctgggtaaaggtggggcctgaggggtccagctattctgagccaagctggtcctctcccacagtgctgaacagctcctctcaggaggaaatctccatctgggatatccgaatcctccccaacttcaacgccagttatctacctgtcatgcccgatggctctgtgctgctggtggacaatgtctggtgaggtcctgggaggggcgaggctgtgaagtggtggggatggcttcaggggctgagctctggcatggggagaccatgccttgtcctcttttctgagctagtcaccagtctggggaagtctccatgggctccttctgccgcctacccgggacctctggctgcttcccctgcccgctgaatgccctggaggaacacaacttcctgtttcagctgagagggggtgagcagccccctccaggggccaaggaggtgagcataaggggctggtgtgttcaaagaaaagtgataaggcagtgggagggaaagaccaggcagctgactcaagatgggaggggcactcttaatacctgtgccaaccccctttgtccctcctgcagggcctggaagttcccctgattgctgtggttcagtggtctaccccaaagctgcccttcactcagagcatctacacccactaccggtgagtgtggatcctggaggaatcgtggcgttcgcctttgtggcctgacacacacagccagcatccctctctcaccactcctagcctgcccagtgtccgcttggaccgcccgtg

SEQ ID NO: 13565 - DNA, 1197 bp, Artificial sequence
  DNA replication origin
tctccggccgccccagccgggcgcagcagccggaggtgtcgggaccctctggacccaccctagcgggccccgccggcggtcggcctccggtccgggctcccagtcgcgccgtcctcgccgccccatggagtcccagtgcgactactcgatgtacttcccggccgtgccgctgccgccgcgcgcggagctggcaggggatccgggccggtaccgggcgctgccccggcgcaaccatctgtacttgggggagactgtccgttttctgctggtgttgcgctgccggggcggtgcggggtccggcaccgggggcggcccgggcttgggctccagaggagcctgggcagaactggcaaccgccctggccgccctggcctcggtcagcgccggaggcgggatgccggggggcggcggcgccggcgaccaggattcggagcccccagggggaggggatcctgggggtgggggtttgttccgaggctgcagcccccttctcacccacggcccgggccctgctacctcagggggagcgaccacggtgaggagctttgggggacctggcacaggacggaggggcggtttgctgggggcctgaggcaggaggcagatgaactgccggtcttaaagggaaaggctgcaggctgcctctgacttgctcctgacctcttcacccctttcccaaccccagctgcctgtggaggaaccgattgtgtccacagatgaggtcatcttcccactcaccgtttcactggatagactgcccccagggacacctaaggccaaggtaagatgagcaagagtggagctattgtcctaattcagacaccttttccgggctcagccatctgtctttcctcttgacagattgtagtgactgtgtggaagcgggagattgaggcaccagaggtcagagatcaaggctacctgcgattgctgcagacccgatctcctggggagacattccggggcgagcagagcgctttcaaggcccaaggtgggcagggcagcgcagaggcaaagggctagagtctgggaattgggggacagaggggaggggtcacactggaaagtggctaatgggctctgagaagaggaaggtgagaattctgggttggaggtgaggtcagcctccagaccatcacttcttgcccccaccccctcccgcagtgagcacgctgctgactctgctgccccctccgg

SEQ ID NO: 13566 - DNA, 1386 bp, Artificial sequence
  DNA replication origin
gggcggccagggcggttgccagttctgcccaggctcctctggagcccaagcccgggccgcccccggtgccggaccccgcaccgccccggcagcgcaacaccagcagaaaacggacagtctcccccaagtacagatggttgcgccggggcagcgcccggtaccggcccggatcccctgccagctccgcgcgcggcggcagcggcacggccgggaagtacatcgagtagtcgcactgggactccatggggcggcgaggacggcgcgactgggagcccggaccggaggccgaccgccggcggggcccgctagggtgggtccagagggtcccgacacctccggctgctgcgcccggctggggcggccggagagaccggcccggtcccggcaccggggcaacgaacccgaaccgagacccggcagcgccggaaccggggtactgagccgaatgactggagagaaacaggaagcggaagggagggggcgtggccgccgaggccccggaatctgcgggtgcccggaccgtggaggagggggcggggtcccgctgctctgaggctgcgagaatgcaggcgggggctgcggccaggcttcttggaaaagaaatggaagacctcgtcggccaggcgggttggctcacgccagtaatcccagcactgtgggaggccgaggcggcaggatcgcttgaggccaggagttcaagaccaccctggccaacatagcaagaactcctctctgcaaaaaatttaaaaattatccgggcgcggtggcgcgcgcctgtattcccagctacttagaaggcctaggcaggaggatcctttgagcccaggagtttgaggctgaagtgagctatgattgggacactggactgcagcctaggtgacagagtgagatcttgtctcggaaaaaaaaaaaaaaacaacccttccaaccccacttctcccaggaagattctccatccctcccctttccaccctccataaatcaagtagaagtttcaaattatttattcattcaacaaacatgtcagagagaaatgaacagtctagtagcaaatatttcatagagaaatggacgtatcattccaactcaccacgccccaaacttcctgtggctcactccatcttttgcccctctagggagcttcggtgatgtggatctgccttggggcaggaaaggggaaggggaggtcaggcctagtggctcacgcctgtaatggcagcactttgggaggcagagtcatgtggatcacctgaggtgaggagttcaagaccagcctaaccaacatgttgaatccctgtctctaaaaatataaaaattagccgggtatggtggcacgtatctgtaatcctagctactctggaggctgaggcaggagaatcgcttgaa

SEQ ID NO: 13567 - DNA, 1099 bp, Artificial sequence
  DNA replication origin
ctttgggaggctgaggcgggtggatcacaaggtcaggagttcaagaccagcctggccaagatggtgaaaccacatctctactaaaactataaaaattagccaggcgtggtggcaggcgcctgtaatcccagctactcaggaggctgaggcaggagaatcgcttgaagctgggtggcagaggttgcagtgagccgagatcgcgccactgcactccagcctgggcagcaaagtgagactctgtctcaaaaaaaaaaaaaaaagaaagaagcagccagagagggaaggagggaagggaagaggaggggaggggaggggaggggaggggggagaggggagggagagggggaagaggagaggcttgtcggggtcaggggcaaaggaagagagagagagcatgaggatgaatgcctaatgcatgcaaggcttaaaacctagatgacaggttgacaggtgcagcaaaccaccgtggcacatgtatacctgtgtaacaaacctgcatattctgcacatgtatcccagaacttaaaaattagccgggcactaattttaaaggggaggggaggggaggaaaaggaagggaaaaaaaagaaaaagaaaaaaaaagaaagaagggagggacggaaacctggaggataggaaactcctggagaacattaatttcctcgggcatttctgtctgccttggtcagtaaaacctctaggaaccaacctttgtactcatttctccagcaaaaacctgttgagtgcctgggagggggcatcactggcaacaaaggagcaactataatgccatctcgggcataggcagcaggtgggcaggccaggcccagaatggctgaggggtaaagcacttcagggtctcctgggcatcctagagggcaaaaaacaccctgggctgggacactgggaagccacggctgcctggtaggatgctgccctgagggctgggacacgtgattacaccgctctgcaagaatgaaggtggagatcaggctgcaccacaccctaacgtggccctgcaggctgatgcaggtcagaacctagctcctagtctccttgaagggtttctgcctccaaaaatgacttccatcattgaatc

SEQ ID NO: 13568 - DNA, 1263 bp, Artificial sequence
  DNA replication origin
cccccctcccattaccaaatgaaaaaataaatattgtgaacacccacccacctctgatgaaaatctcctggatttggggccccagccattcacctgcaaagtcccttctctaccctctctgcagcccccttcgactcctccccaggcccagctgaggggggaggaggggaaagggccatgaacccttctgatgctagggcacccctcccccgttatcgaggtccaagcagggccagggctgagagggagagaatgaggatggtttgggtgtgaaaaccaatagatgcccccccactcctgctccggccctggttgtagcgggcactgccacctcctcctttgcccccagaaccatcccttctaggagggtatggaggccgaggaggccgggctgggggagccacagccccagccatccagtcatctgcatactgctgtccccctccagagccgctggcatcctcatctgcaaggaagaagagggacagagcaggatgggagggagaagcagagggagacagagggaggaaaagaaattgagataaaaacagaaagagagaggaaagggagggagacacaggtggatgccgggttggggaagggagaaagaccatgagtgacaggaaggcagggagagaaggaaggagagagatccgacagcagacatggggggagagatcatgatgggagacagtgagacagagagaaaaaaaaacaaaacaggcagatggggagagaggataacaggaaaaaacagaaaaatcagaagtacacagaagcagaaagcagccaggaagaggggtgcgggaagagtgacaaagagagacagagacagacagatagaaggagagaagaaaacaatgagtgtctgtgccttgcttctctgtttggcaaactccaccctgcggagccagctcaatgtcacccaccaccctggcttcccagcctcccccaaattgccccctcccccattttcccactgccctttgcccattataaggggcttcccactgttctttaagaatgttttcgtgtctcccctactggcctgaaaggatacagaccccctcattgatctgttacccccagtctttcagggcaacgctcaataaatgctcgttgaatgaattagtgaattaatcaatgaacgctaagagcagaggcacgggcgggaactaccaggagaggggagaggcttcagggcagtgggcggggctcaggctcagggatgcaggggtctcacccgcgtcctgcccgtccagg

SEQ ID NO: 13569 - DNA, 954 bp, Artificial sequence
  DNA replication origin
tgacctgctcggccggggagcccccgaccactggcggcaagtacctgcgagcagagcagccccgaagcgccagctagcgcgcgcggccccgcccctcccggccgcggtcccgccccctgctgccccccgacgcccccgaggctcaccggccccgcccggctccggtccagcagggcgccgcctccagcgaggcgtccgctgccatgcgagagtctccgcacaccgtcagggacagccgggcccagaagccccgcatccgggccagacgctcgcggagctcccacacctgggcgggcgagagggggcggggcgagctggagcgcgacccccacaaccatccccggccccgggcccccccgcccccaactcttggtcatcccacgcaccagccggtgcaggttggtgcctgcggccgtcgtgggccgctcctcctcggtcaccatcgaccacagccggcccgcctcttcccggggcggcggggctcgacggttgcgggcaggcaccgggtcgggggggccgcactcctgaaacacctgcggcaccgggaagagacctcacacagtcaccctggggggaaaccacactgcgtccccactctgaccccagagtctcttcccagatcccctatactgcctctctgacacccacaccgtccccgccccgggcctcacctccacccttctctcccctgtacctgggcggacaccttcgcactgttttcctgcaggtacatcaaaccctccgagatcttcaccccaatggactcggccgtcagctcaaaggaaaaggggccctggagcttatcagccaggatcaggagaccatcttaagggagggagagaaagagaaaggatgggatgagtggtgatactgaactaggatgttcctgaaaatcctcactcgggccttagagaagcagcaaagtgtttgggggaaactcacatgagctccctc

SEQ ID NO: 13570 - DNA, 2398 bp, Artificial sequence
  DNA replication origin
tctttccttccttctttccttctttctttctctgtctctctctctctctttctttctctctctctctttctttcttgagatgacgtctagctatgttgccccagctgggctccaactcctggcctcaagtgatcctcctgcctcagcctctcaaagtgctgtgattacaggtgtgagccaccatgcctggctccaggctttcttgaatcccctcacccagatagttgccccagtcaggctccagtcccctgctgctgagacagccacgaaccacgttgaggcagaagccctggcagggcataagtgaggggaccccccggcacaggggacagccgatgagacgcatcagagcctggctgcagccttcagacaccggcacctgggggcagagagtggggctgtgtcctccacaaacgctgtggctgctctcagcctggcttggtgctgggcacagacagaaatcacataccccaccctacacctagggttggtgaccccacgtggcagcaggtgagattgtcacagatctgaggagggaggttccaggttgctgactctgattcgtgggaggggtggaaatagagaggcagttaggggtggagggaacattcaaggacaagagtgagcccatcacagctggggagggaggaggcggtcaggaggcagaaggtgaggctgggaggtcaggtagaggatgggcagtgagagaggccaagccaggcatctggccttcagcagcagggaagtggagtcattgagggatcctggggggttgggcgggggcagtatccaatctcctactgctatggagatgagcaggcccttggggactgaggagggtatgggtccacagaggggaggagggggtcagagatcatggatcgtggaccattggaggtttcactccagccccctccttcctaattcatcctaggacaccagggcctggaggcagacagagcccaaggcctgtcctgctggctggtggctgtttcttccttgtggggtctctctcacttccacctctccctccctgggccctgcccatactcaggcaccctccaaccttaagcgcttcgctgaccacatttcttccagtctccaggccctgcacaaaggctcgggcagccaccagggtccgggttatctgggagaaggcaaagaaggtgagaaaaaccacaaggttgttatgggtcagtcaagactggagccaagagactgcatcaagagcagtgagggttgggtgtgtggggttctctcagagtgggtcgagtgttgggtggtacagagaggcaggttcaagagcccccacaggaattatagtcttaaagaaaaacaaaggaaggcttgggaagagatggagggattatgttgtacagggcttagagagagagaaattgtgtatcggaactaacactgaacttgaagccagaagacctgggtgtgagccacggctctgccacttactggctgaaaagcttaatctctgggagcctcagttttctcatctgtaaaataagggcatgactgtctacctcacagggttatgatgacaactaaatgtgatactataaaagaaaatgccttttgcgtattgaatgcacaattcctgtttagttgaaccagaggaagtcaaggtgttacgattaggaaggggttggcacaaaggtggctggaggctaagggcaggtgagtgtttgtgtgaaactagggctcagaatgggaggtggcaggggtgggggcatctgcttcaagaagaccaaggggcactgggtcgggcagtggtgagtaaagctcaggatagggatcaccaggtcagaaatggcttcaatgcaggatgggggatcaccaggtcagaggtgactggagcacgccagtttggaggtgagtggtgcacagttcaggggtcactaggtcagaagtggttgaagctcaggcctcaggatccctcacctgcaggcggaggcggcggggtgagtccccaaagggctgcagagagccatcggtagatgaggccaagcgtgagaggcagagcaggtagtcaggggggaagctgtactgtgggtgcagcagcgggaacactctctccaggagctgtgcccagaaatccgccagggtgtcatccaacccctcaccagattccccatagaagtctcgcagccgagagaacaggccattgaatatgagggcgtgctgggcatacaggcggccgtaggagtgggagaagagctgggtcagagagtgctgggctactgagagcatctccagaaaaaactctgcagcaaatgcagggaacaggtggaaggcaggtcaggccaaagaatggggagaaaagtgaacaggcagaggcaggaggagatgggagagaagagaaaagacaagtgaatcagaaactgag

SEQ ID NO: 13571 - DNA, 1545 bp, Artificial sequence
  DNA replication origin
cacactcctgccttctggtcacttctcagcatgtcccttcagctcctatctctgtatggcctggtttttcctaggttataattgtagaacaaagattattataatattggaataaagagttatgctataaactaatgattagtaatatatataatcatagctataatctatttctagtataactattcttattctatgtattttctttattatactggaacagcttgtgccctcggtctcttgccttggcagctgggtggcttgcctcccacatggcactgctgggcattgtctgttaatattgaataattgttttaagattattttcaataaggctttaccttttttaacttgcactgtggccatgagctctgctggaagtgacttgttggtgttatctcctcagttataaagtgaagggatttttctttttcagattactgagagtcttccgttactaggtaagtcaccgcatccttataactccaggtgacactgactggggtttatgggatgaaagaggagtgtgtgcttggatgatggggtgtgatagtgaaggggtgaaaggtttcttctcacacatagacatcgtgaggtcttccttgagctctttagagccttccctcgggataggatgaaatactgagatcctagaaaggattcacaaaacgtgtcactcatcagcgcagattcaccgattcacccctagatgtgtgtgggatttggatggcagagagaaacaggcactgaagatttttggtcaggacagggcagagaaataagaagagttgaaaattcaccaaaggatagataaacccagggcgtttagagaaaacctgtagtgtgcaaaggagcccagaatcctggggcaacttggagggaaatatacttaatttgattcactaagttaggcccagtgaagggattgggtggcataggtagaagccgaaaaataaagtatcttgtattgctggagtagcctctgtttctgaggtcacatccaaacttagcgaggcagcttaacctggtgagagacatgggttcaactcctggcttctgcactgctagggcagaggactgctgtttgctgacacaatcttggtgcgttggaagtgaaagggaagaggcactggtggctgtgctttgggcccgagcagccagaagccagttgccatcacctatgacgaggagacagcgcctggggcagagcccagtatggggtgcgttcagggtagatcaggaggtatgagtgggtagtgggcgagccaggctgggggttgtgggggaggcctgcattgcaggtgtaagcgtgggacccacatcagattggtagtgggtcatgcatgctgggctggctctcaggtcctccctgctggcttcccactcccaggggctttctcctccgattccttagctgggtgaggggcgggacagagccctttcttagggaagcccggcaccccttgctgtccagggaaggggagtccttctagcccctgacagcttctctgcccctcccctggcctccccaggcctagccagggc

SEQ ID NO: 13572 - DNA, 1040 bp, Artificial sequence
  DNA replication origin
agaagaagcacagccgaggccgacatcagagaaactgtgttgctgacttagttgcagcaggaaatgactgaaatggggtaactgtcactcacacactcacacctgtgcccacacacgcacacacagagaccacatccgcagcaggtgggcctggccagacacctatgggacacttattggaggcccaagaattaaagtaagggggtgacacccaggaggcctgggagggggaaagcccagtggcctcatggtctctctcatcgaactcctaagggtccttccatggccctgggcccccgagggtcagggaaaagagtgaggccgggaccagtgtgaggaggcctctcccctgcctgagcgtagagtccattctcaacagagacaaagctgccacgtgcagggatgggtgtggaggcccaggcggcagggccctggggccggtgtgcagcgtgggtggggagtgacgcccaccaggacggccccccatgggggtgagctgtgtccaaagtagctgggcggcagctggtgttgatagtggcataagggacgtgaagagcagcctgggaggcctggcttggtgcctgcgcgggggaaggagggtcaagtgagtctgcacagcttgggcccagccctggcccccctgcccctgcccctgtcacctcatccccaaagcaggtcccctcctcacccatgctcgtgctctcggtgcctgggggctggtgcgggacggctggagcctaggggcagggctgggagagagcaaggatggtcagagctctgcagggcatgtggccatcccagtgtcagggggacgtggacagggaccaggtctcaccggtgcttatgtcggcgcagcagatgaaggaggtagacacagccaaagaggaggactcctgagacccccaagatcccggccaggtctgcccgcagaatgggggcaggagtcggcggggcagagagccctgggcacggagacaagaatcagatgggtggccagttcccgagcccctccctgccctcctggacccctcgccccggcc

SEQ ID NO: 13573 - DNA, 1413 bp, Artificial sequence
  DNA replication origin
gccgccgcgcctcggaagacaacttcgggccccgggagcgcccccgccccgcccccgccgccgcttcgctcgcgtctgacaaagccggagccgcagggtcctggctcccggacccctcgcaaccctccacccctcggtgcgccaccccccacctctgtcgtcccccccatctcccaccccctcccccatcgcagcccccttcccgaaatccggggggctggggcggctgcagtgacggatccgtgaatggatgaaggaacgaacgaatgaatgaatgaaaaacaggtgtggggacgaggccgtggaaaaaacaaacgcccccatacccccatccctcggttgggccggcccccgtcgccacggcgtggggagggattccgctgagcgcggttacccagagcagaaaatcataaaatcattagtgggtgtttatctcaaggtgcctacgaggcttgctgcggacggcctggaattgggggggaaacggggggtaggcgagggccagggaggggctacagaggacgtgattctttctccttggggtcctggaaagggggtggggggatgttttgcccaaccgtagaaggggaggagcaggcatgtttatgcatctgccttgaggctgggcttggatgctgctgggggaaaaatagttgaaggccttggaaggtaacagatggaatcacacacacacacacacagacactcactctctctctcacttggattttccctatgccaggtaagggtttgacattgtgagccccggtgggtgcttgcattagggttttgttgttgttgtttaaggaccctgagccgaggggagtgtgagtgccagctagctgctgtaacttaagtctcatttgcccacgattgtgactgttaaaaaggaatgataaagttgttactggttggtttttcgcggtttggggcggtggtggctctccctcactgcaaaatgaatgaatacgtttcgggtcaaggttagcgtgaaaatgacagcccctgtaggctgccccctttggcactgagctcaagggacacagggaaataattccatcccagcctgttatctgcctgtgaaaagttctggcttggaaatctcactttgatgtgtgtgtctgagccgggtgctcagtccggctattgtttgcgagatggagccagacctgccggtggcatcttgtttactttcttctccggctgctcagtaggggatggagatttgaaatagtcgccaagcctctgccacggagcctgtgctccccgttgattgcaaagggtaatgattaaacaggtcatttgaaaacaaaagccaacagctcggattctgaaccgcgcccccacccctcacacaaagccccctctggctgttgacaccttcagatcctgcttctgcctgccctctgcccc

SEQ ID NO: 13574 - DNA, 1286 bp, Artificial sequence
  DNA replication origin
aggatgtggagttccatcgtccgcccgcgccccgtccgcggcagctcatccgctgggggacgagccgcggcccccgccccctccgcgccctgccggcaccgacagccggcccggggacccgggagctcggcgccaggcgcggggggcggcggcggccggaccgggccggacaaaagggaggaggcccgccaagttgcgagggggagccacgggtcgagggaggcagcgccggcggagcagcggcgcgcgggtgccggcgcggggagcagctggtgttcgctgtaacaaacaacttgccactcaaacgccggtccccactgcgcatgcgcggtccgcgcgcggcctgccaggacttgtagtccgcctgcggggctctcccggtgctgctgctgctgctgccgccgccgggcggccggagctaccggcagcccgatgcacgggaaatgcaggagagcgggcaccctcaggaccacggggaaggccgaggggaggcacggggcgggtggagccagcctgagcctaggcgcgccctctggcacccactcaggctcggtactaggcgcttggagtgtaaagcgagcaaaccagacgactccggtgctggagaaggcccgagtctgggagcgccaagatgtagggcaatcggtcatgagagtgcagagaagccaaaccaaaaagcttgctggggacccggagggaggggattgacaggtcaaagggggtgacctggggggagggggacactcaggctgggttttgaaggatgaatgggagttcgtagcaagggagtgagggcgcgcggttgaaggacagaagccttcgggaggctgaggcaggtggatcgcctgatgtcagaaatttgagaccagcctggtcaacgtggtgaaaccctgcctctactaaaaatacaaaagttagcagggcatgctggtgagtgactgtaatctcagctactcaggaggctgaggcaggagaatcgcttgaacctgggaggcggaggttgcagtgagctgagattgcaccactgactccagcctaggcaatagagtgagagttcatctcgaagaaacaaaacaaacacagtacaaaccaaaaaacaaaacccagctgggtgcagtggctcacgcctatcatcccagcatgttgagaggcttgagttgggcagatcacttgaggtcaagagttcaagactaacctggtcaacatggtgagatcccgtctctactaaaattacaaaaaaattagctgggaacggtcgcatgtgcctgtaatcccagctactaggg

SEQ ID NO: 13575 - DNA, 1202 bp, Artificial sequence
  DNA replication origin
caatggttaggatggtaaattctaggtggtttttttttttttttttttttttagacagagtctcgctttgtcacccaggctggagtgcagtggtgcgatcttggctcactacaacctccacctcccagggtcaagcaattcttctgcatcagcctcctgagtagctgggagtacaggcacatgccaccacgcccggctaatttttgtaattttagtagagacaggttttcaccatattgttcaggctgatctcgaactcctgacctcaggtgatctgcccaccttggcctcccaatcctgggattatcaccgcgtgagccaccgcacccaccttaggtgttaggctggaaggagtgaaagttgcaatatgaaaatgatactagcagttaatatttcagagttcccagtcccaacattaaaaaacaaaaaacctgtagaagtggaaggggaggtccctggagttgaggggtgccgtgaggcctgggttcagagggtgtctctgtggacgtggagccctcccaggagggggctggatggtggaggggatgtctgtggaccaggagcccagtgcttgggaaacactgcaaggatgccagggggacaagaggggcagggcacagtgggagaggcagcagaggattcagggtgagaccagccagaggggaggggaggcctagaggtggcaacagaacttgaacagccacaaacatgagtcccaagcatgaggctcccaaggctggagggcagacacagccgccacccagaaggaaaccacaggcgcggtctccctgaggacctggagggagaggtgggggtgcctatgtcaagggaaggggagggaaggaagagatgggtgggcgagggctcagcgatagagggagccaggttggggctgagcagagagctcaagagcgaaggaagccaacagagggtagcaaggttttgcgggggcggtttcaggagatgacgtggtggacaacagggagaacaggtcgggggggagcctcagggtgccagctgagtcccaggcccttcctgatgggtttgggcagagctgatctgctgctctggtccctctaaggagggcctcagcctagggcgcagcagagaaggtgggatggagactgctatcacctggatgccaccctgactcactgttggtccccctacacgtcagcagcggactaaagccacaaccccag

SEQ ID NO: 13576 - DNA, 803 bp, Artificial sequence
  DNA replication origin
gacagggagagcacggctggaagaacccaggggcttgtcagggaaagtgggggctgcaggggccagggagaagtgaggagggtaaaggatggatgcaggaagagagggatatgatacacgagagaagaggcgagacaggtcagggaggagctgaaggacacttctgggaagcagagggggagaaggaagtgggcagatgggaacccaggtgatagggcttgacccagggactgcagggctcccagggccagccactgggcacctgctgggggttcctgaatgagctcctgactgtgagagatgcaaggtatggggcccaccctgaggcactaacggggactccacacagagacacatgacaaagagcgggtgagccacatcctggagagatcgaatcggcctggaggttatggggagaggccaggctggagcctcattttggagaaagaatgaaggataattagagggtccagcagctgctgaggcctgaggagtgggggcggggctggatctggaggggacagtgagggggatggttggggaaagcagatcagttgtggagacaaggggaagagaaaaggggagaggtggcaaaggcctgaggaagtgttaggggccaaagagagaacttaggggtcgtcagaagaagtggggtctgaggtgctggggacgatgtcaccagtgatcataaaagcctcactgcggtgggcaaagcgggtgccagggcagctggactcaccctgggtgatggagagtttggtcccctcgatggactgccactgctgcctccctgagctccgtgt

SEQ ID NO: 13577 - DNA, 1231 bp, Artificial sequence
  DNA replication origin
tgcagcatggaaatgatactagcaattaatatttcagagttctcagtctaaacattaaaaaaaaaaaaaaaagtcctgtagaagtggaaggggaggtccctggagttgaggggtacctcaaggcctgggttcagagggtgtctctgtggacatggagccctcctgggaggaggctagatggtggaggggatgtctgtggaccaggagcccactgcttgggaaacactgcaaggatgccacggggatgggaggggcaggacacaatgggagaggcagcagaggattcagggtgggaccagccagaggggaggggaagcctagtggtggcaacagaatttgaacagccacaaacatgagtcccaagcacgacgctcccaaggctggagggcagacatagccgccacccagaaggaaagcacaggcacggtctccctgaggacctggagggaatgggggcggggtgccaatgtcaagggaaggggaggggaggggagaagtgactgggcgagggctcagcggtggagggagccaggttggggctgagcagagagctcaagagagaaagaaaccaagggagggggtcagggtgaaggggtctcaggaggtgacatggaagacaacagggaggacaggtggagacctcagggtgccggctgagtcccaggcccttcctgatgggtttgggtggagcagctctgctgctccggtccctctaaggagggcctcagcctagggcgcagcagagaaggtgggatggagactgccatcacccggatgccaccctgactcactgttggtccccctacaggtcagcagcggactaaagccacaaccccagccaggtgagtgctgggcctccccagggtgggttggggggtgcatgtgcaggcagtgggctgatttgggaaacagggagtgtgctgctaagaaccccacaaacccagcctgccacggccattgttgcatccccaacttacccatccttgttctcctttgtcctctaggggccaggctcttgaccttgggctttctgtcccctaaatactagactagtggactccaggttccagcacaaacattcaagaatctcttttctggagtgcccatctgtgccctctgcctgcctttcctggtgttattaagcttttcctgctctttacctgcttcctctcagcctggatcttccagcttttccatattgcctactctgttcaatctgtcctgttcccct

SEQ ID NO: 13578 - DNA, 716 bp, Artificial sequence
  DNA replication origin
tccgcagctgaggtaaatccgccatcttccacccgaacgtcccgggaaaactacaaatcccagaatcctctttggtgtcacatatttttaggcggcggccgcggcgcctgattgttcctgaagcacatctactaacttttctgtttcagactgccttttcctccctctttccgttctctaattcctcctcttcctgctggtctccttcacgccctcaccttaggattttgagactctcctggaccccactgtcacccctgccgccctgtcctcggcccagcactccgctggcagggagaccgggcggcgcatctccccgggaaaacggcgtagactcgcttcttcctcattggcagaagctgggggggcccagcgcggaccgaacccccgtccccgcccacactcgctggtatataagtcggcgtggcgccgcggtgggtgttgagaggcccgcgaactgacgggccagtgagcgggcgtcgggagtgggcggatgcgttggggttcgggtcgtgggtgttgaggcggagaggaaggcgtggtgtggcgtctccaggtgattgcgattgggggaaggtagaggagccagagaacgactcagccgtttcgggggaagaggaagttggacaacatcggctgttttagtgctttttatttttccccaattcagcagagaatattttcaaggggggtgagttataatgacctatcgcgtt

SEQ ID NO: 13579 - DNA, 2358 bp, Artificial sequence
  DNA replication origin
gggggttaggccccctgatccccctcgttaccccgactggcacggaataaggggaggaaatgatcgagatggcggcggagaaggagccgtttctggtgccggccccgccgccgccgctcaaagatgagtcgggcggagggggcggccccacggtgccaccgcaccaagaggccgcctctggggagctccgcggcgggacggagcgtggtccgggtcgttgcgcgccatctgcggggtccccagccgctgcggtcggtcgggaaagccccggggccgcggccacctcctccagtggtccccaggcgcagcagcaccgagggggcggcccccaggcgcagtcgcatggggaggcccgcctgtcggatcccccggggcgagccgctcccccggacgtgggggaggagcgccggggagggggcgggacagagctgggtccccctgctcctcctcgaccccgcaatggctatcagccccaccggccacctggggggggcgggggcaagaggagaaatagctgtaatgtagggggaggcgggggaggcttcaaacatccggccttcaagaggcgcaggcgggtgaattcggactgtgactctgtgttaccctccaacttcctcctggggggcaatatctttgatcccctgaacctgaatagcctcctggatgaggaagtgagccgcactctcaacgcggagacccctaagtcatccccccttccggccaaagggcgagatccggtggagatcctcatccccaaagatattactgacccgctcagtctcaatacttgcactgatgagggccatgtagttcttgcttcgccactcaagactggtcggaagcggcatagacaccggggacagcaccaccagcagcagcaggcagccggagggagtgagagtcaccccgtgccgcccacagcccctctcacccccttactccacggggagggcgcctcacagcagccgcggcacaggggccagaaccgggatgccccccaaccctatgaactcaacacagccatcaactgcagggatgaagtggtgtctccccttccatctgctctgcagggtccctcaggctccctatcagcccctccagctgcctcagttatctctgcacccccatcttcctcctcccgacatcgcaaacgtcgcaggacttccagcaagtcggaggcaggggctaggggtggaggccagggttccaaggaaaagggccgagggagttggggaggccgccaccaccaccaccacccactgcctgcagcaggcttcaaaaagcaacagcgcaagttccagtatgggaattattgcaaatactatgggtaccgcaatccttcctgtgaggatgggcgccttcgggtgttgaagcctgagtggtttcggggccgggacgtcctagatctgggctgcaatgtgggccatctgaccctgagcattgcctgcaagtggggcccgtcccgcatggtgggcctggatatcgattcccggctcatccattctgcccgccaaaacatccgacactacctttccgaggagctgcgtctcccaccccagactttggaaggggacccgggggcagagggtgaggaagggaccaccaccgttcgaaagaggagctgcttcccagcctcgctgactgccagccggggtcccatcgctgccccccaagtgcccttggatggagcggacacatcagtcttccccaacaatgttgtcttcgtcacggtaagagggtccagaggctcttggaataggggccaggtgtgaagatgagattaaatgggaatgtagcagggaaggttatgacccagatcctcaaaagaggggtctgggttggcaagtgagagcctctgctgggcgtctctcccctcttataacctggaaaggtggggtgtctaccttggggcattgaccctggagtcctttgtcatgactgcaaggatctccaagatagaggaggactctctttttgctctgctcccggcttggcctataatccacactggtccaccttcccttcccttgaaggctgctgctcactagggaatttgatccaggtggaacttggtcctcagatttactgaaggagcctgagaatgggagtcagacatggaatgtcttctagggaggagattagggtagcgacagactaatactggcgtttctgccctttgatagccaccttgctcctatcagcggcttttgttttcctagacagtttgttgaagcgtgtcaggaacccaagtggtttggctgtagatcctctccacattgaccctagatagtgggagagggaagaaccagaaactcctctgcagagaggagagagtcctgtgccctgcagagtcccctg

SEQ ID NO: 13580 - DNA, 1481 bp, Artificial sequence
  DNA replication origin
tacacagaagcctagtcaggaaaaggtgtgtaatgcaaattttggtgtggaacttggagtctgccttccctccccagaaaaaccccgtagacgttttgggcagaaggctaactttttggtttttgtttttctgagatggagatttgttctgtcgtcaggctggagtacagtggtgtgatctcggcttaccgcaatatccgcctcccaggttcaagtgattctcctgcctcaccctcccaagtagctgggattacaggcacgcgccaccatgcccagctaattttttgtatttttagtagacacgggggtttcgccatgttggccaggctggtttcaaactcctgacctcaggtgatccacccgcctcggccttctaaagtgctgggattacaggcgcgagccactgcacctggccagaaggctaacttggaaagagttgacggtggaggtaggcaaaagtgctttggatcaaatgcccagggacgggccagcaccttttttgtgctgtggaatcagacttacaggcaattaacaacatgaagctcttcgggggcttgttaggtgttactggaacttcgaacatactgagtattcaggtcaggtgtaaacaggatgggcaaggctcttaaaggtaaaaagcaaggagataatttcagtaactcagtgcagacagctggcttgcaagctccttgagacaggtaatcatggaaggttttcgtgaagtgtgataggctgggctctgcattttgagagatcagaataagtgatgcagagaacaatcgctacctgatcaaaaacaggcagtagctgtggctgaagtcagggagaggcaggtaaggttgtgaacggaggggtatctaagtaaacctctaacgtggacagtgttttccacttgccatgactctaccaagttccaaaaaggcccccaaacccgacttccaggcagcttccaacctgaggctaagtggataaccccctagagagcttttaaccccattttaggcctccaagaagagtcccatttattagcaaaattactttattctaacaaatagtttaacacaaaaatacgaactagccctccagggatctttggggtctacgcttcccatcgcctcagtgtccggtgcatgaggaaggtgtcctctgaagggcggggccggagttgaagtcggagagggggcagaccgtccagggtcaggtgtggagattcataaaatagcgtttctgggtcacacaagatggtcatgtctggcccaggcccaggtggctcctgttgggaggttgggcccaaagcaaggttacactttgggaggaaggatccgggtaagggggtacatggaggaagccccacgcccagaccccatcacctttgggtgcggggctcgagcctgtggcggcaggagagccaatttctccctgagcgcggcattcagaacctgttcctccggcacctgcaggctcaccaggtcccggaagag

SEQ ID NO: 13581 - DNA, 1027 bp, Artificial sequence
  DNA replication origin
ccctgagagcgcagcggggacggaggtgagtggcgcgcctcaccccgactcccgcacgcggccggccgcccgcccccctcaccctcggacacgctctcctccaggccgcagcggatctggaacgactttctcagctgttcctccacggccttcgcagcatcaaagtggctcccggctgcggcccgcagctccaggcccaaggccaggctgctcttcagcacgggcatctccagctcctgcggcaccgcaggctgcggctcggaccgcaccggggagggcggcgtcaggcggaagcggacctgggagcagagggcagggcagtgaccaggtgggcgcgaggccgtcgcgggccgggggccagcctcccccgctcacctgccgccgctgccgagccgcgccccgccgctccgcccgccccttccgccgcccggggctgccgtgccgcggctgagggctgtcgggccgcgggctcaggctcaagtccaggccgggctcgggcactggggctcggagttgcgggacttggggctccgggggtggccccgggaccgccgcggcttcttccccgtccgccgacttcagctctgactccccacaacccatcatcatctttggaggtgccttgagggtgcggggatgcgggggtcgcagacgctccaacggtcaggggacacagcctggctgccgcctcctttcccccgcccctcctagacgccgctaccggaaaccgttaaccctttccttcgggggcggagtcagcagccccacccaccctgttgtcgctcccaggcgtcatttccctcgctccgtccccaggtttccggcaggcttccgcactcacagccttggcaccgcccccaagccgaagtgttggaagcactcacagccttggcaccgcccccaagccgaagtgtttttgagctggggtcggttgaagccctacgggtcctcatcagggccactcctcctcttgaaaactctgctatggctgagttacccagaggaatcttagtcctgctagcgctgc

SEQ ID NO: 13582 - DNA, 1037 bp, Artificial sequence
  DNA replication origin
cgactcccccaagccgtctactgctggggggtcccaggagggagggtgggggttggttccctcccagagggggctccctctgacgccccgtcctgaagccctccctcctccatcaaggctggggatgatgaggagatggggcaggggccgggggaccaggccattactgagccttgaactcccaccccggggacacggggacattaaagctgcataggaagagggggcaggcggctgacgcaaggccgggcagccccaaaggcacattgtaagggaagggaggctcagacggagggcccattgggcgcagggggcccaagccgtgggacccccgaggagggcagctgagccagctgctccgggctggccagggcgcgcagcagcccattctcctgctccagcgcagcgttccgctccgccaattcccggatctgctccttcagcacctccacctcctcccggaccgcaaacatgaggtgggacttcaccaagtcctgggggccccgggacaggcacagcgtcaacggggtgggtgcctcatcccctgcccagtgccttgagggctggggtgggagacagtccccagtgtccagaggatgagggacaaagcagggaagggacaggggaaaaggacgagggacagaggcagagtcagggctcaaagacagagatggggaccagtagccagactagaggctgggcaaagtcaagggtggaggtggtggcaggagggggcagaggatgcccagcagcccagcagggagagggacggaggagctgggagttggtgttccctggtaaggaagaggacagggctggggcagagggatggcttaagggggccaggacctcctgggaccaagatggcttctcttaccatggcttgctcgattttgttgtcaatgccaaccaggcttccggagccactggagagacacaggaaggtgaggggaggagaggagaagccttcccaggtgctggtttcttggaccacagcctcccgcccacacccccctgtacctgtgacagtagagaat

SEQ ID NO: 13583 - DNA, 934 bp, Artificial sequence
  DNA replication origin
ggtcttgaactcctgacctcaagtgatctgcccgcctcggcctcccaaaatgctgggattacaggcgtgaaccactgcacccaggctgccttcttaaaatgactccaatgtcacctcttagagaggcatttccccatcattcactggtttactgaactatttcatttttttatagcacctaacattatctgaaattaaagtatttattgtgtctctcccctgctagaaggtcagtttgctcagtagctatttgtagaatgaatggatcctcagaaactgctcctccatcccctcacccaccccccactctcgcttcccctctcaaacttctcggactcaggtggaattctgctcctgcgctctgccctagggttggggggggagctggttgtggagctggggggaggcggagcctgggcgtggacctgcatagcccaacaggctctgggggcagcagcaaaaagggcgggggcgacaggaacatgacaagacgcctctgtgaggccccgggaggccccagcttctcagaaaagccaagaacagagagtccagggtggttaagggacagagcagaggaagggggcccaggtggtgtcccctggcccttctccaccactcccctctgttaagagggagaagaggcatgaggggacgtggaagggagacagacttttgggcaaggaaatagcaaaacagatgcgtgcaaacagaagaccgtcaggaggtgggggaaggctggggagtagggggcactgagagagagaggcagggtctgtggccccaagagaagctcaggccaggcttaaggacagagagcagggaagctggaggccaagggggtttgctttggaagagtctggggacaggacaggaagagaaacagcatcttctcccctggggtgggtgctgaatgcaagagttcaagaagagttgg

SEQ ID NO: 13584 - DNA, 918 bp, Artificial sequence
  DNA replication origin
ccagcggcagcctggggcccacgcccccgcaccgtgtaccccgtgcaccccgtgcaacccgtacgcccggcgcgccccgggtccgcacccagcgtcggtccggggccgaggctgcggctgcggggcccggggtgcagtgaggcgctggggccgccagggggtgccgctttccgggccgaggggctccgagggtggggaacgggacgggcggcggctcagcccagcagggggcgtgctccggcggccgcgccccctttccccaccgcccccaggtgccaggagagcacctgagttggctcgcgggggaatcggctgcctccccctgcagcctcccgggggtgcccggatctcgttccaccgtctgggctcaaagctatccgcccccgtggcccgagtcctcctctcgtgacctttgactcccccggcgccgctcgcaacgaccagggtcgacctgagtgtggccaccgcggctaccaccctggcactgtcggggggccgctacgggacgtgacctcgacctccccttttctcatttatcttttcttttctcattatctcccctagaaataactccctctgaaatcccttgggctcacagctctgcagcgggggtaaatcagctcgagaagacctcggttgtaccttccacgggctggaaaatgggcacggcaaagataggcacggcctgatccctggagcctgcgaatgctactttccatggcagcgtctttgcagtcttgctgtgtggctttaggcagatcgtgcaacctctctgagagacgctttagtccggggatgtccactcttttaacttccctgggccacattggaagaagaatttgtcttgggccacacataaaatactcttaacactggcggggcgcggtggctcacgcctgtaaatcccagcactttgtg

SEQ ID NO: 13585 - DNA, 1692 bp, Artificial sequence
  DNA replication origin
cgacgctgggtgcggacccggggcgcgccgggcgtacgggttgcacggggtgcacggggtacacggtgcgggggcgtgggccccaggctgccgctggggggcgccgccgcacgccgctccgccggggccggggagaccgaactcagcaccgaccggccgggcagggggcgaggggcggcgaggagcggacgcccaaagaccgcgacgggctggcgccgggcccccagcgccccacgaccttcctccgaatctgcccccgcaggctccgcggctcccccgccccgcgccccagccccacggccccgcgccgcacggccgctcccgttccgtccttggagggtgtggaagggtgggtttggggccgggggcgggtctgggggcggacccggaggcggggctgtctctgcggcagggcccagcttcgctccccccggtctgtctctgtctctcctcctccctcctcctgctccgggcggagcccggcatgggggggccggcgcccggcaggccaggtacggtgatggagaacctggggaggcttggtgcaggaaggttggggtggggggacaagggacagggaggattggcggagcgaaaggcggagaagcccagggtagcaggacaaggggaaggggaggggtgccaggaacctggggcccttggatggagaagggggatgaagcaggccaggtttggaacaggggaagggggaggacggctgtaaggaggggcgcctgggaggagaagtgaggctgaaggcgaaaagaagagtgtgggtttgggggaaggaaaaccggagcaggtatggaggccgcagcccagaaggtagcagtggggccagactggagccccccgggtgggattgaggggcggggactggaagaggaaaaccagggggcctcccaaatcctggaggaagaagaaggtgattggggccatcagcgagggagggaggcagagactaaaccattgctaaagggccagggagccagaatcggggtggaccaaggcccaggcccggggaaggactggaagtgggggaaggcaggcagtggagatagatggatgggtggtattttagatacccaactcagggtgtctcccatccttccttcagcgtccccaccctgccctcatgagatccccctacagcccaagataggggggagagtctgaccatctccccttttcccagtggggtgcaatgtacgcaagtaggccctgggcataactctgcctgtaggtgtgtccagttctgtgtagcagatttgtgtgtgtctggaggtctgtgggtgtgtctgtgggtgtttatgtctgtgtgcctgtctatccctaggtttctgtttacctatgccaatctctgcgtctggtcctctgtctgtagatgtgggtcggtggctccgtggtttgtgtgtctgaatgtgtacttgtgtagctgaggggttgcagtccgtttgtggggcctgtatgggtggtggatcgggatgtctttacacaagaagggaatctgtgttgacctggtctctccagagtgtgtatttggggctctgaacacctttgtcggggtctgtgtctgtctgtctgtgggtcctcgaagctgtgttgggttttctgtctgtgttttcctctctgaggacccgagtcatgtctcttctccgttttctctctttcattcatccctggcccccaccc

SEQ ID NO: 13586 - DNA, 1574 bp, Artificial sequence
  DNA replication origin
ccttggttcttccctgaatgaaccctcccggcaagcctccccgggcgtggaatagatcctcccagctcccagctccaccccagggagagatagggggtatctcacctgctttcttgctggggggcgtctctgccccagacccaggccccaccatgctgagcttggtgctggggtgtctccggggcttggcagggggtcttcgggtgctgctgtcctctgtgaggcccccactggccccgccagggccacccccgacactgtccatgctgcccaccgagtggcaggagagggagcgtggggccatggcgctgcggcaggggtgcggggtgtgctcctgggaggcgggcatcgtcatgaaacccatcctgagggagcgccgcagcgaggcgatgtcccgcacgcggaccccaggcccctggccggccgcgggcccagccgagccagcgggggccacctccttactggagctggggagagaaggccacgatggagtggaggaagggcctcggacctgggcatcccccttctccaccccaagaggtgtcagcaaccctgtggcttcccagggaagaggacgggagcctgggtggggacagggttgccagaaggtccagggcaccaatgaaggggcttcaggcagaatcttgggctttaaaaacacaaggcagttgggggcagggatgagaagaggggtgagtatgcctgcaggggagcatccctggggctggcggatcccagcctgggcacctgtgtggacagccttgtgcagaggtagagatacaaacccaggtaacacagatggacacgcctgccccccacagctccttggcccctctcactctcacagtggcccacacctggcctctggttacccctcctgcccagccactgtgacctctgcccccacggcacacctcctctcccagatgcaggatgtgcccctccaggaccagagcagcctccctccctggcccatccttcttcctccctctcccctggtgctgttctctctctgtcagcctccccggctcacccccattccattccactgtccctgagcttctgtctgagtggagggtggcagagggttgggggggcggctggcagggaagagaggagagctgtgtggggtgggcactcattaaggccctgtctactagcccttcattagggagagatcgctgcagcgatcactctgattaatctaattaacaacaagaattaaactccacagttgcgaggaaggaaaagggaggtggctgtgagtcaggctccaagtggctgtgaagtcaatgggagagaagaggagaaggagagaaggatgggagaggccaggccccaggtccctggaagggcaagcggggaggcagacagggattgcaggggtctggaggtcgtcccctgccctggctctttggcaaggcccagcctgcatgtctgcccaccacacacacaaccccatcacttgaccactcacctcccccagcagggaaaactgggaggaggccaagtggatgttctctgatgcccctgaaatgaccccttccctagaccctgggagagaggcggggcct

SEQ ID NO: 13587 - DNA, 1023 bp, Artificial sequence
  DNA replication origin
ggcacttggggagctggggtggagccggctggctccttggagtggcagaggacaggtagccttgagaccccatcgccaggggttcgggaagcagacttggcttgggggaaggccaggagtggaggccggtgctgaaggaggttggggaagggcggggggatttcacaaggagtggtcttggtgggcgtcccgtccctccggctcgggagggctgaagctgggcggcggtgggcatggggcggaagggcgtgaggctgttgtggcggggatgttgccgtcaatggtggagggccattggcccggccttccccagcctcttccggcagcgggtacttcatctcttcatagatggcctcactctcttcagagtccgagtcggcgcccgctggaggggtcgggcccccacccccaagagggggcccagccaggcctcctccacttcgtcctcctcccctaaagacgtcccccaccatctcaatgtacacaggctcttcctgggcacccacatcagggtccccagctactcgggaccccctagtgaggcgctgaagaggcaggttcccccctcgaggagaggggcctggggggcaggactcatcgaaggagacagagagctgggtgttagggcttcgcctgggcttctgcggaggaaccttccggctggactctcggccctctggggttggcttctgtgagcctggacaggacaagaaagagaaaaataaaccaggcttttaatgaggggagcaagtgggaggagcccattctgatcccttgacccttctgcaaggacatatctgcctcttccttttccccacattcctcaacttacagccccaggaggtttcttcatttcttttttattttttaatagagatgggtcttgccatgttgcccagactggtcccaaattcctgggctcaagggatcctcctgcctcggcctcctaaagtgctaggattccaggcatcagccaccatgcccagctgtaggttccttttctactagtcagcccttggtctt

SEQ ID NO: 13588 - DNA, 954 bp, Artificial sequence
  DNA replication origin
cttgaggctctcataggcagggggtctcttgagcccagctgctgtggctgggtaggtccacagcggggtcagggggcctacagttgggtccggaaggctgtggggggaggccaggcagccgcggtggtggaggaccccagctgctgcgcccatggccccaccgtgggggctggtcttccctggcacagggggccttgagctggtacacagcatcccatggaggaccgagatctccttctccgtctttggctccccagcacccaggggtggaccagctggcaggacagagtgcgtggtcaccttgaccgccgagtacaccatggtgtaagacacggccttgtccttgggggggccggggagcaaggcggccggggcagggggggctgccggcgcccccgccgccttagggcagatcatgctgtgggagttggggagctcccgctccccccggggctggccagagccctggggtggcaacggtgtcgagtggctccgggcccggcccgatggtcccagcagcagcaggttggcagcaggaggtggaggcggtgggggaggcgtctcccgctcccgtgcaggcacttggggagctggggtggagccggctggctccttggagtggcagaggacaggtagccttgagaccccatcgccaggggttcgggaagcagacttggcttgggggaaggccaggagtggaggccggtgctgaaggaggttggggaagggcggggggatttcacaaggagtggtcttggtgggcgtcccgtccctccggctcgggagggctgaagctgggcggcggtgggcatggggcggaagggcgtgaggctgttgtggcggggatgttgccgtcaatggtggagggccattggcccggccttccccagcctcttccggcagcgggtacttcatctcttcatagatggcctcactctcttcagagtccgagtc

SEQ ID NO: 13589 - DNA, 2088 bp, Artificial sequence
  DNA replication origin
ccgggcccggagccactcgacaccgttgccaccccagggctctggccagccccggggggagcgggagctccccaactcccacagcatgatctgccctaaggcggcgggggcgccggcagccccccctgccccggccgccttgctccccggcccccccaaggacaaggccgtgtcttacaccatggtgtactcggcggtcaaggtgaccacgcactctgtcctgccagctggtccacccctgggtgctggggagccaaagacggagaaggagatctcggtcctccatgggatgctgtgtaccagctcaaggccccctgtgccagggaagaccagcccccacggtggggccatgggcgcagcagctggggtcctccaccaccgcggctgcctggcctccccccacagccttccggacccaactgtaggccccctgaccccgctgtggacctacccagccacagcagctgggctcaagagaccccctgcctatgagagcctcaaggctgggggggtgctgaataagggctgtggtgtgggggccccatcccccatggtcaagatccagctgcaggagcaagggaccgatgggggtgcttttgccagcatctcctgtgcccacgtcatcgccagcgcagggacaccagaggaggaagaagaggaggtgggcgccgcgacatttggggcaggctgggccctgcagaggaaggtcctctatggagggagaaaagcaaaggagttggacagtgagtgaggggtggggagtgggggctggcatcaggggtggggggcagctggggatgcctgcgatggtttgggggaggtgttggaggggttatttggaagtcacagccttgagtctgggatgttttctaggagaccagagaggtgggggtgggcgatagacagaaagaccggggtcccccagtgtgcgctggaggggcaggaaggtctgggaggcgaagggggtcaaatctggccctgtcctgctctgctccctgcccctcccttcccggggctgcaggggtgtgtgcttgtgagtgtgcgcaccaggaactaaacacagctgcctcccagctgttaccatggcaacccatccagacaggagggagaggagagggaggcccctaccgttgcctggcaacgcaatgctctgccaggcctcctctcagagatgagcttagttcacaggcagcccttccccccagcgctcccccttctgggctcaggaattgggattctccccctacaggtcttgatcccagggggatggtcattctcgccctatctggagatggaggggcttggaagctaaagctgcggttggggaggcccctctgaccagggaaaagggtttggatgcagcacatagacatgattctcagccccaagagatggtaccaatgggtggaaaggaaggggtgtgtgtgtgtttgtatgtatgttgggggagtgtgaaggagccccatcccagccgttacttgcaaaaggggcaattgtgtctcctggtccacccatactgcagcatgtgtggccagagggacagaatgacgcctccaacatgcaggcacacagctctccttgtcatcccagcagaggtcgaggacggtgcccgggcctggaatggcagtgccgagggtccaggcaaggtggagcgtgaggacaggggccctgggacatcggggatcccagtgagaagccagggggcagagggactgctggccaggatccaccatggagaccgaggagggagccgcaccgcgctgcccattccctgccagaccttccccgcctgccaccgcaatggaggtgacgcggcctgcacacacctgtgcacagcggggctggctgggggatctcccggggtctagctgcacctgtcctgacttcctctcacctgttcacgtctgtgcccagggccctaaatcctcataccacatctccacccctttttcccttctgatgaggcaggggcagcctggaccattcaagggcaggggactgggaactaggggaggggtacctgaggcccctgcactcctcactcctccttcttccacctcagacttcacgggaggctaccgcctgggg

SEQ ID NO: 13590 - DNA, 1223 bp, Artificial sequence
  DNA replication origin
gctgcgcaagttggattttggcccccatgggccccacagccagagggagccagcagaggccgttggggggcaagcaaggacttgcttctgaggggagacgtgggtctcggcagtgcggacccgtccggtcatgctgaggtccccgaccttacccgcgttttcctttctcccccgcccgcggcacagccccaccccgcgctgccgctgcctctgcccctgccgccccagccggcccgcgagcgtgacgggaagctgctggaggtgatcgagcgcaagcgctgcgtgtgcaaggagatcaaggcgcgccaccgcccggaccgaggcctctgcaagcaggagagcatgcccatcctccccagctggcggcggggacccgagccccgcaagtccggcaccccgccctgccgccggcagcacacggtcctctgggacaccgccatctgaggcgggcgggggggtaccggggcgcctggactggggagggggcgggcacgcctggctctcccgggagcctcgccttgagagacattgaaagactacgtgggagagtgccagggagaacccctgccctccaacctaccccccgggatggggagagtctgccaggcccattgggcttaggatgccaacagcgctgctgagaaacggaggaggaggagggtttgcttgaggttggggcgagagtcgctctggctgttcttcccgctgggcgttgtacacccctcctcctgaaccaagccagaggtcagcatggggaagggaggaaggaagggatgggaggaagaggggggtgggtgagctgaaagagagggactagagtgccagatggaggagctcttttctagagagccgggagttggggagggggtatttattttgttatttatttcagtctggagggcgattctgggcctttctgacctactcctgagctaggagtggagaatcagggccaagtttgcactctccccaatgccaatgcctaaaggccccgccgtccatgccaccccacagccaaggaggggtctgcatggggagtggaccgagagaagaaggggcccagggaagcagagggcccaagaccattcacagtatttacaatttgccagaatttggtagtcagtgtggcctgctctgaatcaggcatcttatttagttctggggtgagggtctagtgccagggatgggcaggatgatgggggaggaggagggaaattttagcg

SEQ ID NO: 13591 - DNA, 1206 bp, Artificial sequence
  DNA replication origin
tagagagccgggagttggggagggggtatttattttgttatttatttcagtctggagggcgattctgggcctttctgacctactcctgagctaggagtggagaatcagggccaagtttgcactctccccaatgccaatgcctaaaggccccgccgtccatgccaccccacagccaaggaggggtctgcatggggagtggaccgagagaagaaggggcccagggaagcagagggcccaagaccattcacagtatttacaatttgccagaatttggtagtcagtgtggcctgctctgaatcaggcatcttatttagttctggggtgagggtctagtgccagggatgggcaggatgatgggggaggaggagggaaattttagcgggtggagggggtgggcagggtatttatttaaattaaaaaacaaaacagaagagatgtcaggaacttttttttaattcctttcttttcagaataatatattaaaagactcatgatcctaaagctggcttcttctatttcacagcgtgctctgctattcttacacttgctccttttcccatcttgcccctggttggtgggagttgaaggttgtgcggggaggggtgagtagctgtggccaagtcacagggcgaggtggagttccaggtaagtctttgggaatgcactgggccatgactccattagcattttttttgtgcacagaatgtgttcttggcattgcactgatgcagaaggaatatttgggcatgaagcttgccttcaagtaccttgtgatctactcagatgacctccactgagatgacaataaactgttgaaggagtaagagaggggggacagggccaagcgtggtggctcacacctgtaattccagcactttgggaggtcgaggtgggcagatcacctgaggttaggagttcaagaccagcctgaccaacatggtaaaaccttatctctactaaaaaaaaaaatacaaaaattagccgggtgtggtggcgatatatcccagctacttgggaggctgaggcaggagaatcacttgaactcaggaagtggaggttgcagtgagctgagatcatgccactgcacttcagcctgggcgacagagcgagactctgtctcaacaacaacaatgaaagaaaagaaaaaagagggggtacagggctggaatcatctaagaaggcttcctgcaaagttaccctaaaagg

SEQ ID NO: 13592 - DNA, 863 bp, Artificial sequence
  DNA replication origin
ggagggaggtgggggagtcagccccccgcctggccagccgccccgtccgggagggaggtgggggggtcagccccccgcccggccagccgccccgtccgggagggaggtgggggggtcagcccccagccggccagctgccccgtccgggaggtgaggggcgcctctgcccggccgcccctactgggaagtgaggagcccctctgcccggccagccgccccgtccaggagggaggtgggggagtcagccccccgcccggccagccgccccatccgggagggaggtgggggggtcagccccccgcccagcgagacgccccgtccgggagggaggtggggggtcagccccccgcccggccagccgccccgtccgggaggtgaggggcgcctctgcccggccgcccctactgggaagtgaggagcccctctgcccggccaccaccccgtctgggaggtgtacccaacagctcattgagaacgggccatgatgacaatggcggttttgtggaatagaaaagggggaaacgtgggaaaaagattgagaagtcggatggttgctgtgtctgtgtagaaagaagtagacatgggagacttttcattttgttctgtactaagaaaaattcttctgccttgggatcctgttgatctgtgaccttacccccaaccctgtgctctctgaaacatgtgctgtgtccactcagggttaaatggattaagggtggtgcaagatgtgctttgttaaacagatgcttgaaggcagcatgctcgttaagagtcatcaccactccctaatctcaagtacccagggacacacacactctgcctaggaaaaccagagacctttgttcacttgtttatctgctgac

SEQ ID NO: 13593 - DNA, 1638 bp, Artificial sequence
  DNA replication origin
cctccctcccggacggggcgtctcgccgggcggggggctgacccccccacctccctcccggacggggtggctggccgggcggggatctgacccccacccccccgcctccttcccggacggggcgtctcacctggcggggggctgacccccccacctccctcccggacggggcatctcgcctggcggggggctgacccccccacctccctcccggatggggcggctggccgggcacggggctgaccccccccacctccctcccggacggggcggctggccgggcggggggctgactcccccacctccctcctggacggggcggctggccgggcagaggtgctcctcacttcccagtaggggcggccgggcagaggcgcccctcacctcccggacggggtggctggccgggtggggggctgacccccccacctccctcccggatggggcggctggcctggcaggggctgacccccacctcccttccggacggggtggctgccgggcggagacgctcctcacttcccagacggggtggcagccgggcggaggggctcctcacttctcagatggggcggttgccaggcggagggtctcctcacttctcagacggggcggccgggcagagacgctcctcacctcccagacagggcggcggggcagaggcgctccccacatctcagacgatgggcggccgggcagagacgctcctcacttcctagatgggatggtggccgggaagaggcgctcctcacttcctaggtgggatggcggccgggcagagacgctcctcactttccagactgggcagccaggcagaggggctcctcacatcccagacgatgggcggccaggcagagacgcacctcacttcccagacggggtagcggccaggcagaggctgcaatctcggcactttggggggccaaggcaggcggctgggaggtggaggttgtagccgagatcacgccactgcactccagcctgggcaccattgagcactgagttaacgagactccgtctgcaatcccggcacctcgggaggccgaggctggcggatcactcgcggttaggagctggagaccagcccggccaacacaacgaaaccccgtctccaccaaaaaaatacaaaaacccgtcaggcatggcggcgcgcgcctgcaatcgcaggcactcggcaggctgaggcaggagaatcaggcagggaggttgcagtgaaccgagatggcagcagcacagtccagcttcggctcggcatgagagggagaccatggaaagagagggagagggagagggagagggagaccgtggaaagagagggagagggagagggcatcatctcttctatcacccagtgtctggtgctcacatgctgccatcctatccatgaagatgagggccacaccctgggcattgcagagttggggctggaatgaacttgggttgctgagagtttcatggaacagagccactatactgacctagattttttttttttgaaatggaatctcactctgtcacccaggctggagtgcagtggcctgatcttggctcactgcaacctccgcctcctgggttcaagcgattcttctgcctcagcctcccgagtagctgggactatacgcatgtgccaccacgccc

SEQ ID NO: 13594 - DNA, 911 bp, Artificial sequence
  DNA replication origin
cctactaggagggttaaaggcagggtttctaaagttggaagacccagagtggaatcctgggccacgcactcgtgtgatctgccgcaagttgttgaacctaagggtgtaaaatggggattccacctctgggataggcggagcgaatgaaatgacatttataaagcactcccttcgctctgtggctcaggaattagagcactggtctagtaaagcactcttgctccctctccctctctcccttaagcgctctcttctttccccctcctgctcagcccctcacatggccacttctcttcggctttgcatgacactctacacagtctagagtaagcctttgaaatttgccgggaattaacgtcatcagtcgggaggacgacagctacgcacgcgcggggcacctcctctgtctcgcgcgctaactttgcagccccgccagccaatcaaaattagcgtcggagcccgagtgccgaggactcaccaatcggaactaggaggcgggccacggtggaggcagcggcgagagggggcggggacaaggagagggcacgcacggttctcgctgctggggtctctgccggccaataggagaggcctgaggcctgaaggcggtggggcggggcattggcggctccagcaaccggaggccgtcccagggagggccaatcggagtaaggaggtgggagaaacctagccaatcagtgtgcaggacgggcaaggagggtggtggacggcgaagtctcctgcggatgccgcccgctcccgagcttctgtcaggggagccgggcgtgcggaggcggctgaggaggcgggaaggcggcagtggttgaaggggtgattgctgactagcggggagggagtgggcagcgatggtgatggcggcgaagaagggcccgggcccgggcggcggggtc

SEQ ID NO: 13595 - DNA, 1385 bp, Artificial sequence
  DNA replication origin
ggagtaaggaggtgggagaaacctagccaatcagtgtgcaggacgggcaaggagggtggtggacggcgaagtctcctgcggatgccgcccgctcccgagcttctgtcaggggagccgggcgtgcggaggcggctgaggaggcgggaaggcggcagtggttgaaggggtgattgctgactagcggggagggagtgggcagcgatggtgatggcggcgaagaagggcccgggcccgggcggcggggtcagcgggggcaaggcggaggcggaggcggcctcggaggtgtggtgccgtcgggtgcgggagctgggtggctgcagccaggccgggaaccgccactgcttcgagtgcgcccagcgcggggtcacctacgtggatatcaccgtgggcagcttcgtgtgcaccacctgctccggcctcctgtgagtgaccgggagggagtggccgaggtcggcgtggggggacccgggggcggggtggggaggccggggctccggggcgcgagggaagggggccgaggtgaggggcggaggggaggtcagggaacgcgccggctgtggggacggggtcgtctgctgcagcggtgtggtggggaggggaaagggcaggggagaggaagcaaggccggagtcgctctgcggagagaagggtacgggtgcagaaagacgcccggagagggaccgagaaactccccgagggggtcgaggcaaactgcaagtggggagggagaaagtgcggaggatggaagggaactcggagtgggatggggtgtcgggacttaaagggccagaaaatgacatgcacctttagagggaacttcatgcaggtggaaagcaaaaaggaaaaaggtggggaaagccggcctggagatggacgggcacctttcttccttcgggcttgtgtccctgctggagtgtgagatgcagaagccagctgaaacttggttgaaattcctatgattagagtacaggattaaaaaaaaaaaaaaaagcgaattaaccccgattgacagcctagagatagtggctggaagggagccatggtccagagttcaggtgtagatactaatcttagcagggctttgaaatgttacccagaaggtaaaactcttacgaaatctaagagatgagagccaatgggttaccctggtagagagcttagctttttcaaacgtttgcacgtctaggtgagccatcctgaaggttaatcatttacacctttaagatccctgttgccatgactggatcctggtggtagcatccaggaaactctagattttgggggggctttggtgcatcatctgagtgctactcttggcattggtactgttcggtcatgccagagtgaatttacagccacaattctagcctagatttctggttata

SEQ ID NO: 13596 - DNA, 787 bp, Artificial sequence
  DNA replication origin
tctccccttcccaccctgtccagagtccttagactcctcctggcctcaggtcccctcccctgggtctccacaggcaggactcacctccaaaggccagccctgtgctgctgccgccgccgccgcccatcgtgacagactggagcggggggacctggccagccatcccgaagaggctacaacacggggagagagaagtcatacacagctgccagggccaatcaaacctgagcaaggggccaggagatgccaaccctgctctccagggtgagtaagggagaggaggggaggggagaactgccaggagatgccgatggggctgggaggaacatggccaggcttcgggcggctctcctgccctacagcagactgcccactgtctgtacctacctgctaggaacacctgcagcgggcaccccgggtcccaggaagctgcccacgtctgcgaggctgtttggctgactggcgggtgccaggggagtggcaccaaatggagtcccctggctgctccctgggcagttgtggaaaatacaacagggagagctgaggtaagacagggcgggaggggcaggagagcagatggaggtggtggtggtgatggattggagtcatggcatgacaggtgcctgctgggttctctgaggcagcccattttctcagggaccacccagttcaggaggtcttgtctcccaccaagagttctgggcaaggtgacagcccagcccttctccgtgtcccctgcgctcaaagctgcgctgcggagaggaaagcagctcgtccccaggtcagg

SEQ ID NO: 13597 - DNA, 1629 bp, Artificial sequence
  DNA replication origin
cttagaggaccctgagatatcacccaaggcaagtaaggtgcctaaaggggaaagccgagggtcagggaggagaggccaacatgcagcccccataaagatggcattcagggaggagctccctcagggaaggaacaagatatgacaaagacagaacaagagaacagatgcaaggacccaaacctagcccaagggccagggcagcctgagcagggtgggcagggcttcccgccacacttcctgcttcctggggaaggggccccacgtgagtgggaatatgggaggcaagtgctgtgtgcatggagctggggtcctcacacacctattccaaggtcacattgagagggagatgcagggaaccaaccagcacccagccagcaggcaggtgggacccagggcctgctccaggtgacctctggtaagccaaagccccactggggtgcaggagaggctcgaagcacaggtggtgtggtgtggggcgggggggccgtggggcggggctcggcaactgcccagtgttgggtgttggccacagaggcaatggctccgtaagtggccaacaaaaccggactgtgttcaaggccatagccccacgtggccaagggccttgatacaggcaccatgtgcaaaggggcagggacacaaaggacatgtgcacacccctccccctcccagtcctgctgctgcctcaaagaggccaccaaagggcccctgtccctgctgcactccgggcccaggagtcttttttactccctgaggcttgaagatacctgaggaagatctctttattccttccccttcccactccccatcaaccaggtccccctgcagcacccttccttgtgaaatcacagctgctatgacagtgaccagctccaaaccaccctgtgtcactgaaccttgggtgctgggtgacacatgggcaggaaaggcaggaagagcagggatctgagggcctgggggctgggcaagcctcaggggtggggtgggtgctgatcaatgccaggtgatcaatgccaggtgattggacccactgagtaccaggacaaacctggagtcacgcaactggcctacatcagttgccttggcaacacactgcccttgaccctacccggaaaagatttatttcagccggtagccctggtaacttgagtggctccccagggacaggaagtggcagaacctcaactctgcctctcctgacctgaggggttcacttttcatccctgtcagggacggggcactgcgttctcagcccctatggaagaatgttatgggtttgggggaatccacggggaggagactaggctgttccagcgtgcccctccttcctcagcctgaggccttgctcctctgtggaaggcaacacagggacagagccacacattcagcccctaccctcagccctgctcccatcccctggcccacaggtctgacccgcaagctccgatgtggagacacttggtggctgactcctgcttcctcacacatggggatggcccacaggtgaccgactggctgaatgctggggccatgctagaggactgctgtctgcagagcatggtccctgcattggccagaagttggtgtgagcccaggtgagtcactctagccccgtggtgtgtgtggtgg

SEQ ID NO: 13598 - DNA, 2056 bp, Artificial sequence
  DNA replication origin
ctcccaaactaatgggattataggcgtgagccaccgggccgggcctgtgcccggagaactctaaacctgcccctttaatgtttgaactttcggcgacctgggggaggggcgagccacggagaaaccacagccagaagcccccgaggcccccggaagcccggggctcgggcctcaccggcatcaccgcgctcctcgagcagggtgttgtatcacgcctgctgctccgcctcgcctgccgccgccacgcgcaggctgctgtcgcgggtgtagaggacgatcaggtggtgctggcgcgcatctgcgcacttgctggtggtgcacgcacccgccaggctcaggctgcgctggagccgcgctcggcacgcgcgaaacttctgctcgctctcggaacactcgggacgcggcgggtctgcgcgcaggtggccgcagaaccgcacgtcggcagggcaggcccagggcagcggctggctgaggggcacggcggccattcccggctctccccggggccgccgcctgcgggcttcattcaggggcgaaggcaataaagtggctgcagaagaggcagagacggctgggtctcgtgtcttgagcacggggagaggccagcaggggtgggggtgaggtggcgaactcggcgggccgggagcagcggccgggcaggctgccacccgtcttgatgcccagcgtctctcccgggctcccgactggaagtttggggcaaggactctgcgcacagcgagtgtcccggtgactgttgcccctggcctgggctccccactacctccctccctccgccgaccgctccggaacccccaccccacgagactaatcctcacgtcgcccaggaactggagtttgagtagggaagtccaagagaggcggcctcgaccccaagactgagcctttataggggcagagagcgtgggggcgtctctaccgatcagctgactgcggtccggacacgtcgtcggggcaaccgagaaagcctcggtgtgaggccagtgatcggacttgtggcagcggtggtggcgctggcgattagagggctttggaacggggcctccatgcaccctgctggctcctgccacgccccgctcggcctgtaggtgtccttcctgtgtgtacccccttcccatccaggagtggttttgtgcccttccaagtaaccaaaggagccaccgccactgagcactgcgctggattatttctgagctggagattgagtttcttgaaagtttggggtgataggaggtgacttgggctaagtaagctcagggggtagtccctgtgcacagaccatacccgctggaacccagtcaagtggccactgaaggagacctcggaggaagaggccatctctcaggaagaccccttcgggctgccccattgctctgggcccctccttgccaccactgcccaaaaatactaccccgggaccacctgaaggctctgaccatggacgtgtggacttcctcatggaggtaccctttgcttcttgaaaaaattgcgattgggctggggactggacatttttgcactcagttctgatccaaggaccactgaccccctccaaggggatgggggtgaaggtgcaccagacaaaccagcaggtgacacctggtgggaccttagaggaccctgagatatcacccaaggcaagtaaggtgcctaaaggggaaagccgagggtcagggaggagaggccaacatgcagcccccataaagatggcattcagggaggagctccctcagggaaggaacaagatatgacaaagacagaacaagagaacagatgcaaggacccaaacctagcccaagggccagggcagcctgagcagggtgggcagggcttcccgccacacttcctgcttcctggggaaggggccccacgtgagtgggaatatgggaggcaagtgctgtgtgcatggagctggggtcctcacacacctattccaaggtcacattgagagggagatgcagggaaccaaccagcacccagccagcaggcaggtgggacccagggcctgctccaggtgacctctggtaagccaaagccc

SEQ ID NO: 13599 - DNA, 1358 bp, Artificial sequence
  DNA replication origin
tcctctgggaaccagtgcccaggggtgggagcccgcagcccgccaccctagtggtgtttcctcctagggttcccggtggtgtgctgtgaagatgtcttcctctcggaccctctgctgccccgggggcagcgtgttcccctgtacctgtccaaggccccccagcaggtgagagctctttcccctccctgtccttaccccagcctccaggcttgcctggcaggaaacacattccattctctctcctcagatgatgggctccctgaaactgctgccgccgccccccatcatgtctgccagggtgctcccccgcccatcaccctcccggggcccctccactgcctggctcagcgggccggagctgatcgctctcactggcctgctgcagatgagccagggggagcctaggcccagctcctccgcggttggccccccagaccatacctctgacccacccagcccctgtggtagccccagcagttctcagggtgctgacctctctctcccacagaccccagacacccattgtccatagccttctcagggcagagtgggctggttgtgttgacaataaaacagtgttggtttgcaaaacaggctccgtgtggctgggagcagagtaagtcatagaggcaggaatggggtctctttctgtctcactgcagatcaccccctgctgtgttaggcggagggcgagggtatccatgacctaaggcatttctgggctgactgggcagagcccctttaatgagtgggtgggtggtctgcatggcagtgcagggctgaatgtataggaagcaggcgggggagtaagtaggggcacctcacttttaggggacactagccccacacctcttgtgctggggctccaggagttcagttctgggctgggtggggtagttgtctggctcagaggagacacaaagaatgcactgcaggtgtgtgggggagggtgccggtccatgtaaatgtcaccactggcagaaaggtggccctgccgcagcctacctgagactctagagattcttgcacgaactctgtagagaaacaggatcagggtttcagctgagaaagcccagaagtgtgtagtctcggtggtttgggcggggataggttctagaattttctcccataaaatagcccaacttcttggagaaccttctactcaagacttaggtgccacagctggaagggacacagggggcaggaccccagcttgttgccctgcaggtcacttgtccgaggtggcatctgggccttaaagcccctcacacggtggggagttaggaggcagggcgggggcgttacaatgccattccctccagtccctccctcaaccacccccccatcagtcagcagga

SEQ ID NO: 13600 - DNA, 791 bp, Artificial sequence
  DNA replication origin
cttactcccccgcctgcttcctatacattcagccctgcactgccatgcagaccacccacccactcattaaaggggctctgcccagtcagcccagaaatgccttaggtcatggataccctcgccctccgcctaacacagcagggggtgatctgcagtgagacagaaagagaccccattcctgcctctatgacttactctgctcccagccacacggagcctgttttgcaaaccaacactgttttattgtcaacacaaccagcccactctgccctgagaaggctatggacaatgggtgtctggggtctgtgggagagagaggtcagcaccctgagaactgctggggctaccacaggggctgggtgggtcagaggtatggtctggggggccaaccgcggaggagctgggcctaggctccccctggctcatctgcagcaggccagtgagagcgatcagctccggcccgctgagccaggcagtggaggggccccgggagggtgatgggcgggggagcaccctggcagacatgatggggggcggcggcagcagtttcagggagcccatcatctgaggagagagaatggaatgtgtttcctgccaggcaagcctggaggctggggtaaggacagggaggggaaagagctctcacctgctggggggccttggacaggtacaggggaacacgctgcccccggggcagcagagggtccgagaggaagacatcttcacagcacaccaccgggaaccctaggaggaaacaccactagggtggcgggctgcgggctcccacccct

SEQ ID NO: 13601 - DNA, 1232 bp, Artificial sequence
  DNA replication origin
ctggggggccaaccgcggaggagctgggcctaggctccccctggctcatctgcagcaggccagtgagagcgatcagctccggcccgctgagccaggcagtggaggggccccgggagggtgatgggcgggggagcaccctggcagacatgatggggggcggcggcagcagtttcagggagcccatcatctgaggagagagaatggaatgtgtttcctgccaggcaagcctggaggctggggtaaggacagggaggggaaagagctctcacctgctggggggccttggacaggtacaggggaacacgctgcccccggggcagcagagggtccgagaggaagacatcttcacagcacaccaccgggaaccctaggaggaaacaccactagggtggcgggctgcgggctcccacccctgggcactggttcccagaggagttggggcagccttgcgcccccgggggaccaagggaggtacctgcatctgggggcgcctgctgtccattccagtgccctgtggcaggggccacgggcctgagacccctgcccgaggctgcttcatacagcggccagaatgaggggtgacacagcgtccggcctgagaacgaggctcctgagctacagttggccccctagggtgaggaggacagagcactggagcctcaggccaccgcacagctccctgagcaccccagccagtcccacaggtttgcccccaactcacccacaccggccgaggtcctgctttggcttcatacttggggtcccagggcgctagtggagtcatcctcgagggggccacctcccaggccacctggggggaacggggatctggggggacgcttggggattataacaggctcacagtcagtgagaggctcttaggggtagtagaggcagcagggcctgtcctacctggggctccggggggctgctcagtggccgggcctggcaggtggtggggcagcagcagctgctctctccagatccaggaagggctacgggatgggggctgtgggctggaggggcagggactgaggctgcagccacaccgcccccacgcaccctcccctggagcccaagggtgcctggtgcaagggagaccgagggacccaatctccagcagggacaatggagaagcctccgtagagcgcgtggtgaaggcatggaggcccccagtcgctgtccccccacggctccgtccgagcccctcacctgtcccatgggggtgtccc

SEQ ID NO: 13602 - DNA, 694 bp, Artificial sequence
  DNA replication origin
cgcgcgcgcgcgtctgctccgcgtgttggtggctgtggccatggctctgtgcccaccagcatctccctcctgagatgccggcctctcatgctcccggagcgtccgccaaccccccgtgtcacctcccttctgttatcgctgacagctttcttgcgtctcatttgtcgccgagccccgagcgcacggtgatgctcgggtctgcccccgaccccctgccacaggccggaagccgcagggggcaccgtggggaagctaacccggccccttcccccaggagtcactgtgccagccccaccacatcctggaagaggagggggccccgggaaggggcctcccctacatcgctgctgtcgtccacgccctgctggaccggccttaggggtgaaggtgggggcacagggcccaccccgcccgggaccccgggagcagaagacgcgcctgggctccgcgctctcagagaagcacgtggtgagggtggcctgggcctgggcacccttggcctgccggcctggctgcctctggggtcgagggtctgggtggaaggaccgcgggtgtcgcaggtgtcgtgtcagccgcaataaacagaagccagaagccctctgggtggccctcaggtgtaactgtgtctgagagcacgtgcgtcgcggggttgttgggggggcctctgtttccggaattcaccgcccagtcgcca

SEQ ID NO: 13603 - DNA, 3315 bp, Artificial sequence
  DNA replication origin
acagaggcccccccaacaaccccgcgacgcacgtgctctcagacacagttacacctgagggccacccagagggcttctggcttctgtttattgcggctgacacgacacctgcgacacccgcggtccttccacccagaccctcgaccccagaggcagccaggccggcaggccaagggtgcccaggcccaggccaccctcaccacgtgcttctctgagagcgcggagcccaggcgcgtcttctgctcccggggtcccgggcggggtgggccctgtgcccccaccttcacccctaaggccggtccagcagggcgtggacgacagcagcgatgtaggggaggccccttcccggggccccctcctcttccaggatgtggtggggctggcacagtgactcctgggggaaggggccgggttagcttccccacggtgccccctgcggcttccggcctgtggcagggggtcgggggcagacccgagcatcaccgtgcgctcggggctcggcgacaaatgagacgcaagaaagctgtcagcgataacagaagggaggtgacacggggggttggcggacgctccgggagcatgagaggccggcatctcaggagggagatgctggtgggcacagagccatggccacagccaccaacacgcggagcagacgcgcgcgcgcgcgcacacacacacacacaggcagggcggccacggtctgtacagtttatacacagagatagggacccggcctgggccccgaacccctacaaatatagatcctctctacaaaatagagataatttagcccccccatagcagctgttggggggggaaggggagggcacaggaggaagggggagactccagctcctgccacccctcacggggtacagagggcaggggcagggccggcggggacatgaaggcaccgtcagcactgagaggtggggactcgtggggctactggagggaggccagaggctgggggcccagggtctgggggcaccagagtggggcctctgaggtcagtgtctgtgaagggggtgcactagtgtctttggttggggctgaaggcaccgcaggtggggtcgggtggagcagggaccttataaatagagaggaagggaaaggggtgagggagggccgattttggggcctaggaacccaggagccgagtgtaggtgacatagagcagcagcatgaggaccacgtagaagacgacgaagccgcccagaccagaggggggccagaggggcggtagggccttgccccccacccgcttcacggcctccagcgcggtccgcagcccccgggcagtgccctggaggagatccgagggcgagcacaggtcagcctgggggagaggagagcaggtggacaaggacaagggacagacgtcagcagcagcagcaggacagtccctcccacccctgccctcacgtgctggggccagaaccacgcccacatgctgacgtgctgggcagggggagtgcagtgcaggaggagtgcagggcagggcatgtgcaggacaggtgacatgcaggacaagatggggcctgcagggcaggggatgtgtaggacaggtgacatgcagggcagggggcatgcagggcagggggcatgctgggcagggcaggggcagcctgtgccttcatctgagagcagacatccgctgcaaatggaagcccaccatccatgccacatgctcggctgagtccggcatgccaccactctttagaaagcagcccccatacctcaggcacccccatttttcgacaggcttctagaaaactctccacattcttccgagccttgagggcactgagttttggctggggtgggtgaaagaagaaaatgtggtaagggagaggccacaggcgccccggcccatcccccacctcttccccagccccaactgaccacagcaggggagggcacatggatgaagggcacggagcgcggccgtagctggttggccagctggcacaggatgaccccactggccagagcctcggccaggtcctcaggcaggggccgctgcagccgggactcaaggacctggcagtgtagaccacatagagcaggggtcagggaaggagaggcgtctgggaggcagggagagtggggggctcagggctagcagggaacttgtgcctgtcccttcctgtcctcaggggaggtgccagagtgggcacagaggatgtggagggaggctggtcccaaggacagcaacacaaggaggtgcccggcccaggcccctgcccacgcagctcccgcctctgctcacctggcgcagctgagtcattaagtccttctcatctggaacctgggggtaccgccgaggtctcaggacagagtctggtgaggaagggcctaggagaaaaaggggggcatggggctgcctccactgctcaccactgactctgtagctgggtcccagtggcctggcacctacacctcctgcctctctgcttgtgggatttttttttatttcatggagatggggtctcgctatgttgcccaggctggtcttgaattcctgggctcaagcgatcctcccacctgggcctcctaaagtgctgcgattacaggtgtgagccaccacacccggcttgcttgtgggattttcaacgcaaaggtacaaaaggtacaacagacccagagggctcccagggcagaagggtgatgtagccgttggtgctggcaagcactgggtcagcactggggagggcaggacacccacctgagccactctgagaggaggaacggaagaggaagctgtttggtctctgaatggagccaagtggccgtggagcaggtgctgtcgctggggccggaaccagggacacagcgacaggggcaggtgagacaggcatcccctctgtgtccctctctcccaaccagccctcaccaacacaggccccatcctcctcccaaaatccctgtcccacctggtccagctatgggaaggggctcttgggaggcaggggcaggggcgggggctccctgccccgctgcagcccctgcttgggaggcactggacttaggcgagccgctgaggagagacagaagggaattagagggatgatggtcataggaagaggagtggggaggggatgctggcaggaaacctacttgtgcatggcttgagtggacacggcggcggcccctcccacaacagccctgagccctggcttcaagaggctggaacaaggagaggtggggtcagctagccccaaggcagaacggctcagcggggctcggtggccccatttccagggctcagtgtccagcaacagccccgggcggccctgggtcccacctatc

SEQ ID NO: 13604 - DNA, 1326 bp, Artificial sequence
  DNA replication origin
aaccgcgtctcccgaatcccagtctccttctgccgcctgaggcacctgcaggtcattctgctggacagcaaccctctgcagagtccacctgcccaggtgaggcgggtgcctggggggccacgaggacaggggtgtggctaggcaggagtggggttggtccccttggatagctgagcaggatccggggagctgccctccctgccaactccctggcgtgtgctgccccgcacacaggtctgcctgaaggggaaacttcacatcttcaagtatttgtccacagaggccgggcagcgtgggtcggccctgggggacctggccccttctcggcccccgagtttcagtccctggtaagtcctaggtggggaggaaggaagccctgggatactgaatgccccttcccggccccaggcaccccctgctttctggcaggaggatggggggctgttgtccagcatcaggctgaccagatccgcctggctggccccagccctgcagaggatctatttccgggacatcggtacgatggtgggctggactcaggcttccacagcgttgatagtggcagcaagaggtggtctggaaatgaggtaagggcgtcctgtccatgggtgattgagggtgtcagccctgggagagcacctctgaactggggacctccaaattgcagggtgccaggcagaggctggagctgtcctcttccttccctctgcccagcatcccagggaagggctggctcagcagagaccctgagcttagtcccacacaggaccccccaggtcctgagcccccatgtacagagaggccatctcccatctctgcctctgcctttacagtcaacagatgaattttcagagctgtcattccggatctcagagctggcccgggagccccggggacccagagaacgcaaggaggatggctcaggtgagtagcagggctggccgggagctgggctggaccagggcctgggtccccgctcacttgctgacatgctggcctccccagcggacggagaccctgtgcagattgacttcatcgacagccatgtccccggggaggatgaagagcgaggcactgtggaggtgagagcccagctatgcctctcccaagggaggggagctggaggaggggacagggcaggcgtgggcacaggcctgccctcagctgctctgctgttctctccttaggagcagcgaccacccgaattaagccctggggcaggggacagggagagggcaccaagcagcaggtaccccaagcccccaaactgacgccactgcccgatcctcccaccccccaaccgcctccttccctgaccccggggtc

SEQ ID NO: 13605 - DNA, 982 bp, Artificial sequence
  DNA replication origin
tttgcaagatggcccctccccgccacctcaggattcttcctactatcaccccagggagcctagtccaagggagatcagggacccaagactaggcgacacgcagcgaagacactcagaaagagatgggagacgggaggggaaggctcaaggcagtccgggcagcaaggcactgatgcttttcgtctgcttggagggcgaggagagatggagggcagggtatgggcaactgtatgtttttgtcacttcccctttctgtccctgcttgcggagaggggacagaggagagaattctggacaagagggaccccacttggcctagaacctgggccctgtgtagagagtggggcagaggagggttcttgggaagctgggatttccgacccccccccaagctcacaggagcacggctgcaccctgagccggaatgctgggggaggagggggccgggggcgggagctgggaggggccggggagctccgggtagttttccccaagagtccacacagggagagacagcctaaggaagtaaagaataacatttggtctttgtcaaaaaacaaccaagggggaggggaagggaacagacagtgagtgtcacacagctgctgaggtcaatctggagtgtggggttaggtgggggtgggagggaacagggctgtaaggggcaggaatggctcctggagctcactcattccccatctcaagtgttgcagagcaggcgagatcagtggggaggtttcgactggttctccccagaagagggaagaggatgtgtgccagtgccggcctgagtgttcccaggtgagcaggcacctgcttagggagaagtaagcactatcctccagctctggtcccccaccgtgcagatgagaggaggaagaggcctgggctggggtgaggcttcgggaatgcagtcctcctccctgatcctgatccccacccccagctgccggcccaaggtcataggctgcctcctgagtag

SEQ ID NO: 13606 - DNA, 978 bp, Artificial sequence
  DNA replication origin
tggttctccccagaagagggaagaggatgtgtgccagtgccggcctgagtgttcccaggtgagcaggcacctgcttagggagaagtaagcactatcctccagctctggtcccccaccgtgcagatgagaggaggaagaggcctgggctggggtgaggcttcgggaatgcagtcctcctccctgatcctgatccccacccccagctgccggcccaaggtcataggctgcctcctgagtagctgaggcttgactcacctgtcacagttaagtcccccaccccctaccatccacagacaccagggtggagggtgcatggttggacagatcctgcgggtggaggcgtggaaggacagtctctagctggccagcactcccagctaggagataagatttccttccctccagcaacggcctcaagtccctcccccgggggaaagcagaaactgaaatgggaattctaagatccctatgaggtcacaggctccacagtgacctcacaggcttaggaaggaggaggaggaatctcagataagccggttggggataataggcggaagagctcagggagaaaagagtgaggggaggtagagatttgtttctttcccataggctggagagctgcgtggacagtggagagggccaggaccttagggggcggggttgcggcacagaaagcagaaacctcgggcttaggggccagtcactgggaagggggtgcccggggctgctcggatctcggtgggacgggggttaagaggtgtagatgaagagggagagaaagcagttattagaggagctcgtggggactgcttcatagaccgattggagctgaggttaagagatcatgtaaataagccaaccaggtgaggggcgggaccatcctacaggtgcgcagatatgcaaataaagagaaaggaggaatctctcccaacgctcggaggcgcagggcgttctgtgcaaacgagaagcacgttcatt

SEQ ID NO: 13607 - DNA, 1255 bp, Artificial sequence
  DNA replication origin
aaatggaaaggccttgagagacctggggcagcttccaccagccaggacagggctggggtgtcccagactcccacaaagataagggaaaagtgggcctggcaactcgaccatccctccaaccccaagagtccccacccccaccccaacaggaattcccggaatcctcctcggccccccttccagactcccgcctcactctgcctggcagtccagggacaggagccgcctaactacttccagatgtggacacagccacgaggcggtgggggggagggggtggagagatggagggagctgcagtggcgatggccctctgattgaacctggaggccaggctccgcgagctccacaccttagccctgcccctgttccaaactacttcagattctgactcccaagtctccactcactgccccctcctccccctacaatccctctcgaattccttcctggaatccagctaccaggcaagttcaggagcttggctctctcttgggttctatggggggtcaaggatctgggtgggtggggagacttaagagaccagaggacgaaggtgggggaatgggagcagtggtggcctgcaggagaccaaggtcttgcagcagatggggaggatttgggggccagagaagggtgaggcggtggggaatctggggagtggtgtgtcagcaagggaacccaaaatatctccaggcataaccccaaaggaatcgggggtctgaagttcactggagctgtctggaagatgccaagagacctacctggtgtagttgggggtctggccctgggcaaaaggcagcagggcgcaggcagtgaggaggggccccaggagggaggctgtggctgcaggcagcatggccccgggggaaaggcgctggggtcctcaagacagaggcagcagctgaattttgcagagcagcagcagcggtggcggcagcagcaggataatcagcgccagatggggcagccttgggtgtgtgggcgtggggactggccagtggggcgggcaatggggaaggcgggacagtggcgtgtcctgggacctctctaggtctaggacacataaatgttgaccttaggagggggaggagcagtgaggggcagaggccgtctcccaggcctcaagtaacgtcatcgggaaccccactctgtccagtgagggagtatctccgggaacttctgaggactccctagcccccatcctccccccgcccctgcttcctcagctcaggagccctcattgctcaccccc

SEQ ID NO: 13608 - DNA, 891 bp, Artificial sequence
  DNA replication origin
aagtcccagacccagcgaagacctccagagcatcgtagcggcaggcggggtgcagctccaggtcgaagactcggaatgagagggacacagtctggccctcggggacctgatagcggggacagaggcggggacccacagagtcaggccccacacaacccagccagagggcagctcccctgccccaagcgtttcttgcagaaacggactgaatgggaaggggcctccatgtgagtgcagagcagagggcctggtctctgcagctctgctggtagcctgtgcaggggacaagagctgaggctttggaagaggagggagggccggggactggagaatgaagatttgagggaagggttaagatgatgcgtgttacggtgggaatgatgccttcagtgacagagggaagacacttggagctgccccaggttgagaaggtggtgcgggggggacggggggggggtcccttcgcagtcaggcctttttgcctctgagactttaacaaggggtagtgcccagaggggtttctcaccgttatggtccagatgcactccttattaggggggtagaggttggggaacccctcacttgccacgtaacctgattcccccttcacatcccctccgcacaggaacacgggtctggagaacagaaaaggggtcaggaaagagcagggacgggtgggacgggggagcactggcaagatggggatgaggtgatgaggatgaaactccaaggagggaagctgggggatgaaatggaaaggccttgagagacctggggcagcttccaccagccaggacagggctggggtgtcccagactcccacaaagataagggaaaagtgggcctggcaactcgaccatccctccaaccccaagagtccccacccccacc

SEQ ID NO: 13609 - DNA, 1118 bp, Artificial sequence
  DNA replication origin
ggctggagagggtgtcctcgacttggggcacagcccccgaggacccctttagggaggtccccgcctgaaacattgcaagggagacttctgccgccaggagggggtgatgggaccgcaatcgggagcccagggctgggtgtaggggccccccggggttggaggaacctagtccccccagccctggggtgccccctcgcgcccgacggagggagcccgattgcggacgggggccggcagttactcaccgtcccagtaaccccaggccgcccattccacccgcgggtcggtgacccatttccgcctcgcgcctggggggggccctggaagagggatgggtgggtgcgggaggaggggagagaagacggggaggagggactgaaggggcggttagtgaggaaaatgggtcagggaggtagggggccctaggcactggggcgcggggtgggcggggcggaggttagggctgggggcggggctgcggccggggcggggcctggagggggggaaggcggaggtgagggagttctcaccagtgcccgaggtggcccgcccgctgtaccagagcaggaagcctcgtcctcctgtgccctcatccgtcgtcatcctcagggtcacctggttgccgggggcgactaggggcgcaggccggaaggtcccacaaaagcgtccgagccgctggccggaagtcccagacccagcgaagacctccagagcatcgtagcggcaggcggggtgcagctccaggtcgaagactcggaatgagagggacacagtctggccctcggggacctgatagcggggacagaggcggggacccacagagtcaggccccacacaacccagccagagggcagctcccctgccccaagcgtttcttgcagaaacggactgaatgggaaggggcctccatgtgagtgcagagcagagggcctggtctctgcagctctgctggtagcctgtgcaggggacaagagctgaggctttggaagaggagggagggccggggactggagaatgaagatttgagggaagggttaagatgatgcgtgttacggtgggaatgatgccttcagtgacagagggaagacacttggagctgccccaggttgagaaggtgg

SEQ ID NO: 13610 - DNA, 789 bp, Artificial sequence
  DNA replication origin
aggtcagcgcgatgacctggcggcgggcggaggcggggactgcgcggcgggacacccctgggcgcctgcacctcatctcctactgggtgcctgcagcagctcccactcccacctcccgcgtcctctgggcccccctcctgaaggcgttcacaccacagcacggaggaccacacacacccatgggaccctgcaggggtgtcggtcgtcgtggttggcaaggtcaagtcctggcgcactcacaagtgacaggcccgcgtgttataccaggaccctgtacctcgctctcctgagacttgtctcagttgtaatttttacatttttgtttgcgtgcatgcaggggttggggctgttttgggtgcccaccagcgcaagcgcagtgctcgggacacagcagatcttcaataaatctctgctggctgcaagctggagggcgccgcctgggtcccctagggcagcccggggaggagggtcggtacctggtccgggggcgcgatgatgtgccaggaacagctgatgcccggggggtaatcggactcgggccagttgggcgtggtcagggttccctgggccttctccagccgccccccgcaaaattggtgctctggggaggggagagaggagcgggggtggggggcggtggagaccctcggtcagcttcaggagaactctaggctgggagccccggcaggcagctcggatgtctggggctcaggatgaggggacgagaagaaggggaggtaagatgggggcaggttaacagagagcggccgggaggagcgcggctcgggg

SEQ ID NO: 13611 - DNA, 1397 bp, Artificial sequence
  DNA replication origin
cctggtataacacgcgggcctgtcacttgtgagtgcgccaggacttgaccttgccaaccacgacgaccgacacccctgcagggtcccatgggtgtgtgtggtcctccgtgctgtggtgtgaacgccttcaggaggggggcccagaggacgcgggaggtgggagtgggagctgctgcaggcacccagtaggagatgaggtgcaggcgcccaggggtgtcccgccgcgcagtccccgcctccgcccgccgccaggtcatcgcgctgaccttcgagaagtttgacctggagccggacacctactgccgctatgactcggtcagcgtgttcaacggagccgtgagcgacgactcccggaggctggggaagttctgcggcgacgcagtcccggggtgaggggcgggacctgggcgagtccgggagagagtcggcggaccgcacgcacgcggctgtttggaggggcggggttcagctaaagggacgggatctgaaccccagggctccaaaccggcgaggggagcaggttggaggccaggcaaagaggagatttggccccgggtctggggtccgcggatagagaggcgactggggctctgcgaagttgggacgaagttaaaaggccacctggccaggggtagtggctcatgcctgtaatcatagcactttgggaggctgaagcgggaggatcacctgagcttaggaattcgagaccagcctgggcaacatggcgcaaccttgtctgtaccaaaaatacaaaataattagctgggcatggtggcgtgcctgtagtcccagcaacttgcggggctgaggcaggaggattacttgaacccagaaggtcaaggctgcagtaagcctagatggagccactgcactcaagcctgggagacaaagtgagaccctgtctcaaacaaacaaaaaaggtcatggggctgagaagagtgtggtgcacgcccgccctgacacttcccccaatgctcggtggccacctgcagctccatctcctccgaagggaatgaactcctcgtccagttcgtctcagatctcagtgtcaccgctgatggcttctcagcctcctacaagaccctgccgcggggcactgccaaagaagggcaagggcccggccccaaacggggaactgagcctaaagtcaagctgccccccaagtcccaacctccggagaaaacagaggaatctccttcagcccctggtgagtctgggataggggaggaaggggaaacagactgaagggggccatttcaaaaagttctgacctgggctgtggctcacacctgtaatcccagcattttgggaggtccagacagcaggatcgcttaagcctaggagtttaccatagcaagaccctgtcttttcaaaaataaaaaattaggctgggctgg

SEQ ID NO: 13612 - DNA, 968 bp, Artificial sequence
  DNA replication origin
ctacaaaaaattacaaaaagccaggcatggtgatgcacgcctgtaatcccagctactcgggaggctgaggcaggagaatcgcttgaacccaggagttggaggctgcagtgagcaatgatagcgccactgcactccagcctgggcgacagagtgagactctgtctctaaaaaagcaaaaaagagggcgggcacggtggctcacgcctgtaattacaggactttgggaggctgaggcaagtggatcgcctgaggtcaggagttcgagaccagcctgaccaacatggtgaaaccccgtctctactaaaaatacaaagaattacccgggcgtgatggcgcacgcctataatcccagctactcgggaggctgagacaggagaatcgcttgaaccctggaggcggtggttgcagtgagccgagatcgtgccattgcactccagcctgggtgacagagcgagacttcgtctcaaaaaaaaaaaaaaaaaagcaaagaaaacaggcttggttcctgcagaggcttctagagcctggaatgaagaggaggaaaagggcttcccggtgggagattgacttggaccatctcaagaatagggaggaaagaacaaagcccagttcgaaaccccgcccccggttctctgagttacttcagggctcgagttcgagccagtacaactgttacgtcaccggaatccagccaatcgcagacgacagaaggagggcgttgtttggtctttcagcacaccaatcggcgtatagttacggcagaaacaaagacgtcctagccaatgacagaggccgtacggcggaagtatagaaaaggactctctggaacatggcaacattaatctgaccacaagctgactggcaggtgctttaaccacaaggtgggcatcctaacgcgagcgaccgttttgaggcagaagcccgatggggcccgtgtccgagcttagggaggggccggagacgcaaac

SEQ ID NO: 13613 - DNA, 804 bp, Artificial sequence
  DNA replication origin
ccaggcgtaaaccaggcgactgtggccaagaggctggccctccctgtccatttcatcactttgatcgctcgggtcctccagcctgaccgatctatgagcactgcgtgtccaggactgggaagagagcatccagaggaccgggactgtgtaggcggggagagagaggagcgcgcagacggggccaggtccaggaggtggagccccaggggaggggcgggacactgggggcggggcgaggagggcggggcctcacccgcattatgcgcacgttgtacatgcgtgtcagtcgctcgtctctctcctccgagctgtagatctcctgccgcagcttttccgccgcccggatgtagtccccccgcgccgagtacacccactgcagggtcagcccgcgggcctggggtggggaggcgcgggctggggctggcggcaggggccaggacccccgcctagcatggggacaaggacccccgcctagcatggggaagggggctgggacccctggccgcaggagggaggaggtagacgaggacagagtgctggaggcaggatgaagggagtggggagaagatcctgcacctgccaggttgggcgatggcacatgctgggggctgggagactggaggcagggggttaatgggctggattgccagagaggacctagaccccagggaatgcagagagaaggggctggaccccctggcctgggcagtgcctcccactcccagagaccaagagcggggtgggcctcttgaaccttgaggtccccagagaactcgttgaggttcccgatgtgcctgaggacga

SEQ ID NO: 13614 - DNA, 1517 bp, Artificial sequence
  DNA replication origin
gcaggggccaggacccccgcctagcatggggacaaggacccccgcctagcatggggaagggggctgggacccctggccgcaggagggaggaggtagacgaggacagagtgctggaggcaggatgaagggagtggggagaagatcctgcacctgccaggttgggcgatggcacatgctgggggctgggagactggaggcagggggttaatgggctggattgccagagaggacctagaccccagggaatgcagagagaaggggctggaccccctggcctgggcagtgcctcccactcccagagaccaagagcggggtgggcctcttgaaccttgaggtccccagagaactcgttgaggttcccgatgtgcctgaggacgacgtccccgtagcggccgaagtcgaggggcagcaggcgatcgtggctgagccggatgaggagctgccctgcgagctgggccacggcctgggccacggcgggcaggcggccttgcagcaccttatgcaggttctcataagtgtcctcctttgtgtgcaggaatgggtaggcctggtcgtcctgccaggacagggtggacgctggggcggaggcagacaggctgaaggactagcgctgtgtctggggcagggggaggacgtctcacctccataaaggagaactcgacggcagggactcccacaaaggccgtgaaggaataggcactgctgtccatgggtaggggccggatcctgggggcaggtgggttggagcgatctgtgggttcaggctcccccacatccctccccagctctccctacccccccaacttacacctcagcatcccagctgggattggtgaacaccacctgttcatagagagtctgcccactgtggttgggagaatccacctgggggttggggaagggcactgatcaggctctgctcctccccgcaacctactccccttcaccccctattcctggggtgctcttgcctgcttcaggacactctcaatgagacttgtcagaagggggctggtcttggcatgaaacttgtcatcccctggaaaaaggggaggggagggatgccaggctcagggctcagccccagaggcaagggtggaccccagggggccaggtggtggcactgccccagctcacccagcactgcgttgtccaggctcacgtacactacggctttgaggtgcagcacgctgaggtagccctgtgggtgggtgaccagtgtggagtgggaaccccccacccccacctctccccaatgcctaacgacctgcccgggaccccgtatcacctctagccactccgtggagcccacgcttccaaagtcaccaccgtcccagctgatgaagaggagacttctgcggggccggaagcctggggacagaggggaaggaggacaggcttagcaggggccaagcaaagaccctccccttgtcttcttctgtcctggtcccccagggtctctgtttctctgtctctctctctgagacaggatctcactctctcgcccaggctggagt

SEQ ID NO: 13615 - DNA, 1302 bp, Artificial sequence
  DNA replication origin
cagtcagggctgccttggatggttctcagctgaggtaggtgtgcaatccagtgggaactttagttgccagacagtagaccctggagaaaggctgtgtccatccagaagagtcactttttttttttttttttttttttttaaagagtcagggtcccggccaggcatggtggctcacacctgtaatcccagcattttgggaggccgagatgggcggatcactaggtcaggagttcgagaccagtctggccaacatggtgaaaccctctactaaaaatacaaaaattagccgggcgtggtgggggggcacctgtaatcctagatactctggagtctgaggcagaagaatcacttgaacccgggaggtggaggttgcagtgagccaagattgcaccactgcactccagcctggaagacagagcaagactccatctcaaaaaaaaaaaaaggtcagggtctctctgtctcccaggctggagtgcagtggtgtagtcatggctcactgcaggcttaaacaagagtcacctttttctagttcacccacaatcaccctgtggcctcgctgcagccttcctctctctgcttcctcctcttctggtccccaacactcccctcacctcagcaggcgggaggcaatgtctgcactgatgggctgggctgggatgctgggaaggcctgatgatgcaactggagggaactgggtttgattgaaggaagggaagccaggtgtgtaggggtctccagttcccaggtgcacctgcagggaaaggggtgcccacgcaaagctgcgagctgggcttccaggaaaaacgaaaaacatgccagccctattctgagcaagaaggtgtggcctcgggacctgggaacagcacgaccagcctccccagactcacatgtccatacactgcctgctggctggacaggcttggcttgggtgggtcctgggagaagtccgctggctctgggtatatgagcactccttgagccccgaagtcctgagcattggtcacctggggaggaaggtgactagaggactcctcccagaaaaaaacccgattcataagggcaggagaaaccaggaaatggcaaggcctttgcttgcaactgtccatcccacggagaggatgtgggggcactacctggcctgtgtcttcccaacctcagcagctcctaggcagccctcaaaccccaccgggctccagggtaccccatgtttctgttcccttccccatctgatttcccccaacacccaatttgttcccagccaacattttcttttttccttctgattcaattcccagacca

SEQ ID NO: 13616 - DNA, 1192 bp, Artificial sequence
  DNA replication origin
agactataaccaggatcctgatttagattgcagttcagggaaggcttcgttgaggaactgacgagtctaaactgccaagatgagtaatttgccaggcaaagagactgtggaaaaacattcaggctgagattcaccatttgcgaagggtctgaaatgtgaagatggtggcctcttggaggaagggaaagatggtccatgtggccggtgaggtggatgtagctcaggccctaaagggccttactggctactttaactgttttgaattgaattttcctgcctcatccctgagtgatcctccccactcccctccccataagcaccttatctcacgcttttgatgtgtagctttaaatacacatatggggcgggtcgtcatggttcatgcctgtagtcccagcactttgggaggatcgcttgaggccaggagttcaagaccagcttgggaaacacagcaagacttctcgtctacaaaaaatttttaaaaatcagcggttggtggcgtacacctgtagtcccagctgctcaggaggctgaggcgggaggatggcttgagcccaggaaccggtgattcccctgagtaccttggtgtaaagtgtctccatgaggcccacgtggaggatgggggagatgaggagggtctgctgcctgcccagttagctctttcgaaggaaagtgtttgggtgctgtgtgtgtgtgtgtgtgtgtgtgtgtgtgtgtgtgtgtgtgttgacgtcgggaggaacgaggttgggggagagagtttggcttgagccgggaagaacctacaggatgatgggcaggacccccagctatgggaagtcaggttttaagcagagtgaggtcctgagagtctccggcgccgccctggtggtgatgggagaaaatgggtccgcggagggccctgcactgcggctcgcgcctgtaatgccagcactttgggaggccgaggcgggcagatcacctgagatcaggagtttgagaccaacctggtcaacatggtgaaacccgtctctactaaaaatacaaaaattagccgggcgtgatggcacgtgcctgtaatccctgatacgagggaggccgaggcaggaaaatggcttgaaccaggaaggcggaagttgcagagagccgagattggtccactgcactccagcctgggcgacagagcgacactccgtctcaaaaaaaaaaaaaa

SEQ ID NO: 13617 - DNA, 902 bp, Artificial sequence
  DNA replication origin
atggtggtgcatgcctagagtcccggctattcaggaggctgaggcaggaggatggcttgagcttaggagctgaaggttgcagtgagctatggtcatgccactgcactccaggctgggtgacagagtgagaccctatctccaaaaaaagaaaagaaaaggggccgggcgccatggctcatacctgtaatcccagcattttgggaggtgaaggtgggctgattgcctgaggccaggagtttgagaccagcctagccgacatgccgaaaccctgtctctactaaaaaaatacaaaactagctgagtgtggtggtaggcgcctgtggtcctagctactcaggaggctgaggcaggagaatcacttgtacccaggaggcagaggttgcagtgagctgagattgcacgactacacaccagcctgggcgacagagcgagactccgtctcaaaaaaaaaaagaaagaaagaaagaaaaaagaaaagaaaagtgtgtaaagaaagactataaccaggatcctgatttagattgcagttcagggaaggcttcgttgaggaactgacgagtctaaactgccaagatgagtaatttgccaggcaaagagactgtggaaaaacattcaggctgagattcaccatttgcgaagggtctgaaatgtgaagatggtggcctcttggaggaagggaaagatggtccatgtggccggtgaggtggatgtagctcaggccctaaagggccttactggctactttaactgttttgaattgaattttcctgcctcatccctgagtgatcctccccactcccctccccataagcaccttatctcacgcttttgatgtgtagctttaaatacacatatggggcgggtcgtcatggttcatgcctgtagtcccagcactttgggag

SEQ ID NO: 13618 - DNA, 1580 bp, Artificial sequence
  DNA replication origin
gttgaatgaatgaattattgattgaatgatatgaagaggatactctccctctgaatatgaaaggggacagaccgaggaggggaggatgaggtggggaggggcttcagagggatgtgaacccaaggggtggttggggcctgttggaggattcccaggggctgcacctgcctgtccacacctccctccaaggccaccctgaccctgatattaccccctccacccagggcactttccagcagatgtggatctccaagcaggaatatgaggagggcgggaagcagtgcgtggagcgaaagtgcccctgatggcactcctccccacacacctgctcccaagctcagatggaagtcccttaacccccatgccacattgcccccctcctcctttccctcttgtcctcattaatggtgatgtttctgggttgaaagaagtaaaaatgttttaagaaaaaaaagtttggcctccgtggggtggggagtgggcacaggggtctggagggaggtgaggggagggagtctcacttctacacccatgccgatcccacagtgggtgctgggacacagccccaggggccatggattcctcaggtttcctaggggttgtgacccagggagggccacatgacgaggaccgggggttgggggagttgctgggggctaacagttgtggtgggaggtgggaggggctgcagggtgcagtggaggggcacggcctggggtgagtgtggcaggaggtgggtggagcaggaggtgaagcctggatgggcggaacaggaggtggggcctggtgggcggggcctcagcgtaggccttaggtctcaggggagcagcacgcctgagcaccccaggacctgcgctcaggtgagatgcgctatgccttccttcctggggctcttggtggtgacagacatggggcggggactagggcgctggtgcatcccagcagctcggaacttctctggacctgagtaggagctgatgtttcccaggggaaacccgaaagggaaacttggtgggaccctgagccctcctcttcagagctacttgtcttggggccctcggaagggtttggggacctgcgccccctgcctgtttagcagtttatgcctgtgacatgtttctggggtgaggctaactggcctttcatcagcctcagaacccaaagaggtagaaacccatgtgatccaagtccttcggtgaccaaacgggccggtgcccagggaggaccatgacttgtccagggtcacccagctctgcccacaccttggcggggactctgatcactcctccccactgacccacatatccctgaccccaggacccctatctgggagctctcgctggtctcatctgaccatgtgctcccacctgtgcccctccttctccagcagccagcaggagtctgagaacgacctttcaaaagagacacacatgcacaccaccagaccagacccccaagtcacaccactgtggtgcctccagcttagaatgccactggggcaagtgtcaggacagggaggacagctgatatgtcacaggaccggggcactgggggactctgaaggccagatgaggaagggg

SEQ ID NO: 13619 - DNA, 795 bp, Artificial sequence
  DNA replication origin
aagactccatctcaaaaaaataaaataaaaataaaaataattaaaattaaaattttaaaaaaatagagagaagggacactctgagatgctcattgcaggaaccctcaaggggcaagttgtaatgccgaaggctgcagatggggtgccacagtgttggaatggtgaggtggagggaatatcttccttgggaaagagggagactggcggtgttccaaagccctgatggagtgagaagaggacacctggtggggaaggactgtgtgtgtgtagggggtgttgagtgccaggtgcaggttgcctggcctggggctgtgcgtgccatccccccagctcaggaacagggcctagctcagggcagagactgctgttcaataatacttgttgaatgaatgaattattgattgaatgatatgaagaggatactctccctctgaatatgaaaggggacagaccgaggaggggaggatgaggtggggaggggcttcagagggatgtgaacccaaggggtggttggggcctgttggaggattcccaggggctgcacctgcctgtccacacctccctccaaggccaccctgaccctgatattaccccctccacccagggcactttccagcagatgtggatctccaagcaggaatatgaggagggcgggaagcagtgcgtggagcgaaagtgcccctgatggcactcctccccacacacctgctcccaagctcagatggaagtcccttaacccccatgccacattgcccccctcctcctttccctcttgtcctcattaatggtgatgtt

SEQ ID NO: 13620 - DNA, 1491 bp, Artificial sequence
  DNA replication origin
ccttgaggttctgtcactgctgtattcctggtgttctccagatcagctgcacccaccgcatgaaaggcacacatggagagagaggcatgccccattctctctcctctccatcagggaagggtgagaaacccctcttgcaggcagcacagcagagcctgcagcgccaggtagctgcagagctgggaacagtgccaggaaggtgggggtgggggtcaggtgggctaggaaagggtgttcctacactgtgcccccacaggagcctgtccgggagggtgcccccccaaactggaagaagaaggagaagctaccccaggtctccaagtcctggcataactacatgtgtaatgtgagcctctggagagggccacctgaaacccccctcccctgccatgaatcgggggcgggacagaggccccgcatgggagggggagcagggagggggagcggggcagggggtgctgctcacggggaaggcaggccctcaccacctccgctgggatttcaggaggtgatccaggacttccaggcctccgtgctgcaggtctcagactccccctacgatgaacagtgagtgtggctcagggctttggggtgggagagagggcagaaccggcactcttggggtgggctggggggctctggtgctgcccacgcactgatccttcttgagcaccccaggcagagtcctgctcccttctgggtagggtggctgcacaaatgcccacagtgcactacgagatgcccaatggctacaatacagactacggcgccgagcgactccgcatccctgagggcctgtttgatccctcgaacgtcaaggtttggctgtgtggcgaggactggggtgggtgctggctgcagtccctggatcctggggcgtgggggaggctgggaaggattgcaggggtctggggggaagggggagagagcccacagccccagtcacctctctctgcagggcctgtcggggaacaccatgttgggtgtgggccacgtggtgaccaccagcatcggcatgtgtgacattgatattcgcccggtgaggccaggccggagctgaggctcggcaaaggggcccaggggaagtggggagacggggttggggggctgcccccgcagctcactccttctccctgctctcagggcctgtacgggagtgtcattgtcaccggcgggaacacactgctgcagggcttcactgacaggctcaatcgagagctttcccagaagaccccaccggtaggagcccacccctgacccagagccctggacacccgtcctggctcagctgtccaggactgagtcccttcatccttcccatgtccttccttctgttctggccaccagagcagaacccctgcccctgtggcttcccaagtcttcccctctcccccaagccctgtcccttcccagaacctaggtgtctgcttcccccagcccctttttacccccagagcatgcgactgaaactcattgccagcaacagcacca

SEQ ID NO: 13621 - DNA, 914 bp, Artificial sequence
  DNA replication origin
tgcctagggtggtctcaaactcctgggctcaagtgatcctcctgccttggcttcccaaagtgttgggattacaggtgtgagccaacatccccagctcaccaaagttgaccataataataataataataataataataataataataataagtgaaaaggtcaaaaaaggacttggaggctgggcgtggtgcctcatgcctgtaatcccaacactttgggaggccaaggcgggtggatcacctgaggtcaggagttcgagaccagcctggccaacaaggcgaaaccccctgtctactaaaaatacaaaaaattagccaggcgtggtggcgggtgcctgtaatcccagatactcaggaggctgaggcaggagattcctttgatgtcgggaggcagaggctgagatctcaccattgcactccagcctgggtgacggagtgagactgtgtcaaaaaaaaaaaatttaaaaaggacttggagacagagaagggcagcagagtgcatagagcaagaagagagcaggagggatggagacttagccaagaaggaaggaaattgtttgggatgggtgaggggagtctgaaaagggaagggaagtggctcagagcagtggcttgaggggagaggaggagaggtggatggtgggaaggaggtgcagtggagatcagggttggacatgaggatggaggaggcactcaccggagcctcggacatgagcactgggtgcaggtttggctcagacttgacgtgtttgctgtaggtgtgatccaggatggctcggaagcactcccagtcctcgactggggccagaagagcagcgtgcagagacgcaagaaggcaggcaggggacagggacaggaagaaaaggagggagaaaggccaagcccaaaggagggtcagtgagtccagctccaggg

SEQ ID NO: 13622 - DNA, 1361 bp, Artificial sequence
  DNA replication origin
tcctgggactgggggtgggggcatcacaccgccagggtcccttcttgcccaatggccttgctcagggcaccctcccgacgggaaaggaaggggcccggggccaggtggaggtgggttgcaaggtagggccctgtgcgcgcggggcgtctggggaggaccgagcgcaggggtggcgggagacccgagcctgagactcgacccgctcgtgcgcggaggtgacaggccccggggtgcccagagctcggatggatggcgcgggtttggaacgcagggctgcgggagccgggggcccgaggctcgctcacctccgccgtagacgcccccgctcatagtgcccgctgcgctgctagcggcccgtgggcggtggcgggatcagcaccgaggcggccggacagctcccgggatccctggcggggcgggactctcagcggccaattgggaggccggatcccccgctccaacggcgccgccgattggctgccaggcgagacaatgaccgaccgggggcagctgctttaaaggggaagatacactctattaagcggccaggaggagatggggcagggggcacctagcagggacttagagaccgtcgctaaggaactggcggcagagaggagagcagggaagaggcggagaccaggactctgcaggacgactgatgaggtccctatccccttgctttttatttttatttttatttttatggtagagacggaggtcttgtgatgttgcccaggctggtctcgaactcctgagctcaagcgatcctcctcagcctcccaagtagctgggattacaggcaggtgccagcacgcctggattaaaaaaaaattttttatagagacggggtcttgctcttttgcccaggttgatctcgaagtcctggcctcaagcgatcctcccacctcagcctctcgaaatgccagaattacaggcgtgagccactgcgcccgacctctacccccttactttttaaagcaggattggggagagaggtccagttcccagaagggttatctatcttcaggctgctctgagcccggttctgccacacccaggcctaaatggaatcaccaaggtctaaatggaatcaccgggagagggagggaagggaagattgagagagggaccaaagggggtgtgtctccatctctctctgtttttaccttttttttttttttaagagactgggtcttgctaccttgcccaggctggtcttgaactcctggcctcaaagtcccaaagtgctgggattaaaagcatgagccaccgtgtccaacttccctcctttgtctttcgttggccccttttttccttgccttgctttcccccccaccccccgcagtacctaggcctta

SEQ ID NO: 13623 - DNA, 1658 bp, Artificial sequence
  DNA replication origin
tgggtgaccccacccccggccccatcgcccccgcccgacccagcctcccgccctccccagaaccggcccgggtggctgtttacaggatttgggaaaagccgattgggcgctaataggttctggacggctcaccccggataatccccggtccggctgcgccccattagccgtccgccgcgggtgggggtgacagcggcggggaaggcagccccgagccgctgctccctccagcgcagggaccgcccgccccgccgcgcccgcagaaagcccgtgggagccgctctcgagtaattacggctccgcaacgaggtccccggccccgaggcgcggaggtgctctctcccaggcgcgggcgggcggccccaggcggcctggccgcggcgccctggacacccggggggcccagcccgcaggctcggcgcccgggccccaggggcccggctggctccgctccgggagcctgagtccttccccgcccgcgggacacctgtgcgatccggccgtacacactgcacttggccggcccaggcgtcccccacccagctcccacttcccccaggcgcagggcgttcctcttccccactgacatttcccctccttgtaagttcagctttctacgccagtgccaaggggtgaccctcaaaatcgggggatggggggtgcgggcagaactccttactctacccaacccccaggcccgcacaaagcctcttccacctactagcagcccaggcctggcggcaccgccggaggcccagggcagaaggaagcacggctggaggaagaaactgggggcgggggcgacgttctcagccctcggtccccatcaccccccagggccctcagcagcccccagactctagggatatagcagccggcgctccatagagaaatgagggtgcaaccgcctccgcaggtctggcggggctcaggagagtgacgggagggtccctggatctggcagctggaaggcgcgggctggtgcggcgctgcgaagcgcagtgggcctggccctccagcccctacgacctccattttgcctaaaagaaagctgggcggggggcgggcgcctgggagctgggcttggggtgaggatctgtaaagggaatagggcgccgagggctccagtttcggcgagtggggccagaaaccacgggcagcacccaaatcgtgggtagggtggagacgaaaggaagggtggcgcgcggccttgcctgcttctccccgattttggagttgtgcaaggcgagggccggcaggggtgcgacagtggaggacacgaggggtgctccccgggggcaggcgggagggtggcggtggggaaagggggcggggcggggcctagaggaagcccggaatttagccccccaacttccgagggagcaagaggcagtcggggctgggctggggtctggggtcgggcaaaaacttcgctgatggtgcggggaagcgcacgcacggtggggggcgagggttccccagttccccttccgggtttgggagcgaccgggcaagaggggaagggagcggaggtctggggagttacgtccgctcccaggaggccagccccgggagaccgaaggaagagaggttcccctgggggaaattggggctggggggcgagaggactccttttgccagcgaaggtacctgtggcg

SEQ ID NO: 13624 - DNA, 1214 bp, Artificial sequence
  DNA replication origin
ggttgggtagagtaaggagttctgcccgcaccccccatcccccgattttgagggtcaccccttggcactggcgtagaaagctgaacttacaaggaggggaaatgtcagtggggaagaggaacgccctgcgcctgggggaagtgggagctgggtgggggacgcctgggccggccaagtgcagtgtgtacggccggatcgcacaggtgtcccgcgggcggggaaggactcaggctcccggagcggagccagccgggcccctggggcccgggcgccgagcctgcgggctgggccccccgggtgtccagggcgccgcggccaggccgcctggggccgcccgcccgcgcctgggagagagcacctccgcgcctcggggccggggacctcgttgcggagccgtaattactcgagagcggctcccacgggctttctgcgggcgcggcggggcgggcggtccctgcgctggagggagcagcggctcggggctgccttccccgccgctgtcacccccacccgcggcggacggctaatggggcgcagccggaccggggattatccggggtgagccgtccagaacctattagcgcccaatcggcttttcccaaatcctgtaaacagccacccgggccggttctggggagggcgggaggctgggtcgggcgggggcgatggggccgggggtggggtcacccaccctacaggtctctgccgtggatgcggttgccttggcaacggggctagggtgggggcatttcaccaatgaggtgctctcggtccgggtgacggttgcctaggcaaccccacgaacagcccagctttcccctctggtctctccccccacccgccaccatcgaagctgggggtgtgtgtggagggtgtgcgccttgtggggtgaatttcaagaggcaccgccccttttaaaattaggtgcttggagggcggtgcctgtgcgggctggggcagaagccaggtctgttttcgaagggacacccccgccccccccgccccagttcctgccgcgggtgtcctgcccgggctgtgtccgagggaggggtttcccctgcgcttcctcttgcacttcccgctccgtttccggggggcgggaggaagattggggaagtcggctcttactcggcgacgtctctggtgccggagaccctggttgtgcccggggacggcggccgcgccgccccttccccctccccttgcttacccct

SEQ ID NO: 13625 - DNA, 1624 bp, Artificial sequence
  DNA replication origin
ttcaagaggcaccgccccttttaaaattaggtgcttggagggcggtgcctgtgcgggctggggcagaagccaggtctgttttcgaagggacacccccgccccccccgccccagttcctgccgcgggtgtcctgcccgggctgtgtccgagggaggggtttcccctgcgcttcctcttgcacttcccgctccgtttccggggggcgggaggaagattggggaagtcggctcttactcggcgacgtctctggtgccggagaccctggttgtgcccggggacggcggccgcgccgccccttccccctccccttgcttaccccttccgggccgcgctgcaaccccgcctttctccccacttccccggcggcctcgggcctgacgtcagccctgcatcccccaggcctcgggccagcggccaggagctgcctcccccagcccccgtcccgcggcccccagccgcccccaaccctgccccacgggcccggcgccatgagtgagctggagcaactgagacaggaggccgagcagctccggaaccagatccgggtgagggcctggtgcggggcgggcgattcatgtgtacaccgcccggtgccctggaccgggttgggtgagggtgttggtgggggaagggggagggagggccccttaatggctcagaatctgaccctgtccactcctgtcttctgttctcttctctccctttcctccccaacctgtcttctctcgcgtctctctggctctgccatcccttacaggatgcccgaaaagcatgtggggactcaacactgacccaggtgagggcacttggtggccagagcgtaactaggggttgaaggggcaaggatcagaggccgctgccctctgcagtcctgctgcctgggcctccccgagcgcattctgtctctacctccagatcacagctgggctggacccagtggggagaatccagatgaggacccggaggaccctccgtgggcacctggcaaagatctatgccatgcactgggggaccgactcaaggtgtgtgtgtgtgcgcgggctggcgctgtgggccgactttctagcaggccgtgggagcagcctcagatctggcggagtaagcaggccaccaaaatacccagcgtacgtctggaaaaacggtgactcccagacatgtccgccagacctggacaggcaggaccatgctggtgagaacttgtgggctgcagctggagactgtctctcaggtggctcacgcctgtaatcccagcacgtggggaggccagggcaggatcacttgagctcaggagtttgagaccagcctgggcaacatagtgagaccctggctctactaaaaattgaaaaatgagctgggtgtggtggtgctcaccttgtagtcccagctatgcgggggaggctgaggtgggaggatcacttgagcctaggagttccaggctgcagtgagctgtgatggtgccactgcactccagcctgcacaacagagagagaccctaccttctcccacccaaagggaagggggtgtgtcttgttttcacgccacccttctgctctccctacaccgttccccaccaggctgctggtcagcgcctcccaggatgggaagctcatcatctgggacagct

SEQ ID NO: 13626 - DNA, 1640 bp, Artificial sequence
  DNA replication origin
aatataataaaaattaaaataaaaccagttttaaaaaagccagcccctggggtttccacctcctgcctccggccctccagaggggtgaggccccaaccccagggcagcagaaggatgagggcctcctgctcctcctcttcccccattccatccccttcttatctccacagtgggggccccgggaggaaccaaacctgggtgggagggcagggacccaaggccccgtggcccggggaagggggctgggattgcgccagccccgcagccctggcctgtagtgtgggcatgggcagggcccctcctggcctgggcccagtgggggtggggccattagttccagatcttgaggaaggagtcccaggagcccgtggccacagccatgccatcgtcggtgaccccgaggcagctcacgcggttgtcgtggccagcgaggactcctgtgaagaagagagaagtcagaacccattgggcctgggctccaggtccctgcccacccagcctgggccccagctgtcacctgcacggtcgcccttcatggcatcccagatgttgcagttgaagtcgtcgtagccagcgagcagcagccgtccgctgcgcgagaaggcaacagaggtgatgccacagatgatgttgtcatgggagtacatgaggagctcctgatcggcccgcaggtcgaagaggcggcacgtggcgtcgtcagagccggtggtgaaggcgtagccgttggggaagaactgcaggacacgggacccagatggggtgagggtgagggtgaggagcagggccgggagcctggtggggagggcctggcctagctcgccccaaaactcacagccactgcattgatgtcggattcatggccgatgaaggtctgtcggcacatggaatcccgcacgtcccacagcttgatagaggcatcacaggcgcctgacacaaacgtgcggccatcgggggccagggacagggacatcacatccccactgtgtccagcaaaacccactgtctgctggcctgtctcaatgtcccacagggcactggagaggtgacaggaagaaagaaaagataagagacagggcgaagaacagagtccctgttctccccgccccaccacgtgagcccaaccctgtggaagggtccagggaggctcttctcagagccttaggtggggaggggacgcatccctccctgacccccttagcgcccaccaggagagggaggctacggtgcatgctgcatgttgagcactgggacggtggcccctgaggcaggaagtgtgggtttgcccagactgcccagccctggcagagcctcaccaggtggtatccccagagctggtgatgatttggttgtcatccaggaagcggcaacacgacaggtaccctggggaaggagctggtcagccaggtctccacacggagggcagtgcaccccccaaccccaaaaagggcccgaactgggccaggcccctcaccagtgtggccaggcagctcccggctgaccctgacgttgccctcgcgggtcttgaggctgtagatggagcagatgttgtccaaccccccacaggccacaaagttccctgagggcgcgtaggcacaggtcattacccaggaggagcgcagcgggatggcgtggacctgcgg

SEQ ID NO: 13627 - DNA, 2019 bp, Artificial sequence
  DNA replication origin
actggaagctgggggccagcagtttgcacaggaggcctgtctgagccccacccgccagacctgttgtgagcagctcctgtcactgaggctggctgaggtgtccggggtggggccaaagtagccccttggcttcgctgctttgggggacagttgcacaaattggacgagtggccccagctctctggctgccatcttgtgctggccgagtagacgggaggggccaagccgtgccaacctctctggctggcagggtggggcagcaggactctggttctggtgaggggcgtctcccactgctgccattttgggggacaccctgggtttgaacctgaaagccccagctctctgccttgccacgtgaatgtattctttgggccacaagcccccgcctcacccctgcctgagctgcctcacccctgtgagcggcgggggtggatgattgctccagaggctgcagagagaaggctgagctgtttctccagtgaagggggcaggaggaggggcctcaaaggcaaggagtgggtggctttgggcttagggttgcagtagaggggctgccgcccggggccccaacctgtagccagctcgtaagatgtggaccacccagctctgcacctgacccttccgctgaccaaatgggagaggagcaggtggccttccgggtctgatatgatgcgctttttaccgttgggtaaggttggggtgaagagaagtgtgcggctcctgggtcagaggaggctgccccttctattgctcacccacttcttattcccggtcccctacttgggttcgtctccgcccattttgggttttgtaacagttttgtcttttgggtttctcatccagctcctcccattgacctcattgctcagagtgcagtattagggcaaggcttcgccactgcctccctccatgaatgtatttctccctcctgccctggggacatggggagtggcccgtttctttccccatctagtcccagaaagatggtgtttggttttctgttgttggatttttttttttttttttttttttttgcaccaaagtggcaactaggtcagtgttgggggatcaagctggcctcggggtggggggcccccacctgcctctccctggttcccacagtgttagcgtccctgaaaagacaatattctctctaaagcaataaggggtgacgggccggggggagtgtttgctgctgctggcccccagctccccttccctcttgccaggtgtgggggagactcctgttgtgactgaatgtaacccccccacccctgccgcagccaatgcaggggaagggggacactcttcctgtctcttctccccagctaaagagactttggacttagggggcccatgagcctggagaggccttaaccctgtgaggaagtatagggggagccctctcccacccccatccccttctgagagtggtcaatgtttacaagcccctgagcccccctgcccagggactcagaccctgttgctgtccttccccggccccggtcttcctgggccctcgctgctcccctgcccttcctggggttggggtgggtgcaggggtcaccgtgttccctgtctgccttgtacccacagtctccccgccccctctccaccctgtgtgacttccctctcttttacctgctcctgtaaatactcccttctcccaataaaacttggtgtgtgttctcccgttccgcctccactgctcgttatctggggagagccatggggatgagtggctctgcacagagctgggaactaggagctctgagcagtgcccgcctggtcaggctggctctggtcagcagcctgacgggggaaaccatggtgagggctgcttatccgagaacctctggacggaaggctctgggctggggcttcagctttgctctgagggagagtggggaccccacccccagccccagctgcctggcaggccccataccttccccaccatccaccccctcagcagccctcaggcaacaaagtccagaaacaaggagaacacagcaa

SEQ ID NO: 13628 - DNA, 981 bp, Artificial sequence
  DNA replication origin
tggggcggttgcacagggtggcaggggaggctgtactgtttctgacccacacgtttcccctgctgcagaggcgagaggcggtttgagaagtcagcaaggcgggatggaggtacgaggctgctgagggcggcggccggggcggcagggaggaccaagatgggtggcccagtctgggggtgcttatttcggaggtgttgggggcaggagggcctggagctggcccccccaacgtttcttgagggtccaggcaccacgctgcctttctaataactgcccctgtcttcccgtctcccagcacgatgtggctttgaggagggaggggctggcccaaggaaggagcacgcccgctcagacagcgagaactggcgctccctacgggaggaacaggaggaggaggaggagggcagctggaggctcggagcagggccccggcgagacggcgaccgctggcgctccgccagccctggtgagattggggcctggtagcattggcgggggcagtggggagcaggaactgtaatgagagggtgggctcctgtagccacggggagggagcagaggctggctggtgtgggagtggccgggacagcagccctggaggtgctccgtgagctgcagcagagggggccgctggcttcgcttgggtacccactcttcttctccctgacttttcctgtgcagatggtggtccccgctctgctggctggcgggaacatggggaacggcggcgcaagtttgaatttgatttgcgaggggatcgaggagggtgtggtgaagaggaggggcggggagggggaggcagctctcacctgcggcggtgccgagcgcctgaaggctttgaggaggacaaggatgggctcccagagtggtgcctggacgatgaggatgaagaaatgggcacctttgatgcctctggggccttcttgcctctcaaggtatctgtgaggaggcgagggtgggaacctgcccttccggggtcct

SEQ ID NO: 13629 - DNA, 1203 bp, Artificial sequence
  DNA replication origin
aggaaatgctggctctctacgtcaaggagaacaaggtgggtgcgtgggcgaggggggttggcggtggtggcctctgcctgtggaggggatctggcagcatgtggtgtcttggctgtcccaacccactgccaggtcccggaagagctgcaggacaaggagttcgccgcggtgctgcaggacgagccactgcagcccctggctctggagccgctgactgaggaggaacaggtgggaccgggccaggagctgaggctgcgggagcctgggaggggaggccatgggttgggttaggaggagaggggccagcgctgaggagacaggcggggagggtgctgtggggtgggggtggaggtggttgggtgcctgggtcctcactcccgcccctggctccctcctcagagaaacttctccctgtcagtgaacagcgtggctgtgctgaggctgatggggaaaggggctggcccccccctggctggcacctcccgaggcaggggcagcacgcggagccgaggtagaggggtgatggcgtgtcctggggacgggcagatctgggcccctgacttcgagaacgtgcagcaggtttcattgtgcgtctggcctcttctctaggccgcggccgtggtgacagctgcttttaccaaagaagcatcgaagaaggcgatggggcctttggacgaagcccccgggaaatccagcgcagccagagctgggatgacaggtggggcggggagggggcatggcgcagagccgggcaggccagggaggggaggcctgggccctgtcgctagagggtaacagaggcccaccagataagccctgtccgagatcccggtgctcctgacccctggtttcgtttgtccccttcctccctccactgcctcagggcacagtggacaaggcatggggcggttgcacagggtggcaggggaggctgtactgtttctgacccacacgtttcccctgctgcagaggcgagaggcggtttgagaagtcagcaaggcgggatggaggtacgaggctgctgagggcggcggccggggcggcagggaggaccaagatgggtggcccagtctgggggtgcttatttcggaggtgttgggggcaggagggcctggagctggcccccccaacgtttcttgagggtccaggcaccacgctgcctttctaataactgcccctgtcttcccgtctcccagcacgatg

SEQ ID NO: 13630 - DNA, 1509 bp, Artificial sequence
  DNA replication origin
tcagtcagcggctccagagccaggggctgcagtggctcgtcctgcagcaccgcggcgaactccttgtcctgcagctcttccgggacctggcagtgggttgggacagccaagacaccacatgctgccagatcccctccacaggcagaggccaccaccgccaacccccctcgcccacgcacccaccttgttctccttgacgtagagagccagcatttcctctcgcccataacggtagtcagccagcttgtatttgggcatggcaggggacgggggtggggaggccacgctgccgcccccggacagggccctgagcctggacacaacacagagagaagaagacagaggtcagggcagcctgactgtgctttctcgaatctccacggcagccgaggcacaagtgactcaccactcaggcccaaagttgagtgtctctgctgccatcgtggggctgggcgtgtttgagaggccgggggtggggaggaggggacctggcgttcactgtccaaacacctgtgggggaacaggggccatgaagaacagcacacgaaggagaactttaaagcgcagggaggacaccatgggggacatcctagtgggcacaacaatgggccccggactagctggtgggtcacctggggtctaaaaggactcacctgagccagccacgtggccactcacaccatgagttacccagagatgagtccagacggtgaaagacctgggggaggcgaggagatgggaagctcgagtcctttcggcctcagcagggcaaccacccttggcccggggctcacctggcagcctggcccgggaagaaggagggcaggggctggtgctggagtgaacgagggtacccaagccactgggaattggtctgacctcagtagagcctgggagggaccttcacatctgggaaagacccttaaggagagcaggggggaggagggagggttcaggacatggctctgccggcagccctgccctgccccgcatgacaggagaggtccattcgccggatggtgtctctgggcatcagcaccctcgccaccctctctgggaggctgagacaggaggtgtagtgaagaactcggggagggaggcagccgaggccaggatggacgttcagggcaaagataaaacaaaaacaagcaagcaaacaaaaacccactagagccacaaatagcttacagagaaaaggtcagttacggagaaaaggattagaaataaatctaggagcaaaattctttccctcatgaaaaaaatcagttggctgctcagaagctcaaatccaggggcttggtctggggagaaacccagtgaaaaggagcaggaggtgactctagggccacagacgggtacacgacaaggactccaggcaggcaagcctgagccaaggcacctcgggctggtttcccccacaggaatcacacccagaccaccgcccccaatcaataatggaggcttaaacaaccaagccaccaagggaacgaggatctcaggataccagct

SEQ ID NO: 13631 - DNA, 1624 bp, Artificial sequence
  DNA replication origin
ctccatcacccctaaaattagctccaacacagagcactgtgccttggcacagaacagagccacttaaacagaagcacagtccccaattcctcaacactggaacaaccgcccagccccaggcctgctggaggggacctggccctttctcaggatggagattctccaagcgtggtagggtgaggacgctgaggcttaaaaaagagatgcaaacccgcattcttcgcggctggtcggttatcccagctctctcctctctgagccatcccagcaaatcacaccaccgcttggcaattgtctacaagttaacagttttcaaaggattttcactctttacctcctgtgatcccttttgcccacttgcccagccttgggctccagccagggaaaagaaggaggaagctgctccgacagcgtgccccgacatccttgacactatgcaagactggaggtgcgcacggtagcagtaaccatcccaaactcgcaagcattattctgtgagtttgaagccattttacatttgttagactttcaacatccttcatctagcctcctcctctcatcttctctcctctaaagtgggctatttttctttaattcccaaattccaatagcagatgtaaaagttagggctaacgcatcagatcacgaacacaagactgatgtgtccaacagcagaaaaagctagtccagaagtttaagcacatggtccacttgactaaccaccacgtgggaccctcagggcccctggtccccaggcaatggcagggacaccaaggccaggtctaccctcaaatccttcccaatggcacgacagaccgctgggggaccaagacctacaatctaagaaaatcagattggagctggctagcctggtggagggtggctagcctaggtctgcaaagggcacaggaaagatgggaaggagaaagaaccccaaatcccccatgtcggcagcaaaggagagacccttactggtaccaccgatggtgtttccatgccaaaggcgaggggttggcggggttctaaattgaaacttctatatagactcgaagaggcagtgcacaagagggtgggaaagctgacgatcttccagaacgacactttgagaggcaggagggaagtaaggcttgggtggctggaaaaaaaaaatccaatccagctaacaagtctttatgtagcatctcctagttcctagcactaggatgcaacagacctggagtctgaccgggaatgcgagtaatgactgtataacagagaagagagacgaggggcttttaaaaagttactcggaaatttttttgtttttttttttttttaaggcaaagtgtgagagctgtggccagggagctgctgcacggaggggcatgagctgagaagggcctggcctgggacggggaggacaagcagtctctgctaaggaaggtatttcccgcggccgagcaactgggaagaaggagaccccaatgacccagcactaagatcgccggagcgaaaggaaacagaggtgaggaggacccaggcgaggtgcctgggtggagggcaaggcttccatgttggccaaagtcgtggaacgcttggacctggggaaccgcaaggcccagctcgttccgaggggaacccaaag

SEQ ID NO: 13632 - DNA, 1692 bp, Artificial sequence
  DNA replication origin
atacccgggtatggtggtgtgccactccctgcaatcccagctactcgggaggctgaggagggaggatcacttaagcctaggaggtcgatgctgcagtgagctgattgtgccactgcactccaggctgggcagcagagcaagaccctgtctcttaaataaataaaatagttaaaaaaggaaaacagacaggaaaactccaagtgcagagaagcctagtggtacttggtgggggaaacaaaagttgttccaggtataatagttcctgaagtcaacactctatcatggcaagacaccaggcactcaaattccaagtcatgaacttaccttttccttgttttgaggattacattgtgttgggcgacagctcttttaggcttctgggaagtaaggtatacattctggagtaacttccaaagaaaaaggtgaaagcatacgcggaacttttgagccttgaaaaagttcagcgagtcattcttgaaaagtcctttttttaaacaaagggggtttcagtcacctcacatttgcatagcagtttctctcttgtcaaagcctttcacattcacttattttaattcttacagcactcaaggaagagtgtggagttgggggtcgggggttgggtgcagagcagtgttaacatccttctgtaagagaaacggaggcttttgagaggccaggcgtggcggctcatgcctgtcatcccggcaccttggaaggaggatccatttgggtccaggagttcccggcactttggaaggaggatcatttgggtccaggagttcaagaccagcctgggcaacatgggggaaaccctgtctctacaaaaaaaaaaaaaaaaaaaaaaaaaaagctgggcgtggtggtgtgccctggtagtcctagctactcagggtgcttgaggcaggaggattgcttgagcccaggaggcgcaggatgcagttaaccgtgatcgcgccactgcactccagcctgggcgacagagcaagactctgtcttggaaaacaaacaaacaacaaatacaataaattaaaaaaattagttgggtgtggtggcacacagctgtagtcccagctactcaagaggctgtggcaggaggatcccttgagaccaggagttcaagaccagcctgggcaatgttatgagacacgccacccgcccagtctttacagagaataaaaaagttatctgggtgtgatggtgcacacctatagtcccaacaattcaggaggctgagatgggaggatcgcttgagacacgggagttggaggctgccgtaagccgagatcgggctagtacactgcagctggggcaacagagtgagaccctgcttcaaaaaaataaataaataggggccgggcgcggtggctcacgcctgtaatcccagcactttgggagggcgagacaggcggatcacttgagtggtcaggagttctagaccagcctggccaacaaaaataagccaaacgtggtggtgtgtgcttgtaatctcagctactcgggaggccaaggcatgagaatcacttgaatccgggaggcggaggctgcagtgagccgagatcgcgccactggactgcaacctgggggacagagcaacactctgtctcaataattaaataaataattaaaaaaataaagaggctcctgagagtcaacttatttgcctgagccacttatttcacacatcccaggacg

SEQ ID NO: 13633 - DNA, 1315 bp, Artificial sequence
  DNA replication origin
gggcgccctgcccgcgccggggtcctgaacgggctgcggagtgcgcacgcgcgcccgtaccccgcgagctatgaatcgccttcccggcttccgttcgccccgccccttccctgagcgcaagggcgactgcgcgaggcgtttgagaaacgcgagacttccgggcgtgacgggatctacacgtgtacgcctcgggaactggcgggcggccgagggcgggaaccaggtccgagccggggaggagctagaaagggccgggtcggcgtctctaggcctggcggagttcccggccggcggaggggtagcgtagggaagacacctggaggggaggctgttctaggggcagggttcttccccatgggagcagggaaggggccgagttcaggagaccgcggtcgccaaggggcctgaactccgcgtccgtcgcagctcctctggtcagaagaggcctgggcagggctggcagaactgaccccctagtctaatgtccctgtggcccgaggaccgagggggaactgagggacatagccggtccccacctcgctggaggacagcgtcccgggactcccctgcagttcacgggaagctgtccgcctcctgtctgtgctggggacccacgctgtgagccctaagcccaggcttcacgggtccccaaggaacgctgacccacccacgcccctcaaccatctcccaccagctctgcagcaggcgaccccggatcagggacttgccgccccctggcgggcaaggtggggaggacgcgcgccggattcgtggctctcaggccagtggagtgggggctctgcccagatgggcatagtttctgcagagttcccttctgaaatgagtaggacctgctgcactggggaccttgaactactctgtttgcccagcattcaaatggggatgttcacaacagctccaccatattgcacatgcattttattgaatggctagctgtatagcttctgtctacaaacttgcatgcatttatttttgagacagggtctctgtggcccaggctggactgcagtggtgtgatctcagctcactacaacctctgcctaccgggttcaaacgattcttgtgcctcagcctcttgagtagctggaattacaggcgcacgccaccgcacccggccagtttatttcatttttttgagacagggccttactctgtcacccaggctggagtgcagtggcgttaacacggctcactgcagccctgaactcctgggctcaagcaattctcccgccccagccacctgaacagcttggactacgggcatgcactagcatataaagttgtattttagaag

SEQ ID NO: 13634 - DNA, 1670 bp, Artificial sequence
  DNA replication origin
aggactcccccaagtccccgctggcacgtggaggctgccccacccccctcccccttccggggtccttgacaagtcgccggtccttgaacccagccacctcctggccaatagccggggcgctaaatccccgctcaaacagggacccgggcgggcgggagcgcccagcccgcgagtactcaccgtgcacccccatctccgcgcctggccggggtccctcagcgacctggggcgcgccgggtgaccacaccgggggccctcatcccgggaagctcggcggtgcagggccagccccacgggcctggaggagagggcggctgtccagggggcgcggtgtcggagcagagcgggcgcggtggccccggtccggctccgggaggacagcgcggtgcggcgcagcgcagcgagcggccggggtggcccagggactctgcggctctggccgggggtcggggctgttatctgcatgtgtgcgtgcgcgggtgggggtgggggagaggctgtgtgcgtgaggggtcgccaggggtaggggccacccggggtcagagcaggggcaggacgcctgggttgaggctcgccggggcgtgagcggggctgctgcagacgtgcgtgtgggtcatgggggctgctcccgggccctgggtcgcgggaggggagtgcagccggttgcgcacccttgggactggcggagcgtgctatctgggaaaggctgggctcccggacacctcccctggggggcatcccggtcttgggcggagactcagagatgcctgggttgctgagttccgcaaagtagctgggtctggaagcccagaagctttagggaggggcaaatgagtggtctcccttcccacaatcccaggacatgttctagaaacaatgttgaccatgttgaggaatttgatgggggcaaatagggcaagaaatttggggttcttcctccccacctcactcctcaccgtctagtactctgcaaacccagacacttaacttttttttttttttctggagatgtagcctccctatgttgcccaggcagtgcagtggtgccatctcccgttcactacaacctctgcctcctgggttcaagcaattctcctgcttcagcctctggagcagctgggactacaggcacacctttacacccggctatgttttgtatttttagtagagatggggtgttgccatattgcccataccggtcttgaactcctgacctcaggtgatccaccctcctcggcctctcaaagtgctgggattgcaggcgtgagccaccgcacccagcccccaccccagacacttaacttttagtgcacagagcacacagtccattgtgcaggacacacatgcaccttgacatctgtttatttgacctgtggtgtaggttagctaggctgcattgctgagttcttaagaacactgaaatacagctaacaccaagagtgatgggggctgggatttacagctaaggttttatggcttctggaaaccctgagccagaggagtgagattcccagagcaggagaccaagactagctggtctctcacaccttagaaagtggcctcgtccttgagccctcaatgtcctcatctgtcaaatgggtgtggtgaaactaccagcctatcccattcaggtttcataaaagacaggaaaggtccaggcgccgcagctg

SEQ ID NO: 13635 - DNA, 1736 bp, Artificial sequence
  DNA replication origin
gtcctgcccctgctctgaccccgggtggcccctacccctggcgacccctcacgcacacagcctctcccccacccccacccgcgcacgcacacatgcagataacagccccgacccccggccagagccgcagagtccctgggccaccccggccgctcgctgcgctgcgccgcaccgcgctgtcctcccggagccggaccggggccaccgcgcccgctctgctccgacaccgcgccccctggacagccgccctctcctccaggcccgtggggctggccctgcaccgccgagcttcccgggatgagggcccccggtgtggtcacccggcgcgccccaggtcgctgagggaccccggccaggcgcggagatgggggtgcacggtgagtactcgcgggctgggcgctcccgcccgcccgggtccctgtttgagcggggatttagcgccccggctattggccaggaggtggctgggttcaaggaccggcgacttgtcaaggaccccggaagggggaggggggtggggcagcctccacgtgccagcggggacttgggggagtccttggggatggcaaaaacctgacctgtgaaggggacacagtttgggggttgaggggaagaaggtttgggggttctgctgtgccagtggagaggaagctgataagctgataacctgggcgctggagccaccacttatctgccagaggggaagcctctgtcacaccaggattgaagtttggccggagaagtggatgctggtagctgggggtggggtgtgcacacggcagcaggattgaatgaaggccagggaggcagcacctgagtgcttgcatggttggggacaggaaggacgagctggggcagagacgtggggatgaaggaagctgtccttccacagccacccttctccctccccgcctgactctcagcctggctatctgttctagaatgtcctgcctggctgtggcttctcctgtccctgctgtcgctccctctgggcctcccagtcctgggcgccccaccacgcctcatctgtgacagccgagtcctggagaggtacctcttggaggccaaggaggccgagaatatcacggtgagaccccttccccagcacattccacagaactcacgctcagggcttcagggaactcctcccagatccaggaacctggcacttggtttggggtggagttgggaagctagacactgcccccctacataagaataagtctggtggccccaaaccatacctggaaactaggcaaggagcaaagccagcagatcctacggcctgtgggccagggccagagccttcagggacccttgactccccgggctgtgtgcatttcagacgggctgtgctgaacactgcagcttgaatgagaatatcactgtcccagacaccaaagttaatttctatgcctggaagaggatggaggtgagttcctttttttttttttttcctttcttttggagaatctcatttgcgagcctgattttggatgaaagggagaatgatcgagggaaaggtaaaatggagcagcagagatgaggctgcctgggcgcagaggctcacgtctataatcccaggctgagatggccgagatgggagaattgcttgagccctggagtttcagaccaacctaggcagcatagtgagatcccccatctctacaaacatttaaaaaaattagtcaggtgaggtggtgcatggtggtagtcccagatatttggaaggctga

SEQ ID NO: 13636 - DNA, 787 bp, Artificial sequence
  DNA replication origin
ttccaggggaccatgagcagggaggtggctgggaggcgggagtggctagatggagagagaagggaggcagccagacctggatgcctgggctctgagaaggggatgggtgggggcagccctcagaggtggctgggcctcagtgtcttgggctctgcctcccccagagggcagctatctgcatatggaatcgaacagcttccaccgtgggggagtggcccgcctgctcagccccgacctatgggagcaaggccccctctgtgtgcactttgcccaccacatgttcgggctgtcttggggcgcccagctcaggctgctgctgctctcgggtgaagagggccgccgccccgatgtgctctggaaacactggaacacccagagaccctcctggatgctcaccaccgtcactgtgcccgcagggttcaccctgcccacccgggtaaggccggggacaaattgtgggacctcgggggggagtctgggtgttggagagcctgagggtgggggtgtggcaaaaagggattgtgggggccaagccatctgaattcaggaagaaaactaggagccaggaggcctggctgaggggctcatggggttggggtccccttatcctcttgcagctgatgtttgagggaacacggggtagcactgcctacctggacatcgccctggatgccctctctatccgccggggctcctgtaatcgcggtgagtccctgtccctcctcccgcctgccctcggacccttttctctccgtccttgcacaacaagaagaggatccagggcggg

SEQ ID NO: 13637 - DNA, 1086 bp, Artificial sequence
  DNA replication origin
agcacctggcatattgtaggtgctcagtatttcttgaatgaatgaagaatgaaaggggccagaagcaatggctcacgctgtaatcccagcatttgggaggctgaggcaggtggaccacttgaggtccggagttcgagaccagcctggccaacatggtgaaaccctgtctgtaccaaaaatacaaaaattagccgggcatggtggtgcacgcctgcagtctcagctacttgggaggttgaggcaggagaattgcttaaacccaggaggcagaggttgcagtgagcagagatcacgccactgcactccagactgggtgacagaacgagactctgcttcaaaaaaaaaaaaagaaaaagaagaaggagaaggagaaggagagggagagggagagggagagggagagggagagggagagggagagggagagggagagggagagggagagggagagggagagggagagggagagggagagggagagggagagggagaagaagaagaggaagagaaagaagaagaagaagagccacagaaaggagatgaggagctggctgtattgggtctgccaggtagagcttgtagggcggtggtgggggaggctggctgggtgcttgaaatcagcttcttgcgtgaaacttgagctggtaagaggcttgaagctgtaggtgttcatgacagaccgtcccagggcaattatcgtagggtgcttggtgcccagaaagtcaagggacagaagcatggccgctactcactaccagggctagagaagtcgccatcaggccccacgcctggctttcctgatgaccctttcttctgagtccacttggccccggaggcagttgggatccaggtccagtcacagaggtcatttggaatgtcaaagctgcatgtttgcatcatacagactgagaggaaagaaagaagggaagatataatgttttcttcttttttagagacagggtctctgtcacccaggctagagtacagtggtgtgatcatagctcactgcggcctcgaactcctggactcaagcggtcctcccacctcaacctctcaagtagctaggactacaggtgtgcgccacca

SEQ ID NO: 13638 - DNA, 861 bp, Artificial sequence
  DNA replication origin
ccccctgcccggccagccgccccgtccgggaggtgaggggcgcctctgcccggccgcccctactgggaagtgaggagcccctctgcccggccagctgccccgtccgcgagggaggtgggggggtcagccccccgcccggccagccgccccgtccgggagggaggtgggggggtcagcccccctgcccggccagccgccccgtccgggaggtgaggggcgcctctgcccggccgcccctactgggaagtgaggagcccctctgcctggccagccgccccgtccgggagggaggtggggggtcagccccccgaccggccagccgccccatccgggagggaggtggggggggtcagccccccgcccggccagccgccccgcccaggaggtgaggggcgcctctgcccggccgcccctactgggaagtgaggagcccctctgcccggccaccaccccgtctgggaggtgtgcccaacagctcattgagaacgggccaggatgacaatggcggctttgtggaatagaaaggcgggaaaggtggggaaaagattgagaaatcggatggttgccgtgtctgtgtagaaagaagtagacatgggagacttttcattttgttctgcactaagaaaaattcctctgccttgggatcctgttgatctgtgaccttacccccaaccctgtgctctctgaaacatgtgctgtgtccactcagggttaaatggattaagggcggtgcaagatgtgctttgttaaacagatgcttgaaggcagcatgctcgttaagagtcatcaccaatccctaatctcaagtaatcagggacacaaacactgcggaaggccgcagggtcctctgcctaggaaaac

SEQ ID NO: 13639 - DNA, 1320 bp, Artificial sequence
  DNA replication origin
ctcccggacggggcggctggccgggcggggggccgacacccccacctccctcccggacggggcggctggccgggcggggggccgacccccccacctccctcccggacggggcggctggccgggcagaggggctcctctcttcccagtaggggcggccgggcagaggcgcccctcacctcccagacggggcggctggccgggcggagggctgacccccccacctccctcccggacggggcggctggccgggcagaggggctcctcacttcccagtaggggcggccgggcagaggcgcccctcacctcccggaccgggcggctggccgggcggggggctgacccccccacctccctcccggatggcacggctggccgggcggggggctgaccccccacctccctcccggatggggcggctggccgggcggggggctgaccccccctcacctccctcccggacggggtggctgccgggcggagatgctcctcacttcccagatggggtggctgctgggcggagaggctcctcacttctcagacggggcagctgccgggcggaggggctcctcacttctcagacggggtggttgccaggcagagggtctcctcacttctcagacggggcggccgggcagagacgctcctcacctcccagacggggtctcggccgggcagaagcgctcctcacatcccagatggggcggtggggcagaggtgctccccacatctcagacgatgggcggccgggcagagacgctcctcacttcctagatgtgatggcggctgggaagaggcgctcctcacttcctagatgggatggcggccgggcggagacgctcctcacttcccagactgggcggccgggcagaggggctcctcacatcccagacgatgggcggccaggcagagacactcctcacttcccagacggggtggcggccgggcagaggctgcaatctcggcactttgggaggccaaggcaggcggctgggaggtggaggttgtagtgagccgagatcacgccactgcactccagcctgggcaccattgagcactgagtgaacgagactccgtctgcaatcccggcacctcgggaggccgaggttggcggatcactcgcggttaggggctggagacccgcccggccaacacagcgaaaccccgtctccaccaaaaccagtcaggcgtggcggcgcgtgcctgcaatcgcaggcactcggcaggctgaggcaggagaatcaggcagggaggttgcagtgagccgagatggcagcagtacagtccagcttcggctccgcatgagagggagaccgtggggag

SEQ ID NO: 13640 - DNA, 2005 bp, Artificial sequence
  DNA replication origin
gggcagaggctgcaatctcggcactttgggaggccaaggcaggcggctgggaggtggaggttgtagtgagccgagatcacgccactgcactccagcctgggcaccattgagcactgagtgaacgagactccgtctgcaatcccggcacctcgggaggccgaggttggcggatcactcgcggttaggggctggagacccgcccggccaacacagcgaaaccccgtctccaccaaaaccagtcaggcgtggcggcgcgtgcctgcaatcgcaggcactcggcaggctgaggcaggagaatcaggcagggaggttgcagtgagccgagatggcagcagtacagtccagcttcggctccgcatgagagggagaccgtggggagagggagacggagacggagacgagggagagggagggggagggggacggggacgatctgacttattttttaaggattttttttgtgttgagaatccactgaggagaacaggcaagggtcgatgcagagaggctgtttaggaggcttttgcaaaaatccaggcgacactctttctttttctttctttttttttttttgagacagaatcttgctgttgccaggctggagtgcaatggcacgatctcagctcactgcaacctctgccttccgggttcaagcgattctcctgcctcagcctcccgagtagctgggattacaggtgtgcgtcaccatgcccagttaattttttgtatttttagtagagatggggtttcaccatgttggtcagggtggtctcgatcttctgacctcgtgatccacccacttggcctcccaaaatgctgggattacaagcgtaagccaccatgcctggctgatattctttctttctatgcacccaagtctatccctagcttctttccaccacctccctgtgcactcagctgagcttctttctctttctactgttgacttcttccttttctctctcacacaacattcactttctctcttaatcttctcacacagcccacatttcaacccctcactgagccaagcactgtaggtcaagcatagagggttctgctccctaatttcctgagtttataattcttatttttgaatttaaaaaaatgtttttaaaaactaggccaggtgcagtagctcatgcctgtaatcccagcactttgggaggccgaggtgggcagatcacttgaggccacgagttcaagaccagcctggaacatatagtgagatcttgtctctacaaaaaatacaaaaattagcccagtgtggtggcacacacctgtagtcccagatactcgggaggctgacgtgggaggactgattgagcctgggaggtggaggtggcagtgagctgtgatcgcactactgcactccagcctgggcgacagagtgagattgtgtctcaaaataaataaataaataaaaatagagatggggtcttgctacattgcccaggctggtctcaaactctgggcctcaagccatcttcctgcttcggcctcccaaagtgcttgaagtacaggtgtgagctgccacgcccagcctatatctctttgttcttcttttcccttaatacttatcctttctcaatccatttcctcccttccactttaccatttccacactttattttattttctttatttgtaaagatggggtcttgctatgttgcccaggctggtctcggactcctggcctcaagtgatcctcctgcctctgccgtattttcttttctgtttttccccatcttttcctctctccactccatcagtgtccacttggactcctgcactcctgtctctgatctttcctgctgcctaaactttgttttctagaagggccctggccaggcgtggtggctcatgcctgtaatcccagcactttgggaggcggaggcaggtggatcaccagaggtcaggagtccgagaccagcctggccaacatagcgaaacccgtctctactaaaaatacaaaaaattagctgggcttggtggtgtgcacctg

SEQ ID NO: 13641 - DNA, 994 bp, Artificial sequence
  DNA replication origin
cgcgatggcccagggctgtgatggcaggaggaggtgaggcgggcaggctggccccaaagagtccttgggtcctcagctccatggggctgtgactgctcctctggggcccttctaggcatggcatgagcgcagtgcaagaagacagcattggcacccgaagctgaccccaaaagcccctggagaccccgtgggcctgactccagctgccccgctctcccagccccactccagctcctgccactgcttactcagcagagatctggctgaccagctcgaaggagccaaagccagcggctgcgaaactttcttcgtatcttcccattttgatggcccgaagccactcgcccacagagccaaaagctgagtagtgaggctgccgctggtccaggagagggtgtgaggccctagggggcaaggatggggaggaatgctgagtaccaggcccaggtccgggggaggaggtggaacccagccttgcagaggcggacagaggccctcccacccaacaccaatgaacggacacttctgggcaaggagtgggggcagagagcgggaaggagggcccattctctgcagtcctcacccgccattctcccgggccacgattttgaggctggcggggttccggatcatcttgtccagggcgctgaccacctgggggaagcggggccgggcattccggtctttctgccaacagtccagcatgagctggtggagggaggtgggacagtctgggggcgggggcagccggtagtcctgttcaatggcattgatcacctggaaagaggggaagaagctctgggtgaggctgtccaggaaaagcaaagatgctaacaggcccaggaaatggtgacttggaagatggtaggataggagccacagccccccaaaaaataacagatccaggaatcctcctagccggagttgaagctctctgtggctgaaggccccagcagctcttgggctatgatacagacatgttacctctcaaccc

SEQ ID NO: 13642 - DNA, 819 bp, Artificial sequence
  DNA replication origin
ctatacaaaatggaaacttaagaagtgggtcctgagtggagttcaggactctcccccggatgagcagcagtcgcaggggaagctccagctctcacctcggcacttggtgttcccctcagctgcctcgaaccccggagcacagctgcagcccgtgaccggctgttcggcccactggccatcctcacggcagtagaggctggggctggggccaggggcggggacggcatccaccacgcagctaccggccacgggcacaaccagctcccgaggcacagtctccgggaatcgagtcaggttcacagtcagctgggcgcactttttgtagaagaggtgcagggatagcagggccatgcaggcaccctggtcctggaaggccaggtagaagccagccttgctgagcggtcccagacgcagcgtcttgacattcaccttcccggtggcctcggccccagggcgcttccgggtgagatgctccgcggccaccgtgtccacctgccggcgggggggaggcacaccgctgctgtccccactccctgaggacccagcggactgttgtgttcttcccagctcaccctcccggacctccttggttcccgttccagaatcttccctccaccttccccagggcacactttctgcaggcccccacactgtccattcagccttgcaaagctcctgcgatatgcccggcctctggcctgcacctctccccctttttattcactcgttctacaaacatttactgacactgacgccatgccaggccttgacctcagagtcaaggagacagcgatgaatgaatcctggggaagttataaa

SEQ ID NO: 13643 - DNA, 3593 bp, Artificial sequence
  DNA replication origin
gccgggccaggcagcccccgtatattctgctcctccgcccagaagatcacccccttccctccccagacctaagcctcctgcttccagcccccagcgcgcgggccagaggcctcgcaactacatcggctgccctccaggccacgggcctgctggctggaatcccaccttggctgtggctgagccctgggggcacccaggtaccttgatgtaggggttctccatccaggctggcgtgagggccgtggccgtgtccgcatcgctctcatagtagaagacggtgaaggtctccttgcaggagcgcccagcccgaggcagggacaggcactcgagcatggtgaagcgcagcgtggcgtacacgtggacggcgccccgccgtgggacccaacctgtgcgaagccagtgggcctggcccggggcacgctgcacgtcacacacttcgtaggtgcgcacgctgtgctgttcctcatccaggccgctcagttcctcccactgtgcagagaaggaggtcagcaagggggctggggagccgccagggagagggctgcatggggtgaatcctataaagtgagagggactgagaaaggggggctgctggtactgcgaggagggcgcctctgagaagggctcagacgacactgctggggctgctgtcatctggggggacaggggagaggagtggcacacagaaagcaggcggcacaggcgccctctcctccctcagtttccctccagagctccagctcctgggtgcagctctcacctgcccgtccacctgagggaatgtcacccacttcagatcagcagtttccaattttgtgttcagcagggtctctgagacagacagagagacagagtcagtgcctggggtgggggagggaggtcaggaagaccagatccctgggaaccgaggcaggtggatcctcttagctctgagctagaggagttggggggccaagaggggagcaagccctgccctctgcacccgcctgatttctggcctcttctgctaagtgccaaccccacccccaacatctggtaggcatggggctcccttgggataccccagatctaggcctccctggaggagggagggagatcaaaatgtacggggagaaggggcggcagctcagaaagggttaaaatgagagctgcgccctggtcctgacccccacgagcagaggctgctggtgtgggaggggaacctcttgtctcagcctccacgtttcctcccctaagtcccagaatcagcctctctaccccacaatttcattccctgtccaagacccctctctgctttcagaccaaacaccccgtccttccctccttgaagggagcgctccgtgcctggggcatagccctggcccccatcccagtacctccctccccacgagtgccctgatcaggaagcactggaggtcgggatgctagggttcccaggctcccgccgaggcctcacatctggatttggttatgggaaggcagaggggaggagattctggggggcggtatgaatgggaggggtgaacacacctggcttggctcggatcatcgggggaggggacaggcactggaggaaggggggggattaggaaaaactgcacagcccctggcagtggagagtggaggagggagggtacaggaatcccctcgggggccggcaatgtggggggcattgggcgctgggaagggtggagaggggagccagaacacctggctcccaccccatgggagctgcaggagagaagagaaagagggtgggtgaggcagcctcttcctggggaccaaatgatgtcctccagctaggggtcagatgggaagccagccagcctgaggtgagaggcgcaaggtccccatgggtggcaagagacagccctgctcactggggacaggatgcccgggttctgggaagggggtggatagaggctgccgtctccaccctccattgttccagccgggatagtgttttcctgtctccaatttacacactgtctctgcctcgggctgtccgcagcccagagcaagcgcaggctccctttctgcgtcccagctcagctgcagccacgctttgatctgtcagttcgcatgtctctcacctatctctcctccactctctgtccacctccgtttctctttctgacagtcactatctctccttcgctttcggcctccacttctcgctgttcctcgcggcacagggccttggataaactacttaaccttaactaagccccagcctcctcatctgaaaaatgggggcaataatagcaccacccttagcgttgctggatgggtgaaattaatatttgtaaggcgctcagcacaggcctggtgcttggaaacactcaggtaataggtgtcacaatcaccatttcctctttgcgtctttccttctcaccacacctcgtcctcgtggtttttccacccctttggccttcctcttcccctcgttcatggtttttgttcccccttctccgttctctgagctgggcaagcctcccctcactcccaaccccacacctagcctttgatccccagcccagggcagtcctgcccagccagggggagagggtttttctaacgccgctgaatccttccctttgggagtccctcatagcctaccgccccataaccactttcataccagacagagaaaggggggtgttggcagctcactgaaaggacattagggacacaggagagtttctagggctcttggctccccctttaggggaccaggagggacagcgatccatggccaaagaaatgcttggagagaccaggaggtgggagatagactgggttagttagggcgatgtgggggctgtgtaggtcagtttctacctgggggctgtgtaggtcagtttctacccgctcctaggtctcaagggaagcccgggactcacctggggccggggtctagaccgcatttaaagggatggggtgcagcctgtagaaaccaaggagccaccctataccaggggcaggagcagtgggcgggagagcggtttgggggtttgctgtgtgaatgcaaaggaggccatcctgttgcaggagtgtggaactggaggatcaaggtgtgatcgctaaggaattggcgctgggggtcgttttagggcctagcacgaaaagttgtgccttgtctgctgttgcttctccagaaaccttccctcatgtacggcgggaggtgggactgggacagaaactttgcagatagttttgaatagtggggtagggaggaaaggaaaggcagccaggggcgtatgtaatcagcagtgagagttcggggagcccgggcaggggaatgtcccgggtcgtagccagactccatctctttcccaaacaaaagaaaactccactacccgtcgggcgcctcttccccgcccccctcccgttccagcactatcggtccgaagtgtttgggactgcagtgcccgggtaggggtagtcagaggccggcccctccactccgaggcccagatgttgggggggaggtcccaggagtgacggggtgcgcccccccccgcaaggaaactcaccttccaaagctgcggccaacgaagcccagcagagcagcacccggagctccatggcgc

SEQ ID NO: 13644 - DNA, 1444 bp, Artificial sequence
  DNA replication origin
ccgatactccgcgcgggactcctcgtcggggccctcagcgcgggcccatgcgagcgtgcggggcaccgggcggcggcgccaagtgtggccccgcgtctgtgccgcgcgcgcgggcggcgggcccggagcgtgctggcagtggccgcgccgggcgggcgcgcagcaagacgtggctggagttggggtccctccggggcctcggggtcccgccccgggtggcgggggctgagccggccgctcgcggtctccccccctccctggagtggctctgctcgcgccgccgggccgagtgctctcctcgcgggcggggatggtgggagcccgagcggggacggagcgggagggagggagactgcggcgcggagccgggcgggccgggccgggcaggggctgagctgcgctggaactgggccgggcggcgccgggcccgggagggaggggcgcgcggggggcgggggcagctctcccaacgcgggggctccgcgagtgagccccgggcgcgctgattggagctcacgctactgaataattcatgagggaagcggagaggggcaccgagtggagcaggtcgggaagttgagagaaagtttggagaagggggaggggcggcgggtgaggaaccccgggaccgcccagatgtgcgccgtggcggtgcgcgctgtccaggaccgagcatgtcggggctggggcccagggacccccgggacaggcccgaacccggctggcaccagggagcagagaaaacacacacccagcagcaacacggagggccgcccaggcgtgcacgtaaatgttcaccgcgcacacaaagcccgctctgaccttgctgcggactctagatgccgctcttggatgcgcccaccaccctctagtgggcgcagggactgcgttttgggggaaaaggaaggaaaagggagtagaagctttggagaattgacggccgcccagggggcctcaaggagcaatcccagtttggatagccttgcagcgaacgttcacacagtcaccccataaacattcagtgttggggacctactgtgcgcgcaaccaagccctgaaaaatgtccagaggaggcgcgcactaagctgcgctagggagtagagaaaaatcgaggaaacaacggtaaagaaaaggtgggtgtggcgggcgcggtggctcacgcctgtagtcccagcattttgggaggcagaggcaggcggatcatttgaggtcaggagttcaagaccagcctggccaacatgatgaaaccccgtctctactaaaaatacaaaaattagctgggcatggtggcgcgcgcctgtaatcctagctactcgggaggctgaggcaggagaattgcttgaaccgggacctaggaggcggaggttgcagtgagctgggagctgagatcgcgccactgcactccagcctgggctacagagtgagacgaaatctcaaaaaaaa

SEQ ID NO: 13645 - DNA, 1113 bp, Artificial sequence
  DNA replication origin
gagggtccagcacagccgtgctcctcccaccaacccccttctacttcagggaacttaacagtatgggttactggatagatggattggagggggtgctgctccaggagtcagcccctccaaggggcagaaggaaaggacttagactcccacagtaattagcggggacagattttttttttttttttgagacagagtctccctctatttcccaggctggagtgcagtggcgtgatctgggctcactgcaacctccgcctcccaggttcaagcgattctcctgcctcagcctcccgagtagctgggattacaggcacagggcaccaaccccggctagttttcgtatttttagtagagacagggtttcgccatgttggccaggctggtctcgaactcctgacctaaagtgatccacccaccttggcctcccaaagtgctgggattacagacgttagccaccgcgcccagccggaggacagaatcttgaggagcccagcaagagagacgttggagcccagcaagagagacgttggagtccaggatgcttggggggctgccaagcgcccttacgtcccagaaaggacagccgggcctgtgataacctcttgtcccggcttacttatcttcctgctgcaagaggtgttccccacacccctgcccttccttgctgttctgcctgggtcctgcgcccgggttggggggggtgggccggtcaccgagggcaggaaacagccggcttcactggagccaggcagaccaggctggagctgggaattccctcctccctccccgatgcaggcccagtctccccttctcttattcagcttctccctcggggttctctgcaaccctctcccaaacccctgccctgccttttgccactctcactctgtacccagatcctgtagcctctaaaagttatgtcttctggctggggacagtagctcaggtctgtaatctcagcattttgggaggccgaggcgggtggatcacttgagcccaagagttcgagaccagcctagccaacatggtgaaacccctctctactaaaaatacaaaaatcagctgggcatcatggcacacacctgtagtcccagctactagggaggctgaggc

SEQ ID NO: 13646 - DNA, 1065 bp, Artificial sequence
  DNA replication origin
cttccagcctggggaccagagagctcacctgaacctcagaaaacccaccccccgctccattccctaaggctgacatcaccccatgcgccacagcccagcaacctgtctggccagagccttccacatccagctgctgcccagataccctccctccccaggatccaggggtctagcctcgcactgctgccctccaggaaccctggaatttcatccctcccctcggctcactcctgggccgttttgccccatcagctgttcttgcaggaagggcgccctgctcagctcgcctctcttcccgagagtcttttgtttgctgggtctgcaggaaattggaggggcggtgcccaagggctcatctgcccctgggacctgggggaggggggcgcagattcaccagacttaatcctggggagtttacagcaggaatggggtgggggagggtgggggtgaggtgggcggatctccaggaaattagcatttaaggcctaattctgagagtgccattagatctccttgtcccgaaggggcagacggggcatgtgtgtgttccaggatctgggatccctagaattgagggctgggggaacactctgaggtcacctaataggttgacaggggcgttgacaccaaggtagaaaatctcagatactgaatcccacgatctcctctatatctatacaccatttttaaaaatagagatgggggctcgctatgttgcccaggctggtctcgaacacctgggctcaagagatactctggccttggccccgcaaagcgctgggattacaggcatgagtcactgggcccagtcccacaatcccgtcttttacacgcctgcgatcctgcggatgccaagaggtggggaggcaggtcagaccaaaccgtctttgagaattattattttttccattaaaaaatggtggagaggacgacccgcccgtagccacacaattcgcgccttcccaggacgcaaccgcagaaaaagcggcggtgtggacgctctggcgggcggcgtcctctcgttggttgccctctctctgaagccatcatagtcgccgccatctt

SEQ ID NO: 13647 - DNA, 967 bp, Artificial sequence
  DNA replication origin
ctttccgccatcctcacacgccccctttagtggggtggctgctcaccgcacctcggagctcggactggggtccggcccctgcggcgacgattgtttgtacctaagtgaaggaggctccgagacccgcggcccacgtcctgccggagacgcttgtctgcagggctgcattgcatccccgggcgcacgtggagctggagcagcgcaggctggggaagagcagagagggtcgggcttctccgggcgcgccatggggcggggccgaggacggggaccaatagcgcgcgcgtgctggtgggggtggggacaggctccaggcctggcatcccggtagccgcagctgtcttttccggcccccgtgcactctccgcccgagcggagccccccggctcgcggggatcgcccccgagcgctgcgtcctgcgggtgggtgagtgagcgcctcgcggcccccgagctgtggggtgcacctggccggggagaaggatatcttggctcccttgcaccccaacgggcgcaaaggggcaggagcccggattgggggaggaggaggacccggggaccttgtgtcgctcggtgggagccggtctgtgtttctgtttcgctagggtgtgtttgggttggtagagtttgtggggaggggtgcctcgtgtggatgggaggaatcggggaggctaaggcgaggaggagggggtttgagatgggttgagggagaggattgacggagggtggggttttgaaagagttggaagtttcttgttacctgtgggtgcggtgattgcattggggggcttggtaggggcagctcaggacaccgaaggagaggatggggaaggctctcctgcccgtaacttacttcccttttgggagatttggttcctcttgcattgctagttaaggaaggagaggctggagaagcctgtgccgtcagagaacctttgcccctttccagaaccggtgccatccctagt

SEQ ID NO: 13648 - DNA, 977 bp, Artificial sequence
  DNA replication origin
tttttgtatttttagtagagacggggtttcaccatgttgaccagggtggtctcgaactcctgacctcaggtgatccacctgcctcgtcctcccaaagtgctgggattacaggcatgaaccaccgagcctggccaatttttgtatttttagtagagagcagctctgtcttttggggaggcttcagggtgtttgattagtggtctttgggggtgggcgagctctgtgggggagcttttgatgcaacataatctcctttgcaggtcacctaacccatttgtggcttcctctacctgtgctcagccatggccagcgagagctcacctctgctggcctaccggctcctgggggaggagggggttgccctccctgccaatggggccgggggtcctggaggggcgtctgcccggaagctgtccaccttcctgggtgtggtggtgcccactgtcctgtccatgttcagcatagttgtttttctgaggattggtgagtgggtcctggggcgggtgtggactgactatagtatgggaggacatgatggggaggggtggagatgggactgggataagattaggaaggggacccaagagaagcggttggctgaagggtttggggaggggctctctgtgggcttgcatttagctccaccctggagctctgcagaaccagggggtgggggatatggggtgtgagtcccctgtgacctgatttgctgctcctgcctcagggttcgtggtgggtcatgctgggctactgcaggccctggccatgctgctggttgcctacttcatcctggcactcaccgtcctctctgtctgtgccatcgccaccaatggagccgtgcaggggggcggagcctactgtatcctccaacatcgatggactggggtctggcctgttctgcctgctagggagggtgtggaaggggccattacctttgttggctcaggggcaagacaagtgtttttttcattcttaaa

SEQ ID NO: 13649 - DNA, 975 bp, Artificial sequence
  DNA replication origin
taattctcctgccttagcctcctgagctgggattacaggcacacaccatcatgcctggctagtttttgtatttttagtagagaaggggtttcaccatgttggccaagctagtctcgaactcctgacctcaagtgctccgcccatctcggcctcccaaagtgctggaattgtaggtgtgagccaccacggccagaacccctcccccgcttttttttgagacaaggtcttgctctgtcacccaggctggagagcagtggtgccatcatagttcactgcagcctcaacctcttgggctcaagtaatcctcctgccttggcctcctgagtagctgggactacaggtgtgtgccaccaggcctggctcatttgtagagatgaggtctctttatgtttcccaggctgtctggaactcctggctcaagcagccctcccaccttggcttcccaaagggcagggattacaggcatgagccccgacaccagcccctctgccccttttatcctttcccatgacccctccaagtagccatagccctgcccaggcccgtctgtgatttggactctaggagacattgagtttggacaacactggctaccttcctttccttatcttctctgtagactccctgccctcggaccctgtacagccgcagtatggggcatggctcagcctggtggaccgtgcccaggtgaaggcttttgtggatctaaccctctcaccctccgtgcgccagggggctcagcatctgctgcgaatctccggcctcggtgagctgcttctccctggatgccctcggccttcctctgtggccacttcaaatctccgctcccctcccctagagagtcagccacagattgcaaactgcaaaaggaccttatagtcgagaggagataagacagtgctcaaagataatagcctcagacagtgtgtgataaggtctaataggagatgctagggactagtgatggggtgggcg

SEQ ID NO: 13650 - DNA, 1017 bp, Artificial sequence
  DNA replication origin
tataattgtttcggtatatattacaatgtatattacaatgtaatatataccgaaacaattatacaattcaccatcatgtaggatcagtgggagccctgagcttgttttcctgcaactggacagtcccatctgggggtgatgggagacagtgacagatcatcaggcattagattctcataaggagcttgcaacctacatccttcgaacacacagttcacaatagggttcatgctcctatgagaatctaacgccgctgctgatctgacaggaggtggagctcaggcggtaatgcaagtgatggggagcagctgtaaatacagatgaagctttgcttgcccattgctcagctcctgctgtgtggcccagttcctaacaggccatggcctggcggctgagggccctggtattacagcatcaggagctagagtaggaccgagcccgattcccaccttccaggtgcccctgagccagcctccagaggatgagctggataggctgacgaagaagctggttcacgacatgaaccacccgcccagcggggagtactttggtgagctgaggctgtggggtgggtgggacgtgggaagggaggctgggagacagaggggacagtggcttcctgggtctgtgaagactgatgctgtttctccctgtcctcaggccagtgtggtggctgcggagaagatgtggttggggatggggctggggttgtggcccttgatcgcgtctttcacgtgggctgctttgtatgttctacatgccgggcccagcttcgcggccagcatttctacgccgtggagaggagggcatattgcgagggctgctacgtggtgagtggctggggctgggaggagggagtcagtggctggatgcagggggcttccatccaaggtggtaactagagcgtccaagaccaaaggaggaacggtgctaaaagccaggcgactgaaagtgatgtacaaacagggcggaattctgcaagtatcaagcaagtagcttaacactggtggctgaagg

SEQ ID NO: 13651 - DNA, 968 bp, Artificial sequence
  DNA replication origin
tgagccaccatgcccggcctgcctcatttttcaagcagaacaaaatatctcaacagattcagtgtagaagctatcctctacaaagccagaacttggagagattggtgacaatgtaaaaacaatgccactttttctcaccaaaatttttctggaaaacgatttttcataaaaacatgtaatgtgtttcatcttactgtgtaatttaaaaatgaaggttttggaacatttcgttttaattttgaatatagtaagtatcgatagatgtaacccacataagcagaaactctttggtgtcctcagtcatttttaagagtattaaggggctgaggcaggagaattgcttgagcccaggaggcggaggctgtagtgagccgagagtgattgtgctgctgcactccagcctgagcgacagagtgagactgtctccaaaaaaaaaaaaaaaagaagaagaagaagatgaggatgggggaggctggtgattggttgggaggttggtgactggtggagaggctggtgactggtcgagaggctggagtgacagccaggagcccaagttaaaacaatagtgttgcttactgacattgaagtaacggtgtgatgtgatgagacttgtgtttgaggaaggtctgcctgccagtggggagacagaagcgagagaccagaagcaggcgggcagccagggctgcaggagccacactggccaaggacaaagactaggacagggtgtgtggggatggcagagagtgggacagctttgataggctttgaggcagaggattagcaggagcagtaattagcggtgagggtagtgaatgacagctggcgagagatgctgttccgttgatacagcagagtggggagcgggaggaggaaaagacatttgggcccatagtggtgggatgaataggcttgattcttttttctttttttggtgggggggatgaagtcttgctctgtcgcccaggctg

SEQ ID NO: 13652 - DNA, 1089 bp, Artificial sequence
  DNA replication origin
gtggccgtgagcgccgtagtcggggtgaatatcgggactatgaccggaatcggcgagagcgcttctcgccacctcgccacgaactcagcccgccacagaagcgcatgaggagagactggtgagatggagcggtttccctctcctcccctttgcctcagttccacctgggcctcccctttctcccctcacctgtgcctaaatctttgtcatttccttttctcaacttcccatcacccatcgttactttgtcccttgaaacccttgtctgggagaccatgctgtgtgtacccccgtctgtccatcctccatgctctggggaggtgactcccttctctgctttacttttgtgtcccccaccttcagggatgagcacagctctgacccataccacagtggctatgagatgccctatgctggggggggtgggggcccaacttatggcccccctcagccctggggccaccctgacgtccacatcatgcagcaccatgtcctgcctatccaggccaggtaagggtggggcttctcagaagagggttggtaggcctgggggatggatggggttgctgaaggccatggctgaagccagggagcgggtcaggcacacagaggcatgtccctggggtaggggtggtagctgttggggtttggggtgatgtccatggtggacaaagtaaaggggccccagctactttggcccctgtagcctcccaccgttccccaaaaaccaagccttcctgaccggggtcccctccaggctgggcagcattgcagagattgacctgggtgtgccgccgcccgtgatgaagaccttcaaggagtttctcctctccctggatgactcggtggatgagacggaggccgtcaagcgctataatgactacaagctggatttccggaggcaacagatgcaggatttcttcctggcgcacaaagatgaggagtggtgagtgcccctacttccctggacctctgccctggcatgtccccctggccccgctggtggagccacagccctgtcctcttcccagttttccctgtccagaactttctgggggcgggggtcgggaagtatgacagcattggctg

SEQ ID NO: 13653 - DNA, 1080 bp, Artificial sequence
  DNA replication origin
ttcctgtccctcatggagactggctggtttgataaccttctcctggacatagacaaagctgatgccattgtcaagatgctggatgcaggtgtgcggatttggaggggtggcaggcatctgggccccatgggggtgggggtgtctggggatcaggtagaagccggttgacaggagccagggccctggggtcatgacctctgttccctttgttggtagccgtgattaagatggaaggaggcacggagaatgatcttcgcatcctggagcaggaggaggaggaggagcaggcaggaaagcctggggagcccagcaagaaagaagaaggacgggctggagcaggcctaggggacggggagcgcaaaaccaacgacaaggatgagaagaaggaagacggcaagcaggtccgagccctgggtctcctagtgttgtccctggcagcctgggggaggggggcgggtaggggtccataggagctagaagtagggggctggggaaaatgaacctgtggcctcagctgtgggggtgggggccctctgataaaggtgggaggggaggtttgacatccccagtggttgtctcttaccataggctgagaatgacagttctaatgatgacaaaacaaagaagtcggagggtgatggggacaaggaagagaagaaagaagactccgagaaggaagccaaaaaggtgaggtgtctgtggcctggggtcagagtgttggggctggggttctggcacgctgacttgtcccctctgctgtggctcacacagagtagcaagaagcggaaccggaagcacagtggtgacgacagctttgacgagggcagcgtgtcagagtctgagtcggagtcagagagcggccaggctgaggaggagaaggaggaggccggtagggtttcttttctgctttaaagtgcgttctcctaatgcgggtggggaggtgagaggttggcgacattgacgggagggtgggtggcttttaggggaaagcttctgtatcctccccaccacaatcagtaataaaaatgcaccaactccttcctaccccccttcctgcctagaagaagcgctcaaggagaa

SEQ ID NO: 13654 - DNA, 1155 bp, Artificial sequence
  DNA replication origin
cgcgtccccagtctgcgcgccggtcctgcggcagctggcccaagacccggagccgaaaggaagtgttggagcctgaggtcgctccgcgccgctaggaggacgctgtgcctggcctgggacctccgctcccgcccaccgccctggagccgctgagggacgtccacgtgggcctgtccccgccgagccgcggccctgtccgcctggcgctgctctcgggccactacctctactaccactacggctgcgacggcctggacgaccgcggctggggctgcggctaccgcactctgcagacgctgtgctcgtggccagagggccagcccgcgggcgtacctggactggccgccgtacaggcggccctggaggacatgggcgacaagccccccggcttccggggctcccgggactggatcggctgcgtggaggccagcctctgcctcgctcacttcggagggccccagggacgcctctgccacgtaccccggggagtggggctgcacggggagctggagaggctttactcgcacttcgcagggggtgggggcccagtcatggttgggggggacgcagatgccaggtccaaggccttgctgggagtctgcgtagggtcaggcacggaagcctatgtcctggtattggaccctcactactggggcactccaaaaagccccagtgaactacaggctgctgggtgggtgggctggcaagaggtgagtgcagcctttgaccccaactccttctacaacctgtgcttgaccagccttagctcccaacagcagcagcgcaccttggactgaggacgaagttacagaactgagattctcgggtcccagacacgcacctatgtacctcccactggtgtccctgcaaagcctggcgcttttgacatcaataataaaagtggcagggctgagcaacacctcaggagttactctggaaggatggaggagttatgtaacacacgagagtcaggagccctgtggaagtgcttttattagcagtaaggctgatcgtacaaaaaattctcagagcttcataggacaaggtagtacaagtatggatgatacaggactgaggaacgggggacggctcaaaagaaatcaacatcgtctggggcatccaggtcccgatattccacaatggcccttgggtctc

SEQ ID NO: 13655 - DNA, 1060 bp, Artificial sequence
  DNA replication origin
gcctttgccttgcgcccgcctcggagctcgcctgtttcttgccctccagccccgctcctgcatagactcggcccccgtgattccggcgttctgcctctacccctggctccctagtcgcgcacactcccgtggctgtaacagtttattggcagcccagaggggcgaaggcaccgcgggggagggagctcagcctgagacatgcagaggaccgggagccccgggggacgtcggggtggggtggggatgggcagagtctggggctcgtctgtgttatagcccagccctgaaataaatagtatatacagctagggggccgggcggagcggaggacatgggggtcccgccggggtcacaggtctgagcagcgatcctgcttgctgtagtggtcgaactggttcttccagtgcaccatgtaggagctccagcggtggaactcggccttccactggcgctccgcctcgtcgagcgtgtctgcggccagggcgcccagcgaggcgggaggggaggacggcacgaggaaggtcggggatcggacatttgggcgggttgaagggggggtatgagtgcagggaggacgcacggagaaatgcaggcgaccacgtgggacggtggcaagaggatcaggagaatgtgcgaaagacgagagggaggatgagggcagaggcggggccggagaaggacagcaggaaggagagaggaggagaaaagaatgaccggaagacgggaacagaggggacaggagggggaggttgggggaaaaagaagagacagaaatggttgaccgttatagccccaatggggggtgctaccccgtccggggcctcccacttccccccaatgtcaggctcaggttccaaaagataattttataaaagaatactggcttttccatttccattcaaacaacaaaggcgtgggggtccctgagaagggtgggaggcacggccccctcctcctgccctgtccagtgtgagtctctcggtttgaggaggaagggagcactaggtctgagatccctgagtggggcccttccccacggtccgaccactcattagaggag

SEQ ID NO: 13656 - DNA, 952 bp, Artificial sequence
  DNA replication origin
ctctctctgtccatggttccgggtctgtaactgttcatctctctggctctttgtctgtccatctgtttctgtctacttgtctgtctgtgcctgtcgctccatcccacccccctctccctcacccccaggtgctggtgggtgtggtgaaggatgagggctcgtattttctggtttacggggccccaggcttcagcaaagacaacgagtctctcatcagccgggccgagttcctggccggggtgcgggtcggggttccccaggtaagtgacctggcagccgaggctgtggtcctgcattacacagactggctgcatcccgaggacccggcacgcctgagggaggccctgagcgatgtggtgggcgaccacaatgtcgtgtgccccgtggcccagctggctgggcgactggctgcccagggtgcccgggtctacgcctacgtctttgaacaccgtgcttccacgctctcctggcccctgtggatgggggtgccccacggctacgagatcgagttcatctttgggatccccctggacccctctcgaaactacacggcagaggagaaaatcttcgcccagcgactgatgcgatactgggccaactttgcccgcacagggtcagcagtgcagagggagagaaggctggggaggacaggagtcgggggcgggaggacacacaaaggcagacacacggagacagaaaggacgggtgggacaggggcaggatagaacagccagagagggatatgctcacaaagtagataaaaggggagagaaaaagaaaggagacagagaaggcagagggggtcttgcagagacagaggcaaaggaaagtgaggaggagacgaggtagacatggagggggcggggcacagtggctcacccctgtaattccagccctttgggaggccaaggtgggaggatcccctgaggccaggagtttgagaccagactgg

SEQ ID NO: 13657 - DNA, 1480 bp, Artificial sequence
  DNA replication origin
ccctgcagggaggggagggaccgttgggacccagaggagccagcttcacgccagctagccactagttacctgcaggccgtggaagtctcccgcgttgatgagggcctctggggtgtcactgaggaagtctccatctaccacaggcacgaaggagaaccggaagacgctttcttgaggcagcacgtgccattcgtggttcaccaggacctgcgctggtcgtgtccgaaggcaggctaccagctctgtgtcattcccaccagtgccgcctggaggacagcccacaaggtgggccagctgcgtggccctgcgacgggcctctcccatgcccaccgtggcccagggtccattgggggcaccgctctgcagcacggccctgtggaacaggccccggctgggcggggacagcaggtgcatgcccaccgaggcggctcccgcgctctccccaaacagcgtcactgatgtcgggtcacccccgaaggctgccacgttctcctgcacccactgcagggccagcctctgatccaggagacccacattgcccggggcctctcggctccccggcagggccaggaagccaaaggctcccacccggtagttcatggacaccagcacagtcctctcggcctgtaccaagaagcggccatcgtacacgtccaaggaggaggccccactgtagaagccacccccatagatccagacgaggacaggggtgggggatgtaggccgggggtatggtgtccacacgttgaggtacaggcagtcctcgctcagctcacggttggggttccacatctcggtgccctcaaaacctgggtatagggtgtccacatattggtagcagacactctggaaggttgtagcgtctaccacccctgaccaaggctgcttgggctccggtggcagaaagcgacggggtcccatgggtggctccgcaaaggggatgcccaggaaagcagagacagggcccccgggggtcttcaggcgaatgccccgcagccggcccccacgcaccgtcaccagcagctctgcatcctcccggccctcagcccccactcctccacccaggagccagaggaggaggagaaggagtggggaagccagggaaggcgtgtgcagcagacactgcgggggcctcatggctgcagggcaggcggcgtctgctgggagaaagaaagggaaagggtgaagggtcggtcgagaagccaggagggaggagattagggcactgtcggcccaagggttatcgctcagctgcagaggaggtggggcaggttggcaaagatgaggggagagagggagggagggaaggagacaggcagagacaaggacacaggccagcgggcaggaggggaaagagatcaggcagacacccatatccagacaaatgcagggaacagagaggagcaccctctctgctccgcaggggtccactgccctcacctcttcccggaactgggccgggcccagctcgtgcagtgag

SEQ ID NO: 13658 - DNA, 1243 bp, Artificial sequence
  DNA replication origin
tagggggtgtcttccagtggccccggactagggagcgatcggggaaggggtgctcgggggtccccgcgggaatcggagcgcagaggcggcggccgttcccgcgggctcgggctcctgcgtgggcgtcggtgagtgtgaggcggccggggaagagttccggacgagtgcggggcagcggagggcggcgcggggcaggcccggggaagcgggagccgtcccgttaggggggcctggacccctcggggagcgcacggtgccccggacccgggccttaaggagagtcccgggcggggagggagactcacctgaggcggccgagccgggccgggccgggccgcgccgggagctggaggcggccgatgttccccggcgcaggctgagccgactctgacagccgccgcctccggccccccgcacacaccccctccgggcctcacagcgcccccgcccgcccccgcccactgtctccgcccccgcccctccccgctctcccgggtggccacctcccctctctctccctcccttggagccgagacccggagaccccggggcccagacgcactccagtgccagacgccgaccgacgacagagcgcagtgacagacgcgacccaaagacctgcagcggcggagtagacacccacgtgacagacagacggacagaagcccgtggagacagacacgcgcagacggacgacctcatgcagtgacaggcacagacaaacgcagggacgactttcacagacggacggacacacttggacaccctgtcggtctcgctcgaggctggtgaagttagcgcaaggccaaggggtcatgcatccccggccacgacacagacgggtggcatgggaggagaggcatgtgggagtgtggcagagtaccgtccccttaggggtccaggtggcacgggtgcagaaaaggtgacgtgggacactcctggggatgaaaggacacctgtgggaatggagatgtaaaatgggatcgctagtggaaatgaggtgggagggcatggagacaggagacccctgggggaggaaggggtgacttgggacacctgagaaggcaggacagcgtggtagcacgcgcaaggctgctgggcgaggccgcactccgcggcggcagtggaaacttctggaacccccgcgggtgggtctgtgctggttccctgacgggtgacttcggactttcgtcaccagggtccggtcggggcatgacatcaccaggcctagcattcattggcc

SEQ ID NO: 13659 - DNA, 1423 bp, Artificial sequence
  DNA replication origin
tccgaggggcctgacccgcgcagattgccccccgccccgccctccaggagttcacccgtgtggacagggctgctgcagcggggtccccacgaccgaggtgcatgcggcaataccgcgcggcgcctgcttcctggaggcggccggctcaggagcccccgagaccccgcgtgggagagcggccggcgcaggccagcgtcgggcgtgcgtgcgcgcgcgcggcggtgcggggcgcggcgtggggtgggcgcgtgcgcacacgctcgctctaaccgccgcgcgccccgcagcgccccgcagcgcctcgggcacgcgggcgccgccgccagggaccgcgggcaccgggttgcggggcctcgcaggggttgaatccggagtcttgccagtccctgggccgcgcggttcccggctctccaagctgggcgggccccacgcccgctcgccccacgggaaccgggtcccgcaggcacggtcacccgcgctccgctcgctggagacggccgccaggtggcgcaaaaagcagccactcgggcctcggagactgggctgggttgggggtgttggggaggtgaacccctcgccatctgtgcccactgtctccggctttccccgccccaatctcaggcaaccccaaatcccctgcctggacaccgaggctccttgtatccggccttcagcgttctggccgcactagttgaaggctcctcactggccagaccatgtgccctagttgagatccctgaagagcagatgtaagggctgtgcatgggggaggggacaggagggtggatggtgggtgttgctgcggggggaatgaatctgaggcaggtttctaagcgtggtaattatgaattattaaaatgatggggccgcgtgtggcccctagtgcggtgcctgtaatcccagcactctgggaggccgagacaggaggatcgcttcagtccaggagttggagactagcctgggcaacatagcgagactcccttctccgcaaaaaaataaaatgatggaaacaaactgtgaacgagtgctctgaggcctgccccagtcctgaggctttagggatttttggccctgctagtgatgaaggcttgcccctgtcaccctccagacgaactgtgccacgcaggtgtcacctaacctctgtcgtcacgagtttctaggcctgtacaatgaagatagggagggcagggatagtttatcaccagggttatcatttcctggaactatccctcttttcaccttgagctctcagcaaccgttgtcaacacaggcacctaacctgtcaagccaggaggcgtttccctacatagtctagcatagtaaactccccaccctccacagctgtcactgcagggatgtccttgatttttcccatttcttctctcaccatttctgtttatccaggaatgagccttgcttctac

SEQ ID NO: 13660 - DNA, 2467 bp, Artificial sequence
  DNA replication origin
cattgtattggtgggagtgattgaagaactgacggggggaggagaagtcatggctgttgtgagagatactgtagaaatgtcagttgtaggagtcagtgtagtggtctcagggaatgtggctgtagagctgggaaaggtggtctgacctctgcctgtagttgatacagtggatgaaggtggttccatcattgtggatgtggtaaatgaggtggtggtagtgggtgatggggtggattcaactgttgtgtggagtgtactggtggtgcctcgaggtgaggagatactctctgtgtgagtggtcccagcactactttcagacatagaagaagagaatgaatgtgtcattggaaagcttgtcaggagggaccttgttggagtgttctcagtacttgtgaaagttggtcctccactgggagtggtagcagacgtcatgctaacagagattgagatttctgtattctggacagtgggagatgagggaatgacagttgttggccttgcagacatgttagagactgtgtacactgaggtgaggtctgtcatcataggtaatgaaccactgatgcccacggatgagggagtgatggttgttggttgtgaggtagggatacctgtactcacagtagatgagatcatggatgtagaagttaccatggtacccaacgtagtgggaactgaggtgatggcagttgtgtatgtgctggctgtggagtagacggttgaagaagtgaagctggtggtactatgtgaggtggtcttggtggtggtggttaccaagtttgtggtaggagttttggctgtttttgcagttgagaccaagggagaggtgggtggaagagaggtggcagtggatgatgtctctgtcatagtggtgggataggtgatttccgtcgtggagtttgtaccaggaccagtcggagaattaggataggtggtctcagatgtagtcatagatgaagcatttggagtggggagtgtggtcaccaagatagatggagggattgtgtttatggtgccactggtgactacttctgtgcttgggacaggtgtagaagacagaggcatactggtcagtgatgtaaaagaattggtggttgtgggaggagaggtcgtagttgtcatagaagtcactgtatttgtggaagtgactgatgaagtgatgggaggagaagtcatggctgttgtgagagattctgtggacatgtcagttgtaggagtcggtgtggtggtctcaggaaatgtggctgtagagctggtgaaggtggtctgacctgttcctgtagttgctgcagtggttgaaggtggttccatagttgtggaagttgtgaatgaggtggtggtagtgggtgccagggtggattcagctgttgtgtggagtgtactggtgctggctggaggtgaggagatactctctgtgtgagtggtcccagcactgctggcagacatggaagatgaaaatgaatatgttgctgggaaggtcgtcaggagggaacttgtaggagtgctgagtgtacttacaaaagttggtctcacattgggagtagtggcagaggtcatgctgacaagggatgaggtttctgtattctgaatgctgggggaagatggaatgacactcgtggacattgctgaggaactggaaaccgtgaatgttgatgtgaggtctgttgctgtagtcaggaaaccggtagagcccacagaatggtgggtgatagttgttggtgttgtgaaagggatgtctgtactcagagaagatggggtcatggttgtggaagtcaccatagtacctgaggtagggggaagtgaggagatggcagttgtggatgtgctgactgtggagtagatggttgatgaagagaagctgggagtactgtgggaggagatctcagtggtggtggttaccaagtttgtcataggagtcgtggctgtttctgtggttgggagagaggaagaggtgggtgggagagaagtctctgtggacaatgtacctgtcatacttgtggagtaggcgattttggtagtggagtctgtgacagtgctggtgggagaagtagtgtaggtggtctcagatgtaggtgtagacctgctgatggtagtggggagtgtggtcaccaaggtggataggggggtggtgtttgtgataccactggtgattgtttctgtgctcaggacaggtgtggaagataaaatggtcctagtgggtgatgacaatgtattagtggctgtgggctgggaggcggtcgttgtcatagaagtcactgtatttgtggaagtgattgaagaagtgatgggggaagtggaagtcactgctgttttgagagtagtaaatactggggttggggacgtggttgtatggatgcttccagtgggcaggggagtcctttctgtggttctagttgtagacgagattgtagtgtggaaggttgtgtctgtggctgacacagaggagggtgtcactgtcactatggga

SEQ ID NO: 13661 - DNA, 2456 bp, Artificial sequence
  DNA replication origin
atgaaggtgtttccatctttgtaaatgttgtgaatgacatggtggttgtaggtgatggggtggattcagctgttgtgtggagtgtactggtgatggctgggggtgaggagatactctgggtgtgagtggtccctacactgctggcagacatggaagaggaaaatgaatgtgtcactggaaagcttgtcaggagggaccttgttggagtgttctcagtacttgtgaaagttggtcctccactgggagtggtagcagacatcatgctaacaaagattgaggtttctgtattctggacagtgggagatgaaggaatgacacttgttggccttgcagacatgctggagactgtgtacactgaggtgaggtctgtcatcataggtaatgaaccactgatgcccacggatgagggagtaatagttgttggttgtgaggtagggatacctgtactcacagtagatgggatcatggatgtagaagtcaccatggtacccaaggtagtgggaactgaggtgatggcagtggtgggtgtgctggctgtggagtagatggttgaagaagtgaagctggtggtactatgtgaggtggtcttggtggtggtggttaccaagtttgtggtaggagttttggctgtttctgcggttgagaccaaggaagaggtgggtggaagagaggtggcagtagatgatgtctctgtcatagtggtgggataggtgatttcagttgtggactctgtgacagtgcttgtgggagaactagggtaggcggtctcagatgtaagtgtagacctggtgatggtaatggggagtgtagtcaccaacgtggatacaggattggtgtttgtggtatgactggtggtcacctctgtgcttgggacaggtgtagaagataaaatgctactggtgagtggtgataacgtattagtggctgtgggccaagaggtcgtagttctcatagaagtcattgtatcggtgggagtgattgaagaagtgatggggggagtagaagtcatggctgttgtgagagattctgtagaaaagtcagttgtaggagtcagtgtggtggtctcaaggaatgtggctgtagagctggggaaggtggtctgacctgtgcctgtagtcgctacagtggttgaaggtggttccatcgttggggatgtggtgaatgaggtggtggtagtgggtgccagggcggattcagctgttgtgtggattgtattggtgctggctggaagtgaggaaatagtctctgtgtgagtggtccctgcactgctggcagacatggaagatgaaaatgaatatgtacttgggaaggtcgtcaggagggaacttgttagagtgctgtcagtacttgtgatagttggtctcaaactgggagtggtggcagaggtcatgctgacaagggatgaggtttctgtattctggatgctgggggaagatggaatgacacttgtggacattgctgaggaactggaaacagtgaatgttgatgtgaggtctgttgctgtagtcaggaaaccggtagagcccacagaagggtaggtgatagttgttggtgttgtggaaggggtgtctgtactcagagaagatggggtcatggttgtggaagttaccatggtacctgaggtaggggaagctgaggagatggcagttgtggatgtgctgactgtggagtagatggttgaagaagtgaagctgggggtactaagggaggtggtattaggggtggtggttatcaaggttgtggtaggagtcatcgtggctgtttctgtggttgggagagaggaagaggtgggtgggagagtagtggcagtggacaatgtacctgttatacttgtggaataggtgatttcagtcgtggagtctgagacaatgctggtgggagaagtagggtaggtggtctcagatgtaggtgtagatctggtgatggtagtgaggagtgtagtcaccaaggtggatagaggggtggtgtttgtggtatgactggtgatcatttctgtgcttgggacaggtgtagaagataaaatgctactggtgagtggtgataatgtattagtggctgtgggccaataggttgtagttctcatagaagtcattgtattggtgggagtgattgaagaactgacggggggaggagaagtcatggctgttgtgagagatactgtagaaatgtcagttgtaggagtcagtgtagtggtctcagggaatgtggctgtagagctgggaaaggtggtctgacctctgcctgtagttgatacagtggatgaaggtggttccatcattgtggatgtggtaaatgaggtggtggtagtgggtgatggggtggattcaactgttgtgtggagtgtactggtggtgcctcgaggtgaggagatactctctgtgtgagtggtcccagcactactttcagacatagaagaagagaatgaatgtgtcattggaaagcttgtcaggagggac

SEQ ID NO: 13662 - DNA, 1059 bp, Artificial sequence
  DNA replication origin
gtgaatctgggagtactgtgtgagggggtctcggtagtggtgattgaagaagtgaatctgggagtactgtgtgagggggtctcggtggttgcgattgaagaagtgaagctaggagtactgtgtgaggtgatcttggtggtcgtggttaccaagtttgttgttggaactgtggctgttactgtggtgaggagagaggaagaggtgggtcgaagagaggtcacagtggacaatgtacctgtcatattggtggaataggtggttctggtcgtggaatctgtgagagcactagtaagagaagtagggtaggtggtctcagatgtaggtgtagaactggtgtcggaattggagaatgtggtcaccaatgtagatagaggggtggtgtttgtggtaccactggtgatcgcttctgtacttgggacaggcgtagaagatgaaacgctactggtaaatgatggtaacgtattagtggctgtgggccctagaggggtggtagttgtcatcgaagtcaccgtatatgtggaggtgattgaagaagtgatggggggagtagaactcacggctgttttgaaagatcctgtggaaatgtcagaggtaggagtcagtgtggtggtcttaggggatgtggctgttgaactggtgaatgtagtctgacctgtgcctgtagttgctacagtggatgaaggtgtttccatctttgtaaatgttgtgaatgacatggtggttgtaggtgatggggtggattcagctgttgtgtggagtgtactggtgatggctgggggtgaggagatactctgggtgtgagtggtccctacactgctggcagacatggaagaggaaaatgaatgtgtcactggaaagcttgtcaggagggaccttgttggagtgttctcagtacttgtgaaagttggtcctccactgggagtggtagcagacatcatgctaacaaagattgaggtttctgtattctggacagtgggagatgaaggaatgacacttgttggccttgcagacatgctggagactgtgtacactgaggtgaggtctgtcatcataggtaat

SEQ ID NO: 13663 - DNA, 3248 bp, Artificial sequence
  DNA replication origin
cagtgacacaggaattttgcaggggaggaaggaggggaacagagaggcagaaggtccaacctgcagtggtggtcaacgtggactgtgtggtcatctgagaagtgatgcgagttgtcctgcgtgatgtaagggtggtaggagtctgggtagtggccactggtgtctctgaagtcctagtggtgggtggggaggggtgtgttgacttgcttgaagtcctcaggatggtcgggaggctactgcttggtttcatggtgagcgggatggtagagacgccaggaagaggtagggggatcacagaactgttgctcagccaggtctcactggtgggcagtcgagtacttgtgaaaactgtgtttgtgggtacagtcccagtgccagtggaactggaagcattgggtgagatgctggactcactttctggcatcatggaagaagtgtccatatatgtagtaagagtagtttggatactgatggaggtaggacaggtgaccatttcggtagtaaagggaaagactgttaatggggtggtgggaggagaagtagcttcagtgctgggatccatttcaacacatggatcagtgggggaggcagggactatggtaattgttatagttcctggacagggtgtggtggagggaagggaaatataagaaaagggggttatttcagtgagagctgtggtcagagaggagctggttgaagaagtgctggtagttgcagaggaagagagactaggaaagcctgtgatagaagcggagcccacattttctgtactgaaaatgtatggtgaagaaggaacagaatgaatggtagtggaaaacactggagttatgctggcagaagatggagaagaggacatgataatagtgggtgttgaggaccagatgatggtactaaaagaagtcaagattgcatttgtagacgtacttcccctagtgaaagattctgtagtgaactcacttgtagatgtgagtgaagtttgcaatgagggagtagaaggagttgtttgaagggtggaggaatgtgtgctaggaataggaacctgtgatgttgacacgatcgtgctcaaggctgttgatggagtaagagtatgaagagtggacgtggaggaatccgtacttccaaaggtgacagtagtaggtgcaggagatgtttgggtcccagtggctgacgtcagtacaggaggggtctgtgttggggtttcaggtataacaacaatacttgtgctaaaggaactgattggggtgttctcagtaattctgagggtcattctcacagtggacatggtgggagaggtggtgcccacaagggatgaggtttctgtactttggatggagggagaagatgaaatgatgtgtgttcgagttggtaaggtactgatatcagtgggtatagagggaaagtctgtggttgtagtcaatgaagtgctggtgcccacagacgaaggggtgagagttcgtaggcttgtggtcgggatgtctgtactcagagaagatggggttacaggtgtgggagtcaccgcagtctctgaggtagtaaaatgtgaggtgatggcagttgtggatgtgctgactgtggagtagatggttgaagaactgaggctgggagtactctctgaggtggtctcagtggtggtgattgaagaagtgaagccaggagtactgtgtgaggtagtctcagtggtggtgattgaagaagtgaggccaggagtaatgtgtgaggtggtcttggtggtggtgacccacgaagtgaggccaggagtactgtgtaagggggtctcagtggtggtgattgaagaactgaagctgggagtactgtgtgaggtggtctcggtggtggtgatcgaagaagtgaagctggtagtactgtgagagttggtctcggtggtggtgatcgaagaagtgaagctgcgagtattgtgtgaggtggtctcggtggtggtgatcgaagaagtgaagctgtgagcactgtgtgaggtggtctccgtggtggtgatcgaagaagtgaagctgggagtactgtgtgaggtggtcttggtggtggtgattaaagaagtggagctgggagtactgtgtgagggggtctcactggtggtgattgaagaagtgaagctgggagtatcatgtgaggtggtctcagtggtggtgatcgaagaagtgaagctgggagtactgtgggatgtagtctcagtggtggtgattgaagaagtgaagccgggagtactgtgggatgtggtctcagtggtggtgatcgaagaactgaagctgggagtactgcttgagggggtctcggtggtggtgattgaggtaatgtagctgggagtactgtgtgaggtggtctcagtgatggtatttgaagaagtgaagctgggagtactgtaggatgtggtctcggtggtcccccacctgtgtgaggtggtctccgtggtggtgatcaaagaagtgaagctgggagtactgtgggatgtggtctcggtggtggtgattgaagaagtgaagttgggagtactgtgtgtggcgttctcagtggtggtgatcgaagaagtgaagctgggagtactgtgtgagggcatctcagaggtggtgattgaggaagtgaagctgggagtactgtgtgaggtggtctcagtggtggtgattgaagaagtgaagctgagagtactgtgtgagggggtctcggtggtggtgattgaggtagtgtagctgagagtactgtgtgaggtgatctcggtgatggtgatcaatgaagtgaagctgggagtactgtgggatgtggtctcggtggtgatcgaagaagtgaagctgggagtactatgggatgtggtctcggtggttgtgatcgaagaagtcaagctgggagtattgtgggatgtggtctcagtggtggtgatggaagaagtgaagctgggagtactgtgtgaggtggtggtggttgtggtgatcaaagaagtgtagctgggagtactgtgtgaggtggtcttggtggtggtgattgaagaagtgaggctgggagtattgtgggatgtggtctcggtggtggtgatcgaagaagtgaagctgggagagctgtgtgaggtggtcttggtattggtgattgaagaagtgaatctgggagtactgtgtgagggggtctcggtagtggtgattgaagaagtgaatctgggagtactgtgtgagggggtctcggtggttgcgattgaagaagtgaagctaggagtactgtgtgaggtgatcttggtggtcgtggtt

SEQ ID NO: 13664 - DNA, 1591 bp, Artificial sequence
  DNA replication origin
ccatttcctgtcctggtcccaggacctaggtggggccgccgcgcggtcagacagagccggcccgcctgggaccccttggctgccctcgccccccggccccgccccccgcacgctcaccggcctcggcgctggccgccccaccatccggagcgcaccgcccggacgcccagcgccagcagcagcagcaccagcagcgcggcgccggccgtcaggcccccgaccagcgccctccagtggacggccacctcgcagcgcgggccagagaaccagtgcgtgtcggtggagtagcagctgcgggagatcgcagggtcagaccctcttcacctccgggctcggggtccacccgtgcacctgggccccgcgggggcgggtgagggggcggggctccagcctagggcagcggggggttccaccctagacaaggggctgggaatccaccctagaacgaggggccggggctctaccctaggtgagggggcgggattccaccttagatcaagtgggcagggctccaccctagaaggagggggcggggttcaaccctagaacgaggaggcggggccccaccctagaatgagtgggcggggttctctcccagaattaggggacaggactcaaccccatcaaaggagcagagctccagggcagggctccactgtagggcaacggggatgggcttggagcggcactctggggacgaggctccactgtaggcccagggcgcggagccggggcggagcatggggcagggcttcatcctagaatgagtgggaggggctcggctgatgccgatggtgagcggggccttaccgacacgtgggaccgctcgtctccagaacgcactggccctggtgacagtcgatggcgttgtccacccccgacgtgcatttggtgacacagcggagccgggtggcctccaccaaggggaagtagaactcttcatagcccgtgggagcggcgcggcggcagatggctgggggttggggagggggatgcacagagacaaggacctcatccattctattcaggggcctgataacggtgcctctgaatatgcgcgaggaggattccatttccgaggtgggatgctgtggggtagaccctgggattcgatgaggggaggccacccgcagcaccctcaccctctcctcgtggcccctgctgtcctcaggtggaagccactaaccagcgccaggaagggccgccctgggccacatgacttgcctcccccaaaggtctctccctgcccacaggcttcaatgggcaaatgtccctggtagcccggatcatagccgcgggagaccactcagccctttaccccacccttacctgccggggtcagctctgtcttgctgttgttgttcaccttgatggagtcaggcttaaaacacagggctgcggaaacacaggcacagatggaatgggcggggcagatcaaggggttaaggtcaaggggttagcgccaggaggcaggataggcacagggagggcagtgagggctctctccgtctgggagagccctctcccagacggagagagccacaggcgaagactcctgttgcctgcctcatctcccctgaataatccgagg

SEQ ID NO: 13665 - DNA, 997 bp, Artificial sequence
  DNA replication origin
agggcaggagatgggatggggctgcaggctgcctccaggttcaaagtaagaaacaggcagtagggaattgagagaaaataagaaccagggccagagaccaggtgaaggacgtgaggattggaggatccgagagaggcaatggcaacacgagggctgagacgggagggcagagtaggaccgagaattgaccaagtctatgtggttttcacaacaacggcgtgagctatcatacaggaatgctgtacccgttttgcaggtgaggaaactgaggctcgttactgacttgcccaagattccacagtggaagagcctggacgtgaactgcgtctccaggtgggtttcagccaagttggaaggagaaggatgggatttgggggaacagtctcatcttgcccaagaacagcaggagcctgggctgcccgcgtcctggggccacctcttgaaatggacgcaatgcagacccttgtgtccggggcagggcggagggggtggtgaaggggccccgcagggctcacactgaggacgaggtcatctcgggtctcttgatgtgcacctgtcagagtcacagtgagggacgggaacgcggagccactggtttgggctgacagggaggtcactgctgatccgagcccagccccctccctgccctggtgggggtcggggagggattctggaatggaggctgggagagttccttggggtccccctctttagcccctcaccttcatagtggtgtccacgttctccaaggccacatagaaatttgtatccttgtctagagagagagaggagcggagaaagagaaggggagagggaggggacggaagggagagggggacggagtaaatgcgaggaaggcagggagggcgtctgtcctcgcagtggtgcccaggaaagcctctgcctgcttccccaggaggcaggactcacctgttccgtcgtcctcgaaaccccagtttgaaaaagtgcccacgacttcctcatcccaggtctcgaa

SEQ ID NO: 13666 - DNA, 1393 bp, Artificial sequence
  DNA replication origin
tatcaaggtcagggcagtggtgggggtggggagagcacagatgacaaagcccaaggggcccctgcccagagtcactccccaataaaatgggtccccccaacctctgtgttttctgtgaggaacctcatggcccccaagggctgcccacagaccccctcctttgtccccaggagacacaggtgctcccaggatcctcctacagtgccacctctggaaatccctgttctctgatcaaacagagaccactgagggggtgaaaaggagacagacagagagctgctgctttttacaataaactctgtattgtgcacatgaagacctggagatgtgccgacttcctgtccccaaagccaatcttccccgccaaggcgactgaggatttcaagggctcagagttactgcaggaatccaggtgacaccaggaagagaagggggaggaggggaatcggaggggatgggtttaaaaggcagaggggaggcaagaagggagggggatcgaaggaaatgaggaggagggagactgagggggctgcctttccttggggactggggaactcatgccctgcccccacccgcagggctccaggggtgagagaaaggggtggagaataaagaattgggcagcagggtgatggggggaacagcagctggggtatttaggtcagggggagtcgggggcagaaccgatgaatggacgggctcagaagggagaagatacaaggaatgagagcaagagaaacggggaactgggcaacggggtgacggggagaacagcacctgggtatcctaagacacagaggctatctataccttgctagggaccaggatgtgaggagaggagggaggatttagggctgggggactggggtgcaggatggatgaaggaacggggtcaaaaggggaggacgtctaaggaatgagagcaagagatgcagcagggagttagatcaggagagggcaggagatgggatggggctgcaggctgcctccaggttcaaagtaagaaacaggcagtagggaattgagagaaaataagaaccagggccagagaccaggtgaaggacgtgaggattggaggatccgagagaggcaatggcaacacgagggctgagacgggagggcagagtaggaccgagaattgaccaagtctatgtggttttcacaacaacggcgtgagctatcatacaggaatgctgtacccgttttgcaggtgaggaaactgaggctcgttactgacttgcccaagattccacagtggaagagcctggacgtgaactgcgtctccaggtgggtttcagccaagttggaaggagaaggatgggatttgggggaacagtctcatcttgcccaagaacagcaggagcctgggctgcccgcgtcctggggccacctc

SEQ ID NO: 13667 - DNA, 12409 bp, Artificial sequence
  DNA replication origin
ctgggctgctgtgggaagctgtagattcctgactgacgcctggcatggtggtactgctagggaatgctgttgtgtgcattgagcctggtcggctgtgggaggtggtggattcttcactgacgcctgagcttgtcgtgctggcaggtgaaagtgttgtgtccggtgatctggggctactgtagaaggtggtagatttctcactcaggcctgctgttgtggtactgccaggtaacgctgttgtttccgttgagcctgaactgatgggtgacgttgtaggttctccaacaagaactgaggttgcagagcgggtagggaagagtgctgttccagttgcacctgggctgctgtggactgttgttgattcctcactacggcccaaggttgtggaactggcagaaaagtgtgttgttggagttgagctcgggcggctgtggtaggttgtggatacttcaacagggactgctgtggtgctgggaggtgaaggtgttgtgtcacttgagcttggccagctctggaaagtggtagattcttcctgaaggccagtgcttgtggagctggcaggggtcagtgttgtgtgtagcgagccagtgctgctgtgggtgggtgtagatgcctccacgaggcctgaggttatggtgtcgtcaggtaagagtgtggtttcagtgtcgcctgggctgctgtggaaggttgtagattgttgaccaagggatgaggctgtggtactgccaggggacagtgttgcctctgttgagccttggctgctgtgggaagttgtaggttcctgactgaggcctgaggtggtggtgctgtcagggaacgctgttgtgtgcgttgagcctggttgactgtgggatgtgctggattcttcgctgacgcctgagcttgttgtggttgcaggtgagagtgttgcatctggtgatctggggctagtgtagaaggtggttgatttctcactgaggcttggtgttgtgggactgccgggtaaagttgttgtttcggttgagcttggactgaggcgtgagggtgtggattctccaacgaggccagaggtggtggagcgggcaggtgagagttttgttccagttgagcctgagctgctgggaaaggtagttgattcctcaccgaggtctgcggttgtgagtgtggcaggtaaccctgtttgggtggaggctgggctgccggggaaggctgtagattcttcagtgaggcccgaggtggtgctgtcctcagtgaacagtgttgtgtgagttgaggctggccggctgtggaaggttgtaggctcttcacgacgaactgaggttgtggtgctgcgagggaacactgtggtttcagttgagcctgggctgctgctgtagacggtggtagattcctcactgaggcctggcgtggtggtgctggcaggtgacactgttgagtgagtagaacctggttggctacgggaggtggtggattcttcaccgacgcctaggcttgtcatactggcaggtgagagtgttgtggttggtgatctggggctgctgtagaaggtggtagatgcctcactgaggcctggtgttgtggtactgccaggtaacgttgttatttcagttgagcctggactgatgcgtgaggttgtagattctccacgacctgaggttgtggagtgggcagatgagggtgttgttccacttgcatctgggctgctgtggaatattgttgatttctcactgtggcccgaagttgtggagctggcagggaagtgtgttgttggagtcgagcctgggctgcggtggtaggttgtagattcttcaacaggggctgttgcggtgctaggaggtgaaggcgtcgtgtgagttgaggctgggtgggtctggaaggcggtagattctccctgaagtccagggcttgtggagctggcaggggacagtgttgtgcgtggtgagccagtgctgctgtggacgcgtgtagatgcttcaacgatgcctgagcttgtggtgctgtcagggaagagtgttgtgtgagtggagcctgggctgctgtggaaggttgtagattcttgaccaaaggataaggctgtggtactgccaggggacagtgctgtgtcagttgaacctgagctgctgtgggaagttgttgattcctgactggagcctgaggtggtggtgctggcaggtaacagtgttgtatccgttgagcctgggctgctgtgggaagttgtagaatgccgactgaggcctggcgtggtggtgctgtcagggaatgctgttgtgtgcgttgagcctggtcggctgtgggaggtggtggattcttcactgacgcctgagcttgtcgtgctggcaggtgagagtgttgtggctggtgatctggggctactgtggaaagtggtagatttctcactgaggcctggcgttgtggtactgccgggtaacgctgtcgtttccattgagcctgaactgatgggtgaggtcgtagattctccaagaagaactgaggttgtggagcgggcaggtaggactattgttcccgttgcgtcttggctgctgtgggatgctgttgattcctcactacggcctgaggttgtggagctgtcagggaagtgtgttgttgcagttgagcccgggctgctgtggtagctggtaggttcttcaacaagggcagatgtggtgctaggagctgaagatattgtgtgtgttgtgctgctgtgggaagttgttgattcttcaccacggcctgaagttgtgtcgctttcagggaagtgcattgtttgagttgagcccgggctgctgtggtaggtcgtagattcttcaacgaggcctgaggttgtggagcgggcaggcgagggtgttgttgcagttgcaactgggctgctgtggactgttgtcgattcctcactacggcccaaggttgtggagctggcagaaaagtgggttgttggagttgagctcgggctgccgtgggaggttgtagatagctcaacaaaggctgatgtggtagtaggaggtgcaggggtagtgtccttcgagttaggccagctctggaaggtggtagattctccctgacgggttgtagagccggcaggggacagtgttgtgtgtggcgatccagtgctgctgtggacgggcgtagatgcttcaaggaggcctgaggctgtggtgttgtcaggtaagagtgttgtttcagtggagcctgggccgctgtggaaggtagtagattctggaccaagggatgatgctgtggtactgccaggggacagtgttgtgtctgtggagcctgggctgctgtgggaagctgtagattcctgactgacgcctggcatggtggtactgccagggaatgctgttgtgtgcgttgagcctggtcggctgtgggaggtggtggattcttcactgacgcctgagcttgtcgtgctggcaggtgagagtgttgtgtccggtgatctggggctactgtagaaggtggtagatttctcactcaggcctgctgttgtggtactgccaggtaacgctgttgtttccgttgagcctgaactgatgggtgacgttgtaggttctccaacaagaactgaggttgcagagcgggtagggaagagtgctgttccagttgcacctgggctgctgtggactgttgttgattcctcactacggcccaaggttgtggaactggcagaaaagtgtgttgttggagttgagctcgggcggctgtggtaggttgtggatacttcaacaggggctgctgtggtgccgggaggtgaaggtgttgtgtcacttgagcttggccagctctggaaagtggtagattcttcctgaaggccagcgcttgtggagctggcaggggtcagtgttgtgtgtagcgagccagtgctgctgtgggtgggtgtagatgcctccacgaggcctgaggttatggtgtcgtcaggtaagagtgtggtttcagtgtcgcctgggctgctgtggaaggttgtagattgttgaccaagggatgaggctgtggtactgccaggggacagtgttgcctctgttgagccttggctgctgtgggaagctgtaggttcctgactgaggcctgaggtggtggtgctgtcagggaacgctgttgtgtgcgttgagcctggttgactgtgggatgtgctggattcttcactgacgcctgagcttgttgtggttgcaggtgagagtgttgcatctggtgatctggggctagtgtagaaggtggttgatttctcactgaggcttggtgttgtgggactgccgggtaaagttgttgtttcggttgagcttggactgaggcgtgagggtgtggattctccaacgaggccagaggtggtggagcgggcaggtgagagtgttgttccagttgagcctgagctgctgggaaaggtagttgattcctcaccgaggtctgcggttgtgagtgtggcaggtaaccctgtttgggtggaggctgggctgccggggaaggctgtagattcttcagtgaggcccgaggtggtgctgtcctcagtgaacagtgttgtgtgagttgaggctggccggctgtggaaggttgtaggctcttcaccacgaactgaggttgtggtgctgcgagggaacactgtggtttcagttgagcctgggctgctgctgtagacggtggtagattcctcactgaggcctggcgtggtggtgctggcaggtgacactgttgagtgagtagaacctggttggctacgggaggtggtggattcttcaccgacgcctaggcttgtcatactggcaggtgagagtgttgtggttggtgatctggggctgctgtagaaggtggtagatgcctcactgaggcctggtgttgtggtactgccaggtaacgttgttatttcagttgagcctggactgatgcgtgaggttgtagattctccacgacctgaggttgtggagtgggcagatgagggtgttgttccacttgcatctgggctgctgtggaatattgttgatttctcactgtggcccgaagttgtggagctggcagggaagtgtgttgttggagtcgagcctgggctgcggtggtaggttgtagattcttcaacaggggctgttgcggtgctaggaggtgaaggcgtcgtgtgagttgaggctgggtgggtctggaaggtggtagattctccctgaagtccagggcttgtggagctggcaggggacagtgttgtgcgtggtgagccagtgctgctgtggacgcgtgtagatgcttcaacgatgcctgagcttgtggtgctgtcagggaagagtgttgtgtgagtggagcctgggctgctgtggaaggttgtagattcttgaccaaaggataaggctgtggtactgccaggggacagtgctgtgtcagttgaacctgggctgctgtgggaagttgttgattcctgactggggcctgaggtggtggtgctggcaggtaacagtgttgtatccgttgagcctgggctgctgtgggaagttgtagaatgccgactgaggcctggcgtggtggtgctgtcagggaatgctgttgtgtgcgttgagcctggttgactgtgggatgtgctggattcttcactgacgcctgagcttgttgtggttgcaggtgagagtgttgcatctggtgatctggggctagtgtagaaggtggttgatttctcactgaggcttggtgttgtgggactgccgggtaaagttgttgtttcggttgagcttggactgaggcgtgagggtgtggattctccaacgaggccagaggtggtggagcgggcaggtgagagtgttgttccagttgagcctgagctgctgggaaaggtagttgattcctcaccgaggtctgcggttgtgagtgtggcaggtaaccctgtttgggtggaggctgggctgccggggaaggctgtagattcttcagtgaggcccgaggtggtgctgtcctcagtgaacagtgttgtgtgagttgaggctggccggctgtggaaggttgtaggctcttcaccacgaactgaggttgtgggggtgcgagggaacactgtggtttcagttgagcctgggctgctgctgtagacggtggtagattcctcactgaggcctggcgtggtggtgctggcaggtgacactgttgagtgagtagaacctggttggctacgggaggtggtggattcttcaccgacgcctaggcttgtcatactggcaggtgagagtgttgtggttggtgatctggggctgctgtagaaggtggtagatgcctcactgaggcctggtgttgtggtactgccaggtaacgttgttatttcagttgagcctggactgatgcgtgaggttgtagattctccacgacctgaggttgtggagtgggcagatgagggtgttgttccacttgcatctgggctgctgtggaatattgttgatttctcactgtggcccgaagttgtggagctggcagggaagtgtgttgttggagtcgagcctgggctgcggtggtaggttgtagattcttcaacaggggctgttgcggtgctaggaggtgaaggcgtcgtgtgagttgaggctgggtgggtctggaaggcggtagattctccctgaagtccagggcttgtggagctggcaggggacagtgttgtgcgtggtgagccagtgctgctgtggacgcgtgtagatgcttcaacgatgcctgagcttgtggtgctgtcagggaagagcgttgtgtgagtggagcctgggctgctgtggaaggttgtagattcttgaccaaaggataaggctgtggtactgccaggggacagtgctgtgtcagttgaacctgggctgctgtgggaagttgttgattcctgactggggcctgaggtggtggtgctggcaggtaacagtgttgtatccgttgagcctgggctgctgtgggaagttgtagaatgccgactgaggcctggcgtggtggtgctgtcagggaatgctgttgtgtgcgttgagcctggtcggctgtgggaggtggtggattcttcactgacgcctgagcttgtcgtgctggcaggtgagagtgttgtggctggtgatctggggctactgtggaaagtggtagatttctcactgaggcctggcgttgtggtactgccgggtaacgctgtcgtttccattgagcctgaactgatgggtgaggtcgtagattctccaagaagaactgaggttgtggagcgggcaggtaggactattgttcccgttgcgtcttggctgctgtgggatgctgttgattcctcactacggcctgaggttgtggagctgtcagggaagtgtgttgttgcagttgagcccgggctgctgtggtagctggtaggttcttcaacaagggcagatgtggtgctaggaggtgaagatattgtgtgtgttgtgctgctgtgggaagttcttgattcttcactacgacctgaagctgtggagctttcagggaagtgcattgtttgagttgagcccgggctgctgtggtacgccgtagattcttcaacgaggcctgaggttgtggagcgggcaggcgagggtgttgttgcagttgcaactgggctgctgtggactgttgtcgattcctcactacggcccaaggttgtggagctggcagaaaagtgggttgttggagttgagctcgggctgccgtgggaggttgtagatagctcaacaaaggctgatgtggtagtaggaggtgcaggcatagtgtcctttgagcttggccagctctggaaggtggtagattctccctgacgtgttgtagagccggcaggggacagtgttgtgtgtggcgatccagtgctgctgtggacgggcgtagatgcttcaaggaggcctgaggctgtggtgttgtcaggtaagagtgttgtttcagtggagcctgggctgctgtggaaagtagtagattctggaccaagggatgatgctgtggtactgccaggggacaatgttgtgtctgtggagcctgggctgctgtgggaagctgtagattcctgactgacgcctggcatggtggtactgccagggaatgctgttgtgtgcgttgagcctggtcggctgtgggaggtggtggattcttcactgacgcctgagcttgtcgtgctggcaggtgagagtgttgtgtccggtgatctggggctactgtagaaggtggtagatttctcactcaggcctgctgttgtggtactgccaggtaacgctgttgtttccgttgagcctgaactgatgggtgacgttgtaggttctccaacaagaactgaggttgcagagcgggtagggaagagtgctgttccagttgcacctgggctgctgtggactgttgttgattcctcactacggcccaaggttgtggaactggcagaaaagtgtgttgttggagttgagctcgggcggctgtggtaggttgtggatacttcaacaggggctgctgtggtgccgggaggtgaaggtgttgtgtcacttgagcttggccagctctggaaagtggtagattcttcctgaaggccagcgcttgtggagctggcaggggtcagtgttgtgtgtagcgagccagtgctgctgtgggtgggtgtagatgcctccacgaggcctgaggttatggtgtcgtcaggtaagagtgtggtttcagtgtcgcctgggctgctgtggaaggttgtagattgttgaccaagggatgaggctgtggtactgccaggggacagtgttgcctctgttgagccttggctgctgtgggaagttgtaggttcctgactgaggtctgaggtggtggtgctgtcagggaatgctgttgtgtgcgttgagcctggttgactgtgggatgtgctggattcttcgctgacgcctgagcttgttgtggttgcaggtgagagtgttgcatctggtgatctggggctagtgtagaaggtggttgatttctcactgaggcttggtgttgtgggactgccaggtaaagttgttgtttcggttgagcttggactgaggcgtgagggtgtggattctccaacgaggccagaggtggtggagcgggcaggtgagagttttgttccagttgagcctgagctgctgggaaaggtagttgattcctcaccgaggtctgcggttgtgagtgtggcaggtaaccctgtttgggtggaggctgggctgccggggaaggctgtagattcttcagtgaggcccgaggtggtgctgtcctcagtgaacagtgttgtgtgagttgaggctggccggctgtggaaggttgtaggctcttcaccatgaactgaggttgtggtgctgtgagggaacactgtggtttcagttgagcctcggctgctgctgtagacggtggtagattcctcactgaggcctggcgtggtggtgctggcaggtgacactgttgagtgagtagaacctggttggctacgggaggtggtggattcttcaccgacgcccaggcttgtcatgctggcaggtgagagtgttgtggttggtgatctggggctgctgtagaaggtggtagatgcctcactgaggcctggtgttgtggtactgccaggtaacgttgttatttcagttgagcctggactgatgcgtgaggttgtagattctccacgacctgaggttgtggagtgggcagatgagggtgttgttccacttgcatctgggctgctgtggaatattgttgatttctcactgtggcccgaagttgtggagctggcagggaagtgtgttgttggagtcgagcctgggctgcggtggtaggttgtagattcttcaacaggggctgttgcggtgctaggaggtgaaggcgttgtgtgagttgaggctgggtgggtctggaaggcagtagattctccctgaagtccagggcttgtggagctggcaggggacagtgttgtgcgtggtgagccagtgctgctgtggacgcgtgtagatgcttcaacgatgcctgagcttgtggtgctgtcagggaagagtgttgtgtgagtggagcctgggttgctgtggaaggttgtagattcttgaccaaaggataaggctgtggtactgccaggggacagtgctgtgtcagttgaacctgagctgctgtgggaagttgttgattcctgactggggcctgaggtggtggtgctggcaggtaacagtgttgtatccgttgagcctgggctgctgtgggaagttgtagaatgccgactgaggcctggcgtggtggtgctgtcagggaatgctgttgtgtgcgttgagcctggtcggctgcgggaggtggtggattcttcactgacgcctgagcttgtcgtgctggcaggtgagagtgttgtggctggtgatctggggctactatggaaagtggtagatctctcactgaggcctggcgttgtggtactgccgggtaacgctgtcgtttccattgagcctgaactgatgggtgaggtcgtagattctccaagaagaactgaggttgtggagcgggcaggtaggactattgttcccgttgcgtcttggctgctgtgcgatgctgttgattcctcactacggcctgaggttgtggagctgtcagggaagtgtgttgttgcagttgagcccgggctgctgtggtagctggtaggttcttcaacaagggcagatgtggtgctaggagctgaagatattgtgtgtgttgtgctgctgtgggaagttgttgattcttcaccacggcctgaagttgtgtcgctttcagggaagtgcattgtttgagttgagcccgggctgctgtggtaggtcgtagattcttcaacgaggcctgaggttgtggagcgggcagaaatgtgggttgttggaattgagctcgggctgccgtgggaggttgtagatggctcaacaaaggctgatgtggtagtaggaggtgcaggcctagtgtcctttgagcttggccagctatggaatgtggtagattctccctgacgggttgtagagccggcaggggacagtgttgtgtgtggcgatctggtgctgctgtggacgggcatagatgcttcaaggagtcctgaggctgtggtgttgtcaggtaagagtgttgtttcagtggagcctgggcggctgtggaaggtagtatattctggaccaagggatgatgctgtggtactgccaggggacaatgttgtgtctgtggggcctgggctgctgtgggaagctgtagattcctgactgaggcctggcatggtggtactgccagggaatgctgttgtgtgtgttgagcctggtcggctgtgggaggtggtggattcttcactgacgcctgagcttgtcatgctggcaggtaagtgtgttgtgtctggtgatctggggctactgtagaaagtggtagatttctcactgaggcctggttttgtggtactgccgggtaacgctgtggtttccattgagcctgaactgatgggtgagggcgtcgagtctccaacaagaactgagggtgtagagccggcaggtaagactgttgttgccattgcatctgggctgctgtgggatgcttttgattcctcactacggcctgagattgtggagctatcacggaagtgtgttgtttcagttgagcccaggctgctgtggtagcttgtatgtgctagggcagctgtggtgctaggagttgaagattttgtgtgtgttgtgctgccgtggaaagttgctgattcttcactatggcctgaagttgtggagctttcagggaagtgcattgtttgagttgagcccgggctcctgtggtaggctgtagattcttcaacatggcctgaggtcgcggagcgggcaggtgggggtgttgttgcagttgcaactgggctgctgtggactggtgtcgattcctcactatggcccaaggttgtggagctggcagaaaagtgggttgttggagttgagctcgggctgctgtgataagttgtagatagtttaacaaaggctgatgtggtaccagaaggtgcaggcgaagtgtcctttgagcttggccagctctggaaggtggtaggttctccctcatgggttgtagagctggaaggggacagtgttgtgtgtggcgatccagtgctgctgtggacgggcgtagatgcttcaaggaggcctgaggttgtggtgttgtcaggtaagcgtgttgttttagtgtagcctgggctgctgtggaaggtagtagattctggaccaagggatgatggtgtggtagtgccaggggacagtgttgtgtctgtggagccggggatgctgtgggaagctgtagattcctgactgacgcctggcatggtggtactgtcagggaacgctattgtgtgcgttgggcctggtcggctgtgggaggtggttgatttttcactgacgcctgagcttgtcgtgcgggcaggtgagagtgttctgtctggtgatctggggctactgtagaaggtggtagatttctcactcaggcctgctgttgtggtactgccaggtaacgctgttgtttccattgaggctga

SEQ ID NO: 13668 - DNA, 2926 bp, Artificial sequence
  DNA replication origin
aaaaaaaaaaaaaatccagagaagaggggttcatggaaggatgaaaaataaatacataaataaaaccaccctggagtcatagaggaaggagagattgtcatcatacatgtgtggggaccagtgaacggcacatgaacactggaagtggtatcgaacccagaaactggataatcggtagacccaagtaaagtggaagacagaggaaaagaaccaagagaggttgtaatggatgaagaagactcatggacaggcctggagaagaagctaaacgtggatgaaatggaaagagcagtacctggtgctaaggtttccaggctttcagtagacacaattgtagaagtgaagcttggactggtgtggaaggtggtagattcctcagtgaggcctgatgtgctggaactcgcaggaaagagtgttgtgtaagtaggggatgggctgatgtagaaagttgtaggttctccaacaaggtctgaggctgtggagcgggcaggtaagggtgttgttccagttgcgtctgagctgctgtggaaggctgttgattcctgaccaatgtctgtggttgtgagggtggcaggtaacactgtgtgagtgaagcctgggctgtcagggaagggtgtagattgttgactatgaatggacattgtgttgctgtgagaaaacgctgtggtttcagttgagcctgggctgctgtagaaggtggtagattcctcactaaggcctggcactgtggtgctggcaggtgacactgttgacagagctgagcctggttggctatgaggggtggtaaattcttgagcaaaagatgaagttgtgatgctgccaggggacagtgttgtctcagttgagcctggcttactgtggaaagttgttgattcctgactgaggcctgaggtggtggtgctggcagggaacgctgttgtgtgtgttgactctgcttggctatacaagctggtgggttctccactgatgctggagcttgtcatgctggcaggtgagagtgtttggtctggtgatctggagctactgtaaaggatggtagattttgcactgaggcctggtgttgtggcagtgctggctaatgttgtttccattgagcctggagagatatagaaggtggtagattctgcaatgcggcctgaggtagtaaaatgggcaggtaagggtgtgattccatttgtatctgggctgctgtgggatgctgttgattcctcactacggccggaggttgtggagctctcaggaaagtgtgttgttgcaattgagcccgggctgctgtggtagctggtaggttcttcaacaagggcagatgtggtgctaggaggtgaagatattgtgtgtgttgtgctgctgtgggaagttcttgattcttcactacgacctgaagctgtggagctttcagggaagtgcattgtttgagttgagcccgggctgctgtggtacgccgtagattcttcaacgaggcctgaggttgtggagcgggcaggcgagggtgttgttgcagttgcaactgggctgctgtggactgttgtcgattcctcactacggcccaaggttgtggagctggcagaaaagtgggttgttggagttgagctcgggctactgtggaaagtggtagatttctcactgaggcctggcgttgtggtactgccgggtaacgctgtcgtttccattgagcctgaactgatgggtgaggtcgtagattctccaagaagaactgaggttgtggagcgggcaggtaggactattgttcccgttgcgtcttggctgctgtgggatgctgttgattcctcactacggcctgaggttgtggagctgtcagggaagtgtgttgttgcagttgagcccgggctgctgtggtagctggtaggttcttcaacaagggcagatgtggtgctaggagctgaagatattgtgtgtgttgtgctgctgtgggaagttgttgattcttcaccacggcctgaagttgtgttgctttcagggaagtgcattgtttgagttgagcccgggctgctgtggtaggtcgtagattcttcaacgaggcctgaggttgtggagcgggcaggcgagggtgttgttgcagttgcaactgggctgctgtggactgttgtcgattcctcactacggcccaatgttgtggagctggcagaaaagtgggttgttggagttgagctcgggctgccgtgggaggttgtagatagctcaacaaaggctgatgtggtagtaggaggtgcaggggtagtgtccttcgagtttggccagctctggaaggtggtagattctccctgacgggttgtagagccggcaggggacagtgttgtgtgtggcgatccagtgctgctgtggacgggtgtagatgcttcaaggaggcctgaggctgtggtgttgtcaggtaagagtgttgtttcagtggagcctgggctgctgtggaaggtagtagattctggaccaagggatgatgctgtggtactgccaggggacagtgttgtgtctgtggagcctgggctgctgtgggaagctgtagattcctgactgacgcctggcatggtggtactgctagggaatgctgttgtgtgcattgagcctggtcggctgtgggaggtggtggattcttcactgacgcctgagcttgtcgtgctggcaggtgaaagtgttgtgtccggtgatctggggctactgtagaaggtggtagatttctcactcaggcctgctgttgtggtactgccaggtaacgctgttgtttccgttgagcctgaactgatgggtgacgttgtaggttctccaacaagaactgaggttgcagagcgggtagggaagagtgctgttccagttgcacctgggctgctgtggactgttgttgattcctcactacggcccaaggttgtggaactggcagaaaagtgtgttgttggagttgagctcgggcggc

SEQ ID NO: 13669 - DNA, 1055 bp, Artificial sequence
  DNA replication origin
aagagtgagggacgtgaggttggcagggctttgggaatggggtggggggttgaggggctttggccgcccacctttttttgtgagacagagtctcactctgtcacccaggctggagtacagtggcacaatcttggctcactgcaacttctgtctcccaggttcaagcgattctcctgccctcagcctccctagtagctgtgattacaggcatgccaccacgcgtggctaatttttgtatttttagtagagactgtagagacagggtttcatcatgttggccaggctggtctcgaactccagaccttaggtgatccgcccgccttggcctcccaaagtgctgggattacaggcgtgaaccaccatgcccggtcacattttgaattttttttactcaaaaggccattcagggagcactaaagcagggagaccaggtggaggaagtgaggctgagggggtggggggagggagaggagacgcagcctggtggagatgaggctgagtgggtgggagagggagagggagtgagggaggatttccgggattgtccgagctgacccttgggccccgaaggatgggggagaagcagccggtggagcacactgagttggggggctggtgggtgctgaggaggaggctgcaaggctcgtgcctgtctgaatctccgggaggggtctgcagcctgaaccacgtactggaatagaggtttgtccattcatcggggagaatgcagagtgagaagtgaggagggtgaaaggagaacccccccccaggagcccccgtagaaggacaggtagggcatgaggaccccgatctaggaggacgcaggaaaagaggggtcagaggtgcagggagagccccggagtccagagagtgagtggttctgcgggaccaggaagtaagtgatcgctgtgctccgggaggatgctggaagaagattccagacgcagcttttttgcctgctatggttaccgttgctatgaaggagggcggccctgctgacccagagccagccctgtctcccgctccactctgacctcacccctgagtccagggct

SEQ ID NO: 13670 - DNA, 849 bp, Artificial sequence
  DNA replication origin
agggagtcccgggggaagggagggagtcccgggggaagggaaggggtcccagggggagggagggagtcccagggggaagggaaggggtcccagggggaggggagggagtcccagggggaaggggaaggggtcccagggggagggagggaatccaggggggaagggaggggtcccagggggagggagggagtcccagggggaagggaaggggtcccagggggagggagggagtcccagggggaagggaaggggtcccagggggagggagggagtcccagggggaagggaaggggtcccagggggagggagggaatcccagggggaagggaaggggtcccagggggagggagggagtcccagggggaagggaaggggtcccagggggagggagggagtcccagggggaaaggaaggggtcccagggggaggaagggagtcccagggggaagggaaagggaaggggtcccagggggaagggagggagtcccagggggagaagggagtcccagggggagaagggagtcccgggggaagagggaaccccagaggaagtggagcagcctcagggggtgggggcagctcgcagctgagtcacctctgtgccagagtcaacagtctccagggtgggccggaagttgttgtaggcgttctcaaggccgaatctgctctccctcagattctggtctgtagggagaggccgtgatgagtgatgggagccttggtagggggaggactagggggcagaggggatttcctctggcaaaaggaagagtcagcccggcatctgccctacgccctttcccactgccgaccacccctccgaccctgcatcactgggctgcgggtaag

SEQ ID NO: 13671 - DNA, 1176 bp, Artificial sequence
  DNA replication origin
ggcagagggcacacccctattggtgtcctggaggcagctctccctcggggatgggcagacagagcaggctggcccctgggatgggggcctcttgggcagcggggcgtgggggtcactcaccctgttctgcagcagcttgtgggggcaagagcgagaggaccaaggtcagcagacacagcgccatggtccctggccttggcatcggagctctgagcacgtctcacttgcctgtcacccccagaggagctggcgaaatgagcctcagagaaggaaactgataaataaatgggtgccagagacctttggtccctgagacactggggatcaggggccagcctgagcctgagtcagtctggaagcttccctcatgacttggggcgcagggcctgtttcaggccaaagggcagagggagggggtgcctctccctggcccggcagcccataggcatgagggttatcagctttatcaccccaacagaggggcagcccagagggcctgtaggagccaggggggaactgatgagatcccccgaccgagggtggtgggagatgggcaagagggactgggcctgagctgggaaaggaggagggtaccacctgcatttgaccctaacccctagcagggacaccccctttgtctcttttctaacccttcttattggccgggtatggtggctcacacctgtaatcccagcactttgggaggctgacgcgggaagatcacttgagatgaggagtttgagaccaacctggccaacatgatgaaacaccatctctactaaaaatacaaaaatcagccagacttggtggcgggcgcctgtaatcccagctactcaggaggctgaggcaggagaatcgcttgaacctgggaggcggaggttgcagagagccaagatcgtgcctccgtactccagcctgggcaacagagcaagactctgtctcggcaaaaataaataaataaaataacccttcttattgtcctatgagtatgccctgaagacatggccatgcctgggcagggagttcttgggtttggtctgtgggttccgaggtaagcacagctcccatggccatctggagtgaccctgccttgtgcaagctcagcagagccaagtgctcactccctggccaactggggttgaatctgaggtcctctcctgtccccagaacctgaca

SEQ ID NO: 13672 - DNA, 977 bp, Artificial sequence
  DNA replication origin
cgcctgtaatcccagcactttgggaagcagaggcaggtggatcacctgagattccgagttcaagaccaccctcgccaacatggcgaaaccccgtctctactaaaaatacacaaattagctgggtacagtagcgtgcatccgtaatcccagctactcgggaggctgaggcaggagaattgcttgaacctgggaggtggaggttgcagtgagctgagatggcgccaccgcactccagcctgggagatagactgagactcctcctcaaaaaaaaaaaaaaaaaaaaatctctcgggaggaggacaagagtgggatggtgatggaagtgctagatggggacagagccctagacagggatggggggagggcaaagggatacctgccatggacaggtgactgagcacccaagccttggtggccctcatgctgggtgtagggatgagagggcatctgtgatggcagggccgggctgggcaaacagacaggacattgtgttttgttgacaagcaatataaccaggtgatctgcaggatgagagggtgtgtctgctgggaaggaccaggctgaggccactgcagctctctctctagacccacgccctgccctggtatccccagccccatgacttcagcaggggtgaggctctgggtccctggagaagggacatggaaagggtcagaggctgcccaaagctggccagggtcccaaaggacagccaatgccaggcacagagacggaggagccacagaatcctggagagtaggaacagggtctgagaagtcacattctacaaaggcagactgaggctagggatgaaatcaatgataacacgcagaaagtggggagaggccaggaaggggccaaggagaggtggggagaagaagaaagagaagagagggggaaggaaggggctagaagaacccaggaagagggaagggaggagcagagagaaagaaaggagggggccaggagcggtggct

SEQ ID NO: 13673 - DNA, 906 bp, Artificial sequence
  DNA replication origin
tttcctcccattctgtaggttgcctgttcactccatggaatactatgcagccattaaaaaaggacgagttcacatcctttgtagggacatggatgaagctggaaaccatcattctgagcaaactatcacaaggacagaaaaccaaacaccaaatgttctcactcataggtgggaactgaacaatgagaacacttggacacagggcagggaacatcacacaccggggcctgccatggggtagggggatgggggagggatagcattacgagaaatacctaatgtaaatgatgagttaatgggtgcagcaaaccaacatggcacacgtatacataggtaacaaacctgcacgttgtgcacatgtaccctagaacttacagtataattttaaaaaaaaggaaaattcaagaaatcacttacatgttgtggttcttggcacagtaggagttgaggtggggttgctcttaattgtagtattcgtggggacagcggtggtggtcaccgtggggaaggaagtggtccgtgtgctgggttttgtcctggtggtcatggtggtgacagcctcagggttcacagtcgtggaggaggcagaggttgttggaggtgtactggagtgagcaggaggaaatgtaggtgggatggtgtgagaagtaattgttgacggcctgctggattctgatgaaggggtcacaggacgggtggtgacagaagtagaggtgtgaggtgtactggttgcagaaagcgttgatgcagaagtagtgcagcctctgctggttgttctgggtgtgctgggggcagtagacatggtcacatatgtgaggggagctgcagtagtcattgcgggtgttgtaaattccttagtagttgaaaaagatgtggtggtactactactggaggttgatggtgtgt

SEQ ID NO: 13674 - DNA, 900 bp, Artificial sequence
  DNA replication origin
acccgccctgaggccatgtgtctagttaccctggtctctgaatcacagatgagctctcatttcttcccacaaataaaccctgtgaccctccaccctctactcagagaacccgccctcaggtagttccctgtttgtgacatacacacacttagccctgaggctggactgacaggccgacctggctggtggactccagcccaagcctgccagctgcctgccggggtgggggccttggcgggagaggacggggccgggtggggaggaaggcggggcctgaggctgtgcgaggcgagtcggtgtgtccctggctgggacggaagttgcaccacaagtacaattagtttcagttttgtttcttttccaggcacccagcaacggcggcctccaggcctcaggccccctcaccatcctagaggtcaagatcagctctggctaggtaaggggtggggggcggcacagctataggaaggaccgagcggagggagtagggggaggggagtggagagagagcgcgggaggaggaggaagggaaggaaagggagggcgtgaagaggcacccggaaggcaggaggagagggcaggagggaaactgcactcgcctccctcccgctccgtggccacaggtccccgcaagaaagaccccgtcccactctctgaggtctcctcccagctccagaaaaggggacattccacctagtctgcccaacaagtaggtctcagccactgtgccaggagctcgggactccctccctccagaggtttctggaatgcattcagcaggaaaagctaaaagaacaggactccaggagataagccaaggccaagtctatcagagggtgagccagcagcgggaaggggaccagcccttcccctagcgttttttctgcccgctccagaatc

SEQ ID NO: 13675 - DNA, 1224 bp, Artificial sequence
  DNA replication origin
acagcttcagccagaggcaggcaggggtggtccaggtgggggtctaggcggcactctctgcacagcaactgtgagcagggctggcacaggaagcgcagtgcctccccggggtgctggggacactgggccgcttggcgctcccgggcctcctcatcataccacccggccctgtagcccaccaggtccaccacgcggtgggtgtgggtctggcgggtgcagcggtgcccgtcggcacaggcctggcacaagtcatcggcacagtccaggcaccgggccgtggccggccccccggtgctggtgccacccaccaggggacacagggcacaggctggcttcccggcacgcaggtctccacaggcccgggccttcaccaggtccagcagcccattgacgaagaagttggtcttgaaggaggccacaccctcgggcggcacaggcactgtctcgcggcactcggggcagcggacgcggccgccatccgccagctgtgccaggcagtcttggcagtaggtatgcaggcagggcagtgtcttgggtgcccgcagctgctccaggcagattttacaggccaggaagtcgctgctcagggcctccaggagggagggcgaggacccgtgggaaaccatgctgcaggcagaggcgtcaggatcagagttgagaaggcaccttcaccagctcaccctctagcttctaccgcccgtcctcaagccccacggatccccagggctaggggctgacccaaatggccgggaaggaacctgaggtctcacctgaatggccaggaacttccttctagtcttctgaggccttgggccacttgctcttgagctaaggagctgccctcctccttctcctcctcctcctccacttccgtgtgtacatccagcaaacgtaaaaatgtcagtgctacttgttgggtcagacctgtgagaactgacaagaccaggagtccctggccttagctaataatcgaatcctcagtgtccccagtccacaggccttgtggcaaacatggtggaagccctcctgtgtgcacaggtactggggtcctgctgtatagggtgccagggtgcgaggagcaggcagtaaggacacagacggggatcccagtgggcagagatgcctaggtcctgccagttggggtaggatcttgcagtagcttagggggctttaatcctccaagccccatacacctgccttctttttattttattttagttttta

SEQ ID NO: 13676 - DNA, 1073 bp, Artificial sequence
  DNA replication origin
ccagccctgctcacagttgctgtgcagagagtgccgcctagacccccacctggaccacccctgcctgcctctggctgaagctgtgcgtgcccggaggccgggcctggagggactgctggccggtgtggacaataacctggtggagctggaggcagcgcggagggtggagaaggaggcgctagcccggctgcgggagcaggcggcccgggtggggactcaggtggaggaggcggctgagggcgtcctccgggccctgctggcccagaagcaggaggtgctggggcagctacgagcccacgtggaggctgccgaagaagctgctcgggagaggctggcggagcttgagggccgggagcaggtggccagggccgcagccgccttcgcccgccgggtactcagcctggggcgagaggccgagatcctctccctggaaggggcgatcgcacagcggctcaggcagctgcagggctgcccctgggcaccaggcccggccccctgcctgctcccacagctggagctccatcctgggctcctggacaagaactgccaccttcttcggctgtcctttgaggagcagcagccccagaaggatggtgggaaagacggagctggtacccagggaggtgaggagagccagagccggagggaggatgagccgaagactgagagacagggtggagtccagccccaggctggagatggagcccagaccccaaaagaggaaaaagcccagacaacccgagaagagggagcccagaccttggaggaggacagggcccagacaccccacgaggatggaggaccccagccccacaggggtggcagacccaacaagaagaaaaagttcaaaggcaggctcaagtcaatttcccgggagcccagcccagccctggggccgaatctggacggctctggcctcctccccagacccatcttttactgcagtttccccacgcggatgcctggagacaagcggtccccccggatcaccgggctctgtcccttcggtccccgggagatcctggtggcggatgagcagaaccgggcactgaaacgcttctccctcaacggcg

SEQ ID NO: 13677 - DNA, 1614 bp, Artificial sequence
  DNA replication origin
ctggcctcctccccagacccatcttttactgcagtttccccacgcggatgcctggagacaagcggtccccccggatcaccgggctctgtcccttcggtccccgggagatcctggtggcggatgagcagaaccgggcactgaaacgcttctccctcaacggcgactacaagggcaccgtgccggtccctgagggctgctccccttgcagcgtggccgccctgcagagcgcggtggccttctccgctagcgcacggctctatctcatcaaccccaacggcgaagtgcagtggcgcagggccctgagcctctcccaggccagccacgcggtggcggcactgcctagcggggaccgcgtggctgtcagcgtggcgggccacgtggaggtgtacaatatggaaggcagcctggccacccggttcattcctggaggcaaggccagccggggcctgcgggcgctggtgtttctgaccaccagcccccaggggcatttcgtggggtcggactggcagcagaatagtgtggtaatctgtgatgggctgggccaggtggttggggagtacaaggggccaggcctgcatggctgccagccgggctccgtgtctgtggataagaagggctacatctttctgacccttcgagaagtcaacaaggtggtgatcctggacccgaaggggtccctccttggagacttcctgacagcctaccacggcctggaaaagccccgggttaccaccatggtggatggcaggtacctggtcgtgtccctcagtaacgggaccatccacatctttcgggtccgttctccggacagttaaaggggctaggactagggtgagagggagtggggagggagagggcaggaaggaggcagagctgtccgtgggaggtggaggccgaggacattttcctgaagggcaggggttggcaacttttcaacatggagtgccaaactgctaacccgtcttctagtgtgtgagaatagggaccaaggtggtggcgtgaccttaactctcagaagcagaggaggcaggtgggtggagggggatgctgggagttcacctgcctcttgctttttgtgggtggctgctgccaccaccgccgctgctatatagtttaggtttctgaggtttgtgagcctgtcctgctttgcattcttcaaaaccattcctgatagagtagccgagggagagtcttggggccaagaagggcccagggtgggtcaggcgtgtgcactgtggaacagagctgagaccccggccccccttggactggcacagggtcctacagagtcagaggaggcctgagatttcgaatgggcagtgaatggcctcttctgccagccacaggcaggatgctccttgatcacggcatcccccggcggtagtacagggtgagcttgcaggagggtctgcaagtgcagacagcagctggggccaaagaggtgttaggttcaaaggctgcgaagagaataggctactggaaaaccaaacccaacagaattcacgtccaaaaatccacattctccatcgcttctcagccttttggctaagattaagtattaaaaaaaaaccaggctctgccaggcgcagtggctcatgcctataatcccggcac

SEQ ID NO: 13678 - DNA, 1284 bp, Artificial sequence
  DNA replication origin
aggtcttagattaacagcatcccaaggcagaagaatttttcttagtacagaacaaaatgaagtctcccatgtctacttctttctacacagacacggcaacaatctgatttctctatcttttccccacctttcccccttttctattccacaaaaccgccatcgtcatcatggcccgttctcaatgagctgttgggtacacctcccagacggggtggtggccgggcagaggggctcctcacctcccagacggggcggccgggcagaggcgaccccccacctcccggacgggacagcggccgggcggaggcgccccccacctcgctcccgggcggggcggctggccgggcggggactgatcccccacctccctcccggaaggcgcggctggccgggcgggggctgaccccccacctccctcccggacggcgcggctggccgggagggggctgaccccccacctccctcccggacggggcggctgccgggcggaggggctcctcacttctcagacggggcggctgccaggcggaggggctcctcacttctcagacggggcggctgggcagagacgctcctcacctcccagactgggtcgcggccgggcagaggcgctcctcacatcccagacggggcggcggggctgaggtgctccccacatctcagatgatgggcagccgggcagagacactcctcacttcctagatgggatggcggccaggaagaggcgctcctcacttcccagactgggcagccgggcagaggggctcctcacatcccagacaatgggcggccaggcagagacactccgcacttcccagagggggtggcggccgggcagaggctgtaatctcggcactttgggaggccaaggcgggcggctgggaggtggaggttgtagctagccgagatcacgacactgcactccagcctgggcaacattgagcaccgagtgaacgagactccgtctgcaatcccggcacctccggaggccgaggctggcggatcactcgcggttaggagctggagaccagcccggccaacacagtgaaaccccgtctccaccaaaaaaatacgaaaaccagtcaggcgtggcggcgcgcgcctgcaatcgcaggcactcggcaggctgaggcaggagaatcaggcagggaggttgcagtgagccgagatggcagcagtacagtccagcttcggctcggcatcagagggagaccgtgaccatggaaagagaggcagagggagaccgtggggagagggagagggagagggaccttggttttcttt

SEQ ID NO: 13679 - DNA, 824 bp, Artificial sequence
  DNA replication origin
ccgccccgtctgggatgtgaggagcgcctctgcccggccgcgacccagtctgggaggtgaggagcgtctctgcccagccgccccgtctgagaagtgaggagcccctccgcctggcagccgccccgtctgagaagtgaggagcccctccgcccggcagccgccccgtccgggagggaggtggggggtcagccccctcccggccagccgcgccgtccgggagggaggtggggggtcagcccccgcccggccagccgcgccttccgggagggaggtgggggatcagtccccgcccggccagccgccccgcccgggagcgaggtggggggcgcctccgcccggccgctgtcccgtccgggaggtggggggtcgcctctgcccggccgccccgtctgggaggtgaggagcccctctgcccggccaccaccccgtctgggaggtgtacccaacagctcattgagaacgggccatgatgacgatggcggttttgtggaatagaaaagggggaaaggtggggaaaagatagagaaatcagattgttgccgtgtctgtgtagaaagaagtagacatgggagacttcattttgttctgtactaagaaaaattcttctgccttgggatgctgttaatctaagaccttacccccaaccccgtgctctctgaaatatgtgctgtgtccactcagggttaaatggattaagggcggtgcaagatgtgctttgttaaacagatgcttgaaggcagcatgctccttaagagtcatcaccactccctaatctcaagtacccagggacacaaacactgcggaaggccgcagggtcgtctgcc

SEQ ID NO: 13680 - DNA, 903 bp, Artificial sequence
  DNA replication origin
ggggtgagaggtgaatgggacgatcattggagttcgaagcagcaggcaggactcctggaaggggagtgggccgtgaaaagggagcagggtgggaattaagtgtaggggaggaggagtgacctggaaaacagaaagacaaagggtcatgagaaaagtatagaacccaagctgaatatctattgaaagcgtgatagatacacccctctagtttttttctttttagagacagggtctggccgcgtcacccaggttggagtgcagtggtgggatcgtgactctctgcagccttgaactcctggcctcaagcgatcctcccgcctcagcctcctgagtagctgggactacagacgcacaccgtcatgcccagctaatttttaatttttttttagtagagacgggggtcttactatgttgcccaggctggtctcgaactcttgggttcaagagaccctcccgcctcggtttcccaaactgctgggattacaggcgtgagccaccgcgcctggcttctgattttacagtaagagaaatgtgtagaaaaagaataaaagagaaaaggagaggctgctataaaaggcatgtaaggagaagggggaggaacgtgaactgaggcaaaaggggaagaaataaagagcgtcttaaaaggttaacttgggtcaaaactcaaaaagggacagatgtcacccaaatctcagtgtgaagatgaggtggatgtacgttgtaatatgggcttttaaactgaatgtgtgtgtgtgtctacatgttactggaaaaaggggtcccgatccagaccccaagagagaattcttggatctcatgcaggaaggaacccaaagcaagtcgtagagtgcgatgagaagagagagtttattgaaagctacacccttacggagtagggcgtcc

SEQ ID NO: 13681 - DNA, 1019 bp, Artificial sequence
  DNA replication origin
cagcggggatcgagggaccccaggggccaagaccagagcgcccctcccggctcgggacggccccgccgccccttcgtcagcccccgctcgccctgcaaatgcgccccctccccgcccctctcccgaatgccacctccccctcttcctcccgagcccggctcgcccacccgccgaggcaagggaggcctctgaggaccagagggaagacagggcggttcaccccgagggcggcccccgaggacccccgcaggtgcagcccacgcccctcgcttccccctcccctccctcttcgcacagcctaccatcctgcagcctccggctcggcgcgtcccacttcggccaccgtaggcgccagtcccactccctttcttatcctttctcctgctgccctccctctcgcccgaagccccgccccgtcccgcccaggctctgactcccggcgcgccacgcactgcgcaggcgccgacgccgcggggagcgcgggcggggctggaggcggagaagcggaaaccatggcaaccaggtccttgactgcagcttctaggagcccggtcgtcatggtaacgcggctgtcctgtgggctggttggaggatgggggaggaggacaataaggtcctcgcgctttggagccttgtggggcaaaaaggcgggaaaaggggtgagaggtgaatgggacgatcattggagttcgaagcagcaggcaggactcctggaaggggagtgggccgtgaaaagggagcagggtgggaattaagtgtaggggaggaggagtgacctggaaaacagaaagacaaagggtcatgagaaaagtatagaacccaagctgaatatctattgaaagcgtgatagatacacccctctagtttttttctttttagagacagggtctggccgcgtcacccaggttggagtgcagtggtgggatcgtgactctctgcagccttgaactcctggcctcaagcgatcctcccgcctcagcctcctgagtagctgggactacagacgcacaccgtcatgc

SEQ ID NO: 13682 - DNA, 830 bp, Artificial sequence
  DNA replication origin
gggagtcagagcctgggcgggacggggcggggcttcgggcgagagggagggcagcaggagaaaggataagaaagggagtgggactggcgcctacggtggccgaagtgggacgcgccgagccggaggctgcaggatggtaggctgtgcgaagagggaggggagggggaagcgaggggcgtgggctgcacctgcgggggtcctcgggggccgccctcggggtgaaccgccctgtcttccctctggtcctcagaggcctcccttgcctcggcgggtgggcgagccgggctcgggaggaagagggggaggtggcattcgggagaggggcggggagggggcgcatttgcagggcgagcgggggctgacgaaggggcggcggggccgtcccgagccgggaggggcgctctggtcttggcccctggggtccctcgatccccgctgcagggaagccgcccgaagcagagggttgcgggagtctctttgctgagggagggagcgggggtcaccagtcaccgagacccccttcccgggctgcacaggcgggagcggggacccgggtggggagaggggtgtgggaggggagtttccgggtcggaaaagggagcgccctactgcgttcgtggccgtgcttgcctagaggctgggcccaggtagggaagcgaagtggactcgtggtttttctccgagggacccaggctttgggatcccgggctccggggctctctgccccccttcccattctctttccggaatccaggccttccgtcttcctgcttgctccccacccccctatttgagcgccgcacgaggctccccagcgcccctcttttccc

SEQ ID NO: 13683 - DNA, 1129 bp, Artificial sequence
  DNA replication origin
cgggggtcaccagtcaccgagacccccttcccgggctgcacaggcgggagcggggacccgggtggggagaggggtgtgggaggggagtttccgggtcggaaaagggagcgccctactgcgttcgtggccgtgcttgcctagaggctgggcccaggtagggaagcgaagtggactcgtggtttttctccgagggacccaggctttgggatcccgggctccggggctctctgccccccttcccattctctttccggaatccaggccttccgtcttcctgcttgctccccacccccctatttgagcgccgcacgaggctccccagcgcccctcttttcccctccaccaaaaaaatcagttctcctgaattctgatttttcacttactaagctagtacagtgccacacacccagggattccaagcctgggcatgtccatgaatagaagagctactggggtaaggagaagactccaggatgtggcccagaccccccggaactgggaagctggggtacactgggcagtgagggttctgtcttccatcccacttgacccagcttgctgtctgttctgcagacattcttttaggggaaccccctgggtggcggggccctaactgagggaaattggtcacctggtgtctggggaggagtgggcgcttagcaggaggcaccctaaaaggaagaaaagttaaagagaaatgtcgaagaccaaatgcctgggtgcctgcagagaggaagataggatttgggcatctgcataccctgtgtggtgttggagatacatactacagaggaggatacccctgggcataggcctggcactggaggatgatatgtttgggagatcattaagatcttatggctatgatggggtggaaaattgaggtagcttctccagggacaaaataccagatttcagcatggtgatggatagagagagggtggaagagaacaggcatttctttggcgtcggttactgtcgtcttgtcactgtgctaggcattttacttacctttagaaagcagaccagaaagcaagaggtcagggaatcatggtaataatagtaataactaacggccgggcgcagtggctcatgccttaatgccagcactttgggaggcctaggtggg

SEQ ID NO: 13684 - DNA, 845 bp, Artificial sequence
  DNA replication origin
ccacagctcactccgaaaggtgaggcagcagaggaggggcagccgagtcccaccaagaacagggccctgggcagaggagaagcagccgttcccgccacgctgccaggaccccatcgccacaccccggcccagcaggggctatgccaaacccatctcctccagcacactccgtggcgactcatcctcctaaggcagagacagacagagggtgacgcagagacaccaggagaggccgacagggtgggcaagacagcagtcacgaggaagagtcagacgggggaggcacagacacgggggagggggagagaagccaatgtgagcccaaggccggaccagtgagcccttcatggggcacccaccagcctcccagggccagccccagagccagccaacagtggcagggggggtccaggttgagtccgtcaccacccagagaacccaaagccaggaccttggtaagcaggggccccgccttgacacctgggggtaaagggagtgaagccgggacaaggaggtgggggatctttctggggccctggggggtacagctgactgggtcctgtttttcagagtggggaaaaggcagagggaggtgagtgccaggtccctgagggaaggtgaaccaggctgcagggagatgcgtcattagggtctgagcgcaacactggtgacacgatgggtgtgtgtgccagggcatgtgtgtgtgtgtgtgtgtgtgcgcgccagggtgtgtgtgtgtgcgtgtgtgggaaggtgaagctcgaccagtgaggtggcaagttcagttctgccctctctcccactgcaaagatgagccctccctcgccccccatctctccccctcc

SEQ ID NO: 13685 - DNA, 1161 bp, Artificial sequence
  DNA replication origin
ctaccttaaacggatttttatgcccaatgcgtctccaaacgggctgcccccaactccctgagctgcctttatggaaggaggagcaactcttcaggatgcgggtctgttgtgggtgatttcgtttgcccagtttagttttatttgaatcagttcacaagtacctgcgattagaaaaggcttaagatgggaggccaaggtggggaggtcgcttgagcccaggagttccagaccagctgagcaagctggcaaaacctcatccctacaaaaaatgcaaacattagctgggcataatggtgcacacttgtagtcccagctactcaggaggttggggtaggaggatcacttgagcccaggaagtcgaggttgcagtgagctgtgattgcaccactgcactccagcctgggcaacatagtgagaccctgtctcaaaaaaaaaaaaaaaaaaaaagttaagaagtggctttagccagcatgtctctgtggctgccactccctcctccccgcatttcttgcaaagtacctaggaccaggaatgtagggatcagtggagggaggtgggtgggtgaacacaggaaactccggcattacccgcgcggccccaggatcttgggaaaaaggagcccactggcacccagagttgtggcaccttctgcgggtcgcctttttcttttgaaccagaggtcgctggactgatcgcagacaattggctcttttattgcattccgctgggcctctctctgtcaagccctggggaaagatgactttaccaccagcccccaagctggaagtggaatttcgggtttcttaatgggtgcgagccacattcttctcctctaaaaacagtttgaggactttccccacttaccccttgccttagtttgggggcaggaagcaggaggagacggggactgtggctggcgcttccctcaccgccccttgggaaggaccacacaggcccaaggggacgggtgaataaccgagaacaaagtcctaataaaatagtcacttttatttcttagcaaaactatttcctccgtgaggggtatttacaacagagaaaggaaagaaggggtcaattcacagcgacttggagaggctggaggggctcgtgggaggcccgaagggctggagacagacacacttcacacaattaactggaact

SEQ ID NO: 13686 - DNA, 877 bp, Artificial sequence
  DNA replication origin
tatggcgcgcttcctggggagagttccaggcgcgtgtcccggagcgcgcgcccctgccgcccccggccccctctcaattccaggcgcgtatgcccgacagcgggccccttcccgaaacccacaagttcggggaaggagtgtcctcccccaaaacacacctaggcgaggcattggcacccctgtccaaggcgtaccaaggcgtggccgccccgttccccaaggcgcgccggccggagagcgcactcctgggcggctccgaggcgggcgagcgccttctccagcaagggctggcgcaggtggaggccgggcggcggcaggcggaggccacgcggcaggccgcggcgcaggaagagcggctggccgacctcgcctcggacctgctgctccagtatttgctgcagggcggggcccggcagcgcggcctcgggggtcgggggctgcaggaggcggcggaggagcgagagagtgcaagggaggaggaggaggcggagcaggagagacgcggcggggaggagagggtgggggaagaggatgaggaggcggccgaggcggaggcagaggcggaggaggcggagagggcgcggcagaacgcgctcctgttcgcggaggaggaggacggggaagccggcgccgaggacaagcgctcccaggaggagacgccgggccaccggcggaaggaggccgaggggacagaggagggcggggaggaggaggacgacgaggagatggatccgcagacgatcgacagcctcattgagctgtccaccaaactccacctgccagcggacgacgtggtcagcatcatcgaggaggtggaggagaagcggaagcggaagaagaacgcccctcccgagcccgtgccgcccccccgtgccgc

SEQ ID NO: 13687 - DNA, 920 bp, Artificial sequence
  DNA replication origin
cgggagaggcaggcaccctccaatcgtcgggcgtccttcctcctccgggcggccgcccgcttccccatgaatgaacattgacgtcaatggggcggggcgcgcccacgtgaccccgcgcgctcccctttataaggcggtggaggcgcgggcgctgtccagcgtgctgaagccggagcgagctagccgcccggagccgcgccgacccagctgagcccagcccacgggacgccagacctcgaccgtcgctcctaccccggccaccgctcggagccgaggcggacgcgtcccgatcttcccctgtccccaccctgccccgaccctcctctccacctctcgcgtcgtgacaccagctggtaaatactccgctgttcgtccctcaaaccctcggcagccagccgtgggcgtgagggagggttctctctcctctcgatgggggtgttgcaaacacagcggggagccccctggtaagggtccccggtaaacgggggagtcgcagctttttctcttgctgctgaagtcgcccacgcaccatccggggagtcctacggggagggagcagagatttttttttcccccatattgctgctgcttagtacgtgggcgatggcagtgagatggctcagggaaggggccgaggaggccctgggtaagcgagggcttcgggggttattttcccatttacacggctccagagatcggcacaacatcttcctcctttgctcctaaacgttcctcttctgggtaaggtttgggggatcagggaagccccgggtttcctgctgaaaggtgggggaagggaacgtagacctagagaggggaattcttacagaaatcctctttttttggtcccttctatttttcagtctccggcagcctcttggtcatgaaagccctcagattgtcggcttccgccctcttct

SEQ ID NO: 13688 - DNA, 776 bp, Artificial sequence
  DNA replication origin
ccccatcgagaggagagagaaccctccctcacgcccacggctggctgccgagggtttgagggacgaacagcggagtatttaccagctggtgtcacgacgcgagaggtggagaggagggtcggggcagggtggggacaggggaagatcgggacgcgtccgcctcggctccgagcggtggccggggtaggagcgacggtcgaggtctggcgtcccgtgggctgggctcagctgggtcggcgcggctccgggcggctagctcgctccggcttcagcacgctggacagcgcccgcgcctccaccgccttataaaggggagcgcgcggggtcacgtgggcgcgccccgccccattgacgtcaatgttcattcatggggaagcgggcggccgcccggaggaggaaggacgcccgacgattggagggtgcctgcctctcccggcctgcgcctgcgcgctggggccttcggctgaaggggtgtgcgctagcggagctccgggaaatgaatgaatgaatgaatgaatgaaatgctgaagcgggcagggcggggggctatgaatgaatgaaggagggacgaggagaaaaggatgaatgaatgaatgggagaatgaatggaagggtggatgcagaggcgctggaaggcgggagggtgggttgcagagcaacttggagctgctggatggagcccgcgttgctgagtggaatagaaaaagggtagtcccagcgtctgactgggcaccagtgggagctcaatactggggaggggaaggataaagattcaa

SEQ ID NO: 13689 - DNA, 769 bp, Artificial sequence
  DNA replication origin
attgacgtcaatgttcattcatggggaagcgggcggccgcccggaggaggaaggacgcccgacgattggagggtgcctgcctctcccggcctgcgcctgcgcgctggggccttcggctgaaggggtgtgcgctagcggagctccgggaaatgaatgaatgaatgaatgaatgaaatgctgaagcgggcagggcggggggctatgaatgaatgaaggagggacgaggagaaaaggatgaatgaatgaatgggagaatgaatggaagggtggatgcagaggcgctggaaggcgggagggtgggttgcagagcaacttggagctgctggatggagcccgcgttgctgagtggaatagaaaaagggtagtcccagcgtctgactgggcaccagtgggagctcaatactggggaggggaaggataaagattcaagagccgaccagggggccgggttccccaccccgagaccacgcgcccaaggacggcgtgaacctgagtgcagagggacagatctgcacgcctgcgggcgctgtccgcgaatcggcagtgcgggtggcagccccctgacaggggcagatgggtggatcttgcggttttggtaatcccatcgggaagggtccgagtcggaagagaaaagggaaagaatgaggatgtgtgtgcctctgggtcgtgtctgtttcacgatccgtgctgtgtctggagaaaaaggtgtgtctgtccttctgtcccctgactgccgcttgtgtcaaggccccccgctgtgcccccttcg

SEQ ID NO: 13690 - DNA, 1347 bp, Artificial sequence
  DNA replication origin
ccttcggcccatctcttcccacactcccccagtcgctttccctcctgccgctcccctcccccaaggacgtttggagggcgagaccagagcaggtggggagggggttgcgcaggtggggggggggtgactcaactccagctctctccaccgcttaaagggaaggtttgaacgcgatgggagggggacctgcaacgtcagagatagcccctctctgccaccagccccttcgaccgtatctcctgccagagaggttggggctgggggcttggacagctagaggttccgggggtggggggcgatgacgcacagatttgcgcaaagagaatccatcagagagctgggtccggtgaagggagaccagccgtgggcgggggtgggggggaggacggaaatggggagggggcaggggagaggagagggtggcaaggggggcagccactgcaggaatgaaggggagggagggaggaagcctggagggggctgcggtgctggcagagagcggtgcgggggcgtgggcagggaaggggggaatgacaatgacacacgccagacacacacgaactgcggacataggggtgctcgtgggcacacgcagggcacccgcaccctgagactctggaaaccaaggtcagggctgtctgtcagggtcttagagactctttcagaaacggtcctcgcccccctcctcacctcttcctggcactgaccctccttctaacctccccctccctacacacacactcacgtgctttctctctataaccagcagtggcttctcgcttccatcagtggctcgactttcccagaagaaagcccatcagctctgcggggaaagaaatggggaggagtggagagggagaaaagagagaagagatgggggcaggggaggaggaaggaatgaagggatctggaacaggtagaaggagcaggctaaaggagaaaaaaaaactgagaaccaaggtgacagtggagattccaaagaaaggagggaaaagagggggtaggagaccccgaggcgatgcctcccatccccacgcacaactaaccacggcctcccctccttcctctccccgcccccatgtccccttcatcttcccagcctggatacagagagcagtgggatggggagggggtcacgttaccttcctgaggaggatgaatcagagagagatggctcagacatctggagagggggaggggaagccatccaagagagaagggagaggggagggagggagccaagggggctgactgagtggctgatggggatcagagaccaagttgcaagatgagagaagacgggcacctggagaaactgtatttgcctgttggcttgtgtatgcacac

SEQ ID NO: 13691 - DNA, 1375 bp, Artificial sequence
  DNA replication origin
tgcccaacaagaagttcaagctaacatcatcccacagagtgaagttctaggtcatgctctaggcttgggacacccgggttctattcgctgggaggctcctagctactttgaatgacttagaagtcactttgatctttcccagccttctgttttctccctctgcctttgatgtggggaaccagtattggagacagcgctgtgcagatgcagctgttactacttgcaattaaatagaagactctcaaagttctaaaagcataaatgatccagagaaagggagtggtgtccagaaataccaggaggtgggaattccagttgcactagaaggcggcctggttggaaccaggagacagcccctatgccaggctgagggacccgccctccactgtaccaaactcttcagctagaaccacaccacacacacaccaccaccaccaccaccaccccgcccggctcgggtgagctggggcacgggggagcctgcgaaatagcaaagttgtgcaaagcaggaggaaaccccagtgagagaggcaggctcagaaagtgcatcaccagatgaacaaggacccaaatgggggagcattctaaatacatttcattttacagtatcactctctctctctctggattgcacactgggctggtgatgggaaggaaaacagggacagaaaaatgggcactgcggtgttaagcgtcgtagagatccagcgaggatgaggatgaggggctagagagaagtggggagagggcactgatctctggcaccagaagcttgagcagggggaggggattggggtgtggagggcaatgcaggaccagtttttagggctttagaaagggcagaaggaagaaaagaaacgcggattgggcggctgcgctcgggaacgaggctgggcatcccacacactcctgagttcttccacccacgagggggcagaagggagaagccaggaaagggggagttcacgccccgggtgaggtgatggagagggaaggaaggactctgaagcctgtgcggggaccagttctttggaaaaacagagggtggataacagcagctcaaggcccccacccccagcccccacctaatagtccgcaagttcaggtcagggagtgggcaatggtgtttgggggagctagaggcaagatagtaagggcaaaagggacagagtggggggacctgcgccggtaagggcaggagggcaggagtcagaggggacttcccaggagacgcagcgtcggaaatggcaggaaagaggctggctggggaaactgcggaagggggcgggtctttttccccctccccgccagaggagaggcctcagatgtcggcctccagcaggtactgttcagtataacccttcaccagctccag

SEQ ID NO: 13692 - DNA, 1008 bp, Artificial sequence
  DNA replication origin
gaaggggcgcgtgcacagcgtgagcacgcgcgggcgcgcgcggctgtccacgcgccactccaggcccttggccgccagcaggcgcaggttgctttcgctaggccggtagggctgccagtcctggatgatggtcccgcctggaagcacgtcgcgctgcacggagggtgacagcaggaggcgtgccacgtcgccgcctgcctcggacacggcctcggtgggcagcggcgagaaggtgccagaggtccgcagcgccgccagccgcgcgcccagcccggccagcagcgcggacgcgttgaatcggaccaaaaggatgccctgcggggggcacgagtgagcgcggggagggggggcgcagcagggctggcgagcccggcgcctctcggcaggcatcttcactcccacgttcacgcccacgggctcccacctgggtccctctggaggagcgaccgtgagggctccgggccgagtggggtatgggaaagcctgggtttcaagggtaccagacagggaccaggggcacgggctcccagtacgtggatccccaagaagaggtgggatcagtatggagtagccagggaactgagggtacgggtccccgggtctccagggacgtgaaagccagggaggccgatcagtcagtaggattgggaggagcagagggaggacaaaggctcagaggagatggcttggggccctgaacagaggcaggatcctaggggaggcagggtccccgaagttgggaagtaaggactagggtttcaggctgggagtcgggagtttgacttcccctgggtcaaagggtctggtaaggactgggagtcccagggcaaggctcatgggccgcgccactcggtaaagcccagagagagagcaagcccgtgttctgctgggggtggggagggtctccccatatgccccagcagagaggcccagccatccgagctccctgtccttctcacctgcttggtgattaggcggtatttcttcagctcccgggggcccagctgg

SEQ ID NO: 13693 - DNA, 1124 bp, Artificial sequence
  DNA replication origin
ataaataagtaaataagtaaataaataaaagaaaagaaaaagaaaggctatttgtgtaggaaggggcattaggaccgtttgtgtgcaggggcccagatgtggaaacaaaggggctgatccaggtgctgaattctctttttttctgcagggtcatgaagctggaagccagctgtggcacagccacctcagaggtccctaagccggaaaagaagactgcccgagatgcagagccaagctctgaaacccggccacaggaggtggaggccgagcccaggtcgggatcggggcctgaggctgaggccgagccattggacttcgtggtggccacggaacgggagtttgaggaagtgctggccatctcggggggcatctacggcggcctggactaccttcctagccgctaccacagctggctccgggaccccgaccgcacggtggtgctggccaagcgcaacggaggcgtggtgagcccgggggcacggcccaggtgacatggggtgaagccacctgcgggtgcgtggatcttaggaagaggaggatgagagcttctccccagccttcctctggaggctgcggaaatagagcctgctttgggaccaaagtgcagggcgtgcagtgcggatccaggggctatgtcagtgagggtggggtggaggactcctaaagcagaggaaccagagggacaggtgagcgtttgaaagttcgaggatccaccggaggaatttctgggggtaaaagcaaaggaggtggggagcaggagagagagggtaggctaggggtgggagcaggaagagcttagatttgggctgggggaggagctaagaggaagtggggcgtggcaaactcccgggggaggagccaaggaaggggcgtggtgagcggtccggaacttgacacactcggagctggagcatctcaagaggtggaaggggccgggcgcgtcggctaactcctgtaaccccagctctttgggaggccgaggcaggaggatcacttgaggctaggagttccagaccagcctgggcaacatgcgagacccctgtctccaaaaaataaaaataaataaaaagccgagagtaggggtgcgtgcctgttgtcccagctactaggaagtcttgggggtg

SEQ ID NO: 13694 - DNA, 1414 bp, Artificial sequence
  DNA replication origin
gccgggcgtggtggctcatgcctataatcccaccactttgggaagccaagggaggcggatcatctgaggtcaggagttggagaccagcctgaccaacatggagaaaccctctctctactaaaaaaaaaaaaaaaaaaaaaaaatacaaaagtagccgggcgtgctggcgcattcctgtaatcccagctactcaggaggctgaggcaggagaatcgcttcaacccgggaggccgagattgtggtgagccgagatcacgctattgcactccagcctgggcaacaagagtgaaacgctgtcaaaaaaaaaaaaaaaaaaaaagaggaataacatttctctcttcatgtctatccccacatccttggggacattctttaaatctcataaatatgaatgatctctttggggagggggtgatcagagtcatagctgggcatgatcggagtcagagctgggaatgccggcagcccacccacccgcaccccactcccaccacaccccacacacctgaaatatcgatgcccttgaggccgatggcttcttgacactgggggagggaggagagggagggaagggagagcccagtcgccggagaggcggagacaaagaaggcagctgcacaaagcgcccaaagatgagagcgaaaaggacgggaatggaggcagagagcagacaaaagcggacaggagatgcggccgcaggggacaggcagggaagccggaggaggcttcgacaccgaatcacagacatgacacctcgtgactctgggcccagcagatgaaaaaaaaaaaatcctagcacgcaccccctcccctgggacactgtaaatagaaagcagcgtgacacacccccttcgccccggggtatggggggcggggatccgtggaggggaaggggtcaaggggaaaagaaagtcagaaaaaaggccgtaagagaacaaccttggaaacagagacggggagaggcgatgaagtgggggcgggagagaaggcctagggggtgggcagaggcaggggccgaggaagatggcccagccaaagggggtggggggagggccccagagggccacagtagtggagaagggggggctgtcctgcagggtcttcccgagtgagggtcttccctctgcctctaccccggattgggggcttgggcttgggggagagggagattgcaaagggagcgatctgcttggcgggggttcccctgggcgccggaccctggggacaggtgggagcgacatggcaacagaggggggcgggggagcgcttctggacacctgaagcgcagcctctgactcagttttctgggtcttcggactgggaggggctgggcagaagggggcgcagccgcttggtccccctgaggggcggtggccttctgctgccccattctgcggtggaggagcacgctagc

SEQ ID NO: 13695 - DNA, 1353 bp, Artificial sequence
  DNA replication origin
cctctgactcagttttctgggtcttcggactgggaggggctgggcagaagggggcgcagccgcttggtccccctgaggggcggtggccttctgctgccccattctgcggtggaggagcacgctagccccctccccagtccccaggcccggccgcccccctacctcgccggagccggagctggagccagggccgagatgccgcaaagccaagcggggcgggcggcgggcgcagacacccccggtgccaagagagaggtccctttggagcccccaagagtcaaaggaggatgacgcgcggggactcggccgcgctgtcggagcccgactctaacgtcggtcagcgctggggcagcgccgcagctccgttggcgacgcgggccggggcgcccatcggttcaggggttcgggtggcacgcgtggctcccccggcgacgctccggcggcagcttcgaggggcggagaccccggcgacgcggaagaaacccgggacggatccggagcggactcgtgccctgctggcggggccgggggtcggggtgcgccctgggcagctgggtggcctcaagccctactggcgagactccgccctgtgtcccggctggggagtgggactgaggatggtggtgtctcgggttttggtggtggtgatgctggtgttgctggcttagttatctccccaccccacgcccagcacctccgttctctgtccgggggtcccccactgccctgaagtacccctcctccaggagccacccctcaatggaatctcctctctccattataagagcggctgggaaggggactccgagccttcgtccccggaaactgatagagggaatcagaaaccctagaacaccgggaaggcgaagagacatcaagagacagaagttgaaaggctgaaaagggcagagggaggccaagatctctccatcttctcaccactgcgtgggtgcctgagcaccctggttccccgggtgcacaaggcccctaaatccacaatgtaccccacgggacagcaggcagaaagacctccaggtacacagcgcacacccaggcacattcacacagacctctgcactcaggaggcgctgcaccccacgctgatcctggtggctggggaggaagagggaagtgtggagctgggacccgggtgggtgcagcgctgcccctgctctaataaggcggtggcccaggctcttaactcctacaaggttctccatcccacctataaagtgagctcaagactgggtgcggtggctcaagcctgtgatcccagcactttgggaggccgaggcgggggaatcacttgaggtcaggagttcgagaccagcctggccaacatggtgaaacccc
